United States Patent Application Publication US 2011/0287957 A1 - sequence listing, part 2

SEQ ID NO: 734 - DNA, 4973 bp, HOMO SAPIENS
cagctatcaaaaaggccataaggattttgtccccaaatttcacatgagctaccttgcttcaaactactgagatgaagggggcaagattatttgtccttctttctagtttatggagtgggggcattgggcttaacaacagtaagcattcttggactatacctgaggatgggaactctcagaagactatgccttctgcttcagttcctccaaataaaatacaaagtttgcaaatactgccaaccactcgggtcatgtcggcggagatagctacaactccagaggcaagaacttctgaagacagtcttcttaaatcaacactgcctccctcagaaacaagtgcacctgctgagggtgtgagaaatcaaactctcacatccacagagaaagcagaaggagtggtcaagttacagaatcttaccctcccaaccaacgctagcatcaagttcaatcctggagcagaatcagtggtcctttccaattctacactgaaatttcttcagagctttgccagaaagtcaaatgaacaagcaacttctctaaacacagttggaggcactggaggcattggaggcgttggaggcactggaggcgtgggaaatcgagccccacgggaaacatacctcagccggggtgacagcagttccagccaaagaactgactaccaaaaatcaaatttcgaaacaactagaggaaagaattggtgtgcttatgtacataccaggttatctcccacagtgatattggacaaccaggtcacttatgtcccaggtgggaaaggaccttgtggctggaccggtggatcctgtcctcagagatctcagaagatatccaatcctgtctataggatgcaacataaaattgtcacctcattggattggaggtgctgtcctggatacagtgggccgaaatgtcaactaagagcccaggaacagcaaagtttgatacacaccaaccaggctgaaagtcatacagctgttggcagaggagtagctgagcagcagcagcagcaaggctgtggtgacccagaagtgatgcaaaaaatgactgatcaggtgaactaccaggcaatgaaactgactcttctgcagaagaagattgacaatatttctttgactgtgaatgatgtaaggaacacttactcctccctagaaggaaaagtcagcgaagataaaagcagagaatttcaatctcttctaaaaggtctaaaatccaaaagcattaatgtactgataagagacatagtaagagaacaatttaaaatttttcaaaatgacatgcaagagactgtagcacagctcttcaagactgtatcaagtctatcagaggacctcgaaagcaccaggcaaataattcaaaaagttaatgaatctgtggtttcaatagcagcccagcaaaagtttgttttggtgcaagagaatcggcccactttgactgatatagtggaactaaggaatcacattgtgaatgtaaggcaagaaatgactcttacatgtgagaagcctattaaagaactagaagtaaagcagactcatttagaaggtgctctagaacaggaacactcaagaagcattctgtattatgaatccctcaataaaactctttctaaattgaaggaagtacatgagcagcttttatcaactgaacaggtatcagaccagaagaatgctccagctgctgagtcagttagcaataatgtcactgagtacatgtctactttacatgaaaatataaagaagcagagtttgatgatgctgcaaatgtttgaagatttgcacattcaagaaagcaagattaacaatctcaccgtctctttggagatggagaaagagtctctcagaggtgaatgtgaagacatgttatccaaatgcagaaatgattttaaatttcaacttaaggacacagaagagaatttacatgtgttaaatcaaacattggctgaagttctctttccaatggacaataagatggacaaaatgagtgagcaactaaatgatttgacttatgatatggagatccttcaacccttgcttgagcagggagcatcactcagacagacaatgacatatgaacaaccaaaggaagcaatagtgataaggaaaaagatagaaaatctgactagtgctgtcaatagtctaaattttattatcaaagaacttacaaaaagacacaacttacttagaaatgaagtacagggtcgtgatgatgccttagaaagacgtatcaatgaatatgccttagaaatggaagatggcctcaataagacaatgactattataaataatgctattgatttcattcaagataactatgccctaaaagagactttaagtactattaaggataatagtgagatccatcataaatgtacctccgatatggaaactattttgacatttattcctcagttccaccgtctgaatgattctattcagactttggtcaatgacaatcagagatataactttgttttgcaagtcgccaagacccttgcaggtattcccagagatgagaaactaaatcagtccaacttccaaaagatgtatcaaatgttcaatgaaaccacttcccaagtgagaaaataccagcaaaatatgagtcatttggaagaaaaactactcttaactaccaagatttccaaaaattttgagactcggttgcaagacattgagtctaaagttacccagacgctcataccttattatatttcagttaaaaaaggcagtgtagttacaaatgagagagatcaggctcttcaactgcaagtattaaattccagatttaaggcgttggaagcaaaatctatccatctttcaattaacttcttttcgcttaacaaaactctccacgaagttttaacaatgtgtcacaatgcttctacaagtgtgtcagaactgaatgctaccatccctaagtggataaaacattccctgccagatattcaacttcttcagaaaggtctaacagaatttgtggaaccaataattcaaataaaaactcaagctgccctatctaatttaacttgttgtatagatcgatcgttgcctggtagtctggcaaatgttgtcaagtctcagaagcaagtaaaatcattgccaaagaaaattaacgcacttaagaaaccaacggtaaatcttaccacagtcctgataggccggactcaaagaaacacggacaacataatatatcctgaggagtattcaagctgtagtcggcatccgtgccaaaatgggggcacgtgcataaatggaagaactagctttacctgtgcctgcagacatccttttactggtgacaactgcactatcaagcttgtggaagaaaatgctttagctccagatttttccaaaggatcttacagatatgcacccatggtggcattttttgcatctcatacgtatggaatgactatacctggtcctatcctgtttaataacttggatgtcaattatggagcttcatataccccaagaactggaaaatttagaattccgtatcttggagtatatgttttcaagtacaccatcgagtcatttagtgctcatatttctggatttttagtggttgatggaatagacaagcttgcatttgagtctgaaaatattaacagtgaaatacactgtgatagggttttaactggggatgccttattagaattaaattatgggcaggaagtctggttacgacttgcaaaaggaacaattccagccaagtttccccctgttactacatttagtggctatttattatatcgtacataagttagtatgaaaaacagactatcacctttattgagaaacagccagtgttttcatttatctttgcttgcacatctgctctgttttggtttttctacaggaaatgaaaatcaacttgtttttttaatatgagtaaacttgtatgtctattttataaaattatttgaatattgtttaatgtctgaatatgaaagagttcttgatcctaaagaaatttagtggcacagaaaacaaagtgaatttgttagcataattattcctattcttatttcttcattttaagtcattgcaatggaaagtaatattataaaatggtaattacaacatattatcagtcacagttttctttccaattaaacacttaacttttgttattccctgtatataaatatataacacacattttctagattcacaaatttaaataaattactcaaaaaatgaaaattgattttgtaaacttttatttttactctttacgttgagttgatcaattttccatactaagattttcattcagaatcaaaattaagaaagttggactgaaaatatgaaaaatgcttaactattgttctcttcctataattctctaattataacatagtaatttacatgtagttggacatgtacactcaagtctaagaatatatgagtggatcatttaccgccccccgccccacaacatctataaggggcaaaaagtctttttctaataagtattcttctatggtagtacctacagatctgcccttcttcttctaaagggtaagtcataatctgtgtaatactacaatttatgggatgctcactatgccctgtttctcttctaaacaatttacatgtaatgtctcattcctcacaataacccttgtaaagtgggcatgattaccatgatttttatagttgaagaacctaagacacagagaccaaggcccatgagctcatagggctgaggcaggatttggaatcaggccatgtcttctccagagcccacatccatcctttctctatattgcctcccacagatgtgctaaaatttatttaactaatcctttatcctctatttgtgttgtctcccattttttattattacaatattactgtggtgaacatgcttaaaaatacattccttggatatctgacaacgtgtttctgaaaaacagattttcataagtaataataaaaataataataaaaaagttttggtatggtaaaaaa

SEQ ID NO: 735 - DNA, 3859 bp, HOMO SAPIENS
atcatagcaataagatttgtaaaacattgcaatggctgaaaaactgtctaacaggaaattttaagtgttattccaaagaagaacaagcctaaaaatgatgatgtgcctgcagatatggttgcagaagaatcaggtcctggtgcacaaaatagtccataccaacttcgtagaaaaactcttttgccgaaaagaacagcgtgtcccacaaagaacagtatggagggcgcctcaacttcaactacagaaaactttggtcatcgtgcaaaacgtgcaagagtgtctggaaaatcacaagatctatcagcagcacctgctgaacagtatcttcaggagaaactgccagatgaagtggttctaaaaatcttctcttacttgctggaacaggatctttgtagagcagcttgtgtatgtaaacgcttcagtgaacttgctaatgatccaattttgtggaaacgattatatatggaagtatttgaatatactcgccctatgatgcatcctgaacctggaaaattctaccagattaatccagaagagtatgaacatccaaatccctggaaagagagtttccagcagttgtataaaggtgcacatgtaaagccaggatttgctgaacatttctacagtaaccctgcaagatataaaggaagagaaaatatgttgtattatgatactattgaagatgcccttggtggggtacaagaggctcattttgatggacttatctttgttcattctggaatatatactgatgaatggatatatattgaatctccaatcaccatgattggtgcagcacctgggaaagtggcagacaaagttataattgaaaacactagagattcaaccttcgtttttatggaaggctctgaagatgcttatgttggatatatgacaataaggtttaaccctgatgacaaatctgcacaacaccacaatgcacaccactgcttagagattacagtaaattgtagccctattattgatcactgtatcatccgaagtacatgtacagttggttctgcagtatgtgttagtggtcaaggagcatgtcccaccatcaagcactgtaacatcagtgactgtgaaaatgttggactatatataacagatcatgcacagggaatatatgaggataatgaaatttccaataatgcgttagctgggatttgggttaaaaatcatggaaacccaattattagacggaatcatattcatcatggacgtgatgttggtgtgttcacatttgatcatggcatgggttactttgaaagttgcaatatacacagaaataggatagcaggctttgaagtaaaagcctatgctaaccctacagtggttcgatgtgaaattcaccatgggcagactggaggaatatatgtccatgaaaaaggaagaggacaattcatagagaataaaatctatgcaaacaactttgcaggtgtatggattacctcaaatagtgacccaacaataaggggaaattctatatttaatggaaatcaaggaggagtttacatctttggtgatggacgaggccttattgaaggaaatgacatttatggcaatgcattagcaggaattcaaattaggacaaacagttgtccaattgttcggcataacaaaattcatgatggccagcatggtgggatttatgtgcatgaaaagggacaaggagtaatagaagagaatgaagtttatagtaacactctagctggagtctgggtgacaactggcagcactccagtactgagaagaaaccggatacacagtggcaagcaggttggtgtttatttttatgacaatggacatggagtgctagaagacaatgatatctataatcatatgtattcaggggttcagataaggactggaagcaaccccaaaattagacgcaacaaaatctggggaggacagaatggtggaattctagtttataattctggtctaggctgtatagaagacaatgaaatatttgacaatgcaatggctggagtctggattaagacagatagtaatcctacactaagaagaaataaaatccatgatggaagagatggtggcatctgtatatttaatgggggtcgaggtctccttgaagaaaatgatattttcaggaatgctcaagcaggtgttctcatcagcactaatagtcatccaatcttaaggaaaaacagaatatttgatggatttgccgcaggtattgaaattacaaatcacgcaactgcaacactagaaggcaatcagatttttaacaaccggtttggaggcttatttttagcatctggtgttaatgtgacaatgaaagataacaaaataatgaacaatcaagatgccatagaaaaggctgttagtagaggccaatgtttatataaaatatcaagttataccagctatcccatgcatgatttctacagatgtcatacttgtaacaccacagatcgaaatgccatatgtgtgaactgcattaagaagtgccatcagggacatgatgtagagtttattagacatgataggtttttctgtgactgtggtgctggaacactgtctaatccttgtacattagctggtgagcctacacatgatacagatacactatatgactctgctccacctatagaatctaatacattgcagcacaactgaattccttccctaaagaaaaagtcctgccattgtaacatcataacttaaaacacttttttggaagaagatttaaaatatttgcccatgctacaggaagagactgtattaaaaatggatacacaaggtcagttgacactatgaagctcaagctaccaaaaagaaagtggcaatatattgactcaggatctcaaagctgggtgttttagcattactgtgtaaagacttgaagggacagaagtgaagaaaataagctgcaattttgtacagataccaacttctgaaaagctggtgtttttacaactagcattgaatgcagtccaatttgcagtagtaatcttcaatagacaagcagctttgttgctgcctttatggacatgggtaccaattgcttttgtaatatggtaaaaatgtgagctagcacttctgcgttccttttgattttttttttttaacatgtattcagattgagaaatatgattttaatgctttaatctcatgtagtttgtttttaatttcaagcaaaatcttactgtacttgaatgtgccctgttttgttagcacacctagacttgctgtaactgtactcatgtcccagtatgtacgttctttctatgaaagagaaaacactaatcttaaattatatccagcaatgtttctggtatcctttaagaaaagttaagactattatttccttcccttccctgtgcagcattcaaaatcacccctagaaaaagtgagtgttttaatgagacttcctaggaagggatgcactgtaaaacaaaagtattcttgtaactcagttttgtgaaaggtaaaaaactactatgttttaagtacactttagaaagtctcttcaaaacaaacagtcctgtatttgaactctgttcatagtttttttttgaacagtttagacaaaactgctggaaattaaaccaatttcctgcattaagctgagacaagtatatatacagccctatacagtttcatagcttttcctcccccatttatgtgtattggtgacagtgggtataaaacagcctgaaagtgtatgcatgtaccataacatctagacttaatatattgtggagtattcaataaccattatgtagaaggtagataagaattaaaagggtttaatttcctagaaagaaaatggaaaaatggtcatttttaaaaaataaagtttattagatcataaaaaaaaaaaaaaaaa

SEQ ID NO: 736 - DNA, 7412 bp, HOMO SAPIENS
cgcttctgctcaacctagaccagccccagcttcagcctcagctcccctccttcctggatcgagcgcccgcactcccggccctgcagccacccgagtcccgctcgctgtcgcctgcacgcgagtcccccctggcacgcgctcccacatcccgggatcgtcccaacggcccctgcgcccttcctgggatcactccgactgccccgcgcgccctgggatcggtccatctaccccgcgtggccccagctgcttgcccggagcgccagctagcgctccccgctctccgctccccggcactctcggggggcccgcccgccctgcaccctggagctccgggccgcgagcctctgccaactcctctggaccctcgcggccgtgggcagcggctgccgcgcctgtctgcccgagggaggaccttcgcctctgcatttgtccagtaactctggctgtgccggatactgcttgggtaaaacgggcaccccaggaacatggcagacgaagatctcatcttccgcctggaaggcgttgatggcggccagtccccccgagctggccatgatggtgattctgatggggacagcgacgatgaggaaggttacttcatctgccccatcacggatgacccaagctcgaaccagaatgtcaattccaaggttaataagtactacagcaacctaacaaaaagtgagcggtatagctccagcgggtccccggcaaactccttccacttcaaggaagcctggaagcacgcaatccagaaggccaagcacatgcccgacccctgggctgagttccacctggaagatattgccaccgaacgtgctactcgacacaggtacaacgccgtcaccggggaatggctggatgatgaagttctgatcaagatggcatctcagcccttcggccgaggagcaatgagggagtgcttccggacgaagaagctctccaacttcttgcatgcccagcagtggaagggcgcctccaactacgtggcgaagcgctacatcgagcccgtagaccgggatgtgtactttgaggacgtgcgtctacagatggaggccaagctctggggggaggagtataatcggcacaagccccccaagcaggtggacatcatgcagatgtgcatcatcgagctgaaggacagaccgggcaagcccctcttccacctggagcactacatcgagggcaagtacatcaagtacaactccaactctggctttgtccgcgatgacaacatccgcctgacgccgcaggccttcagccacttcacttttgagcgttccggccatcagctgatagtggtggacatccagggagttggggatctctacactgacccacagatccacacggagacgggcactgactttggagacggcaacctaggtgtccgcgggatggcgctcttcttctactctcatgcctgcaaccggatttgcgagagcatgggccttgctccctttgacctctcgccccgggagagggatgcagtgaatcagaacaccaagctgctgcaatcagccaagaccatcttgagaggaacagaggaaaaatgtgggagcccccgagtaaggaccctctctgggagccggccacccctgctccgtcccctttcagagaactctggagacgagaacatgagcgacgtgaccttcgactctctcccttcttccccatcttcggccacaccacacagccagaagctagaccacctccattggccagtgttcagtgacctcgataacatggcatccagagaccatgatcatctagacaaccaccgggagtctgagaatagtggggacagcggataccccagtgagaagcggggtgagctggatgaccctgagccccgagaacatggccactcatacagtaatcggaagtacgagtctgacgaagacagcctgggcagctctggacgggtatgtgtagagaagtggaatctcctcaactcctcccgcctccacctgccgagggcttcggccgtggccctggaagtgcaaaggcttaatgctctggacctcgaaaagaaaatcgggaagtccattttggggaaggtccatctggccatggtgcgctaccacgagggtgggcgcttctgcgagaagggcgaggagtgggaccaggagtcggctgtcttccacctggagcacgcagccaacctgggcgagctggaggccatcgtgggcctgggactcatgtactcgcagttgcctcatcacatcctagccgatgtctctctgaaggagacagaagagaacaaaaccaaaggatttgattacttactaaaggccgctgaagctggcgacaggcagtccatgatcctagtggcgcgagcttttgactctggccagaacctcagcccggacaggtgccaagactggctagaggccctgcactggtacaacactgccctggagatgacggactgtgatgagggcggtgagtacgacggaatgcaggacgagccccggtacatgatgctggccagggaggccgagatgctgttcacaggaggctacgggctggagaaggacccgcagagatcaggggacttgtatacccaggcagcagaggcagcgatggaagccatgaagggccgactggccaaccagtactaccaaaaggctgaagaggcctgggcccagatggaggagtaaccaggaaaatcactgccggctagtcccaagcaaacgggctaggaggaaagattaaaaaaacaacaacaacaacttatttagtttggggaggggaagcatttttaagtgtgttgtaaaatcaaattttatatttcattttttgactcttgaaaaatgtctttgctccttggcagctaccagcagagactctatagctgtctcttagggcagtattttggggaagtggggcttgaagaagcagcctaatgaaccaacataccgttttgtgtgtggttttttttgtttgtttgtttgtttgttttgagacagagtcttgctctgtcacccaggctggagtgcagtgacatgatcttagctcactgcaacctccgcctcctgggttcaagtgattctcctgcctcagcctcccaagtagctgggattactggtgcacaccaccacactcagctaatttttgcatttttagtagagatggggtttcaccatgttggccaggctggtctcgaactcctaacctcaggtgatccacctgcctcagcctcccaaagtgctgggattacaggtgtgagccaccatgcctgcccattttgtggttctattttcatttttatttctttttttttttttgtcacgagatataagaaagtgctttttgccttgaatggacaattttagggctgtgctcactagtcttttcaggctggactgaaatgtcgggcccatggagccctgtgttttgtgcatcgggatgagaaatgaagcacttcacgctggctttcctaagtcacggggcgtgtattgccgtggcttagtgcaaagcattctttctcagagcatttagaggcatgcgtggcattttttcagtgggtgtgagattgcacaatacccaggctcccttctactgtggggaagggcctgcatgttggctgttttttaaacttctagttcaatttccttccataatgctactgattttctggcatacagccgaattccatcttttaagcatgctttctacggtgggcttttcaaaacaggtttgagttttgtatgcacacgtttactacctctaactcctacatcagctagtgtggaagagggtgcacctcaaagcttttacacgtaaggacagcggcttggaatgtgagagccttttctccaagcagacccacactctgcatctcagtggcagctcccacaacgtgactgcaatgtctcttatacagtattccttggtgttttcttagtgtctggatgttcttacgtgaaatctgctccccagccctggtccttggcattttctgcttgaagctgggctgattttcttgtaatttacagcaggacgctttcagcagcagtctcttgggattttatctaagatgtttgaggatgagagggcaagaactataaacactcattaattctagtagtctccccatggccagacaatggcgattgttatttaatgagcttttcctttcaatggaattcagctctcacattagtatgatttcatttgatgtttcaaatagcaaagatgctaggtgcggtggctcccgcctgtaatctcagcactttgaggagggccaaggtgggaggattgcttgagctcaggacttcaagaccagcctgggtaaacatggcgagaccctgtctctaccaaaacaacaaaaaaaagacagactgctttgatcaaccctaaatgcaaaagcagcctatttttctttgtttaaaagtcaaaacataaaaaagcagagtataacatacaaaccattcttaactattcattaaaatgggtccttcaacaccttagtggggtttgttgttgttgcttatgcagagagattattttctttttattattttataatttttgaaatagagatggggtctcactgtgttgcccaggctggtctcgaactcctggacttaagtgagcctcccgcctcagtctcccaaagcgctgggattacaggcaggagccactgagcccagccaagacttcagtgttgactgctttggaggcacaaacccatgcaagcgttagttccaaagttcagtgtgtacccttaaatgaacaatgaagcaggtaaaattacccttgaaaaaaatcccttggaccacccataaatgacagtgactttttcaatatggactcatcatagccagttttccttttgaagttggaactgatcacccttttgtcatctgtaccagatcagtagttggcttgtgttacattttgtgtgtgtgtgtgcgtgttttaaaccagtgcatataaattgtatgttaaatgtaagtaactttaagttgacttatctcttcacagtaatcaagcctcacgtaattcatgctttttaaattcagccagccccccctctctgaaattttattatgtaaataatttgtgttccctgatcactcgtttaagttcttagttgtatgtcatctcttctctagcaggaattggcaaacttttttgtaaaggggtagaaagtgaagattttaggctttgcaggccatatagcctctgctgcaaatgctcagccctgctgttgtaatgtaaaagctgccacagacactacatgaacacgaatgagtgtggctggtgttccaataaaactttatttacacaaacgggtggcccttttgggctgtagtttgtcaacccttgctctaacccttgactgagagctactttattaagccctgagggcaggagctatcccaattttgtgttccccagggcaccaaaacacagtgctttggcatagagtaggcactcaacaagtgtgtgaacagatggagagccagccctagtcagtgcactcaccctttgaggctctggttcctccaaacaatgattcgttgtctggattggctggaactgtcacccccgcaattctactccccacccacccatgtgaccttaatgtcagttgctggtctgttgctcttcggggagggagagatggcctggatacagagctaagcaaatgcttctttaagggcccttaaaagtgaaaagtaacttgcaagaggttgagatccttctgagctaggagaacttattccaccttcaaaacctagtttgggctgggtgcagtggctcacgccactttgggaggctgaggtgggcggatcacctgaagtcagctactcgggaggctgaggcaggagaatcgcttgaacccaggaggcagaggttgcagtgagccgagattgcgtcactgcactccagcctgggcgacagagtgagactccgtctcgaaaccaaaaacaagaaaaacccctagttttgtgccttctgaagatagttaggacatcttctttttccgcaaatgctggacatgccaaaaacctaacgcaaaacccaggacattccagcccaactgggacgatatcagagaccatcttcaagtgcaagaagcaggtgaaagcccaggaaattggcagagccaggattatcatccagtactttcatttcacaaatggagaaaccgaggttctgccagctagattttttttcacagtgtcactgctagcaagccactaagctggagctgggatttgagagctgctgctatttagaggatcttgggaataaaatttaaactggagtttaatggccctttcagttttgctataggcaagagaataaaatgaatgaatggataggtggctttatgggtgtaagaaagaagcgaaaaaaactcccaaaccccagtgttcctgaatatctgttctccccctgaccactctgggaatttatcaaatgcagctttgacctccaagccaagtaaactgctcttgttgctattttagtggtttttgtttttttaagacacaaggtctcactttgttactcaggctggagtgcagtggcatgatcataactcattgtaggctcaacctcctgggccccagtgatcctcctgcctcagcctctcaagtagctaaaactacagatgtgcaccatcacatctggctaatttttttttttttttttttgaggtggagtctcgctctgttgcccagattcaagtgcaatggcacgttttggctcactgcaacctctgcctcccaggttcaagcgattctccctgtctcggcctcccgagtagctgggactacaggcacctgccaccacgcgcagctaatgtttgtatttttagtagagacgggggtttcaccatgttggccaggctggtttcaaactcctgacattaggtgatccacctgcctcggcctcccaaagtgctgggattacaggcatgagccaccgtgccaagccacgcctggctaattttttaaaattattttttgcagagacagagtttcactatgttgcccaggctggtcttgaactccttggcctcaagtgatcctcccacctcagcctcccaaagcattggggttacaggcgtgagccactgcacctggccctgttttcatggcttttatttcctttcatcccacacatttgtctgcagtactagacatgttttacaaatcaacaagtttacacaagtatatgcagcttgttttggggggaaaggagacaaaatatgcatattttctgtgtggatttgtgcctcttaattgtgtttctagtctctaaggtgaccctttaacctactcaagatggggcccagagaagtggcctgcgttacagatttattttggcatatgtactaagttccattttctctttacaaataaagtgttttctttcttttctgtctcaga

SEQ ID NO: 737 - DNA, 345 bp, HOMO SAPIENS
  misc_feature (88)..(88): n is a, c, g, or t
  misc_feature (112)..(112): n is a, c, g, or t
  misc_feature (283)..(283): n is a, c, g, or t
  misc_feature (288)..(288): n is a, c, g, or t
ttccatttctggttcaagtccttcattttatacattaaactaaggtgcactgactcccagtccatcgcctttttggtatctttatggnagtaaaatgtggcaagcttttttncagcctcaaagactgtctcagagtaaaagtttaagaagtactgctctaaataattttattaaatatgccttattagatgaggaaaactgaaatatttttatacaagccttttgctgtagaacaatgggacagaataaaggtagctcacaaaataagggaacatttcttgcntgttnttttttttccctccaaattcttctgtacaggtccagatagatgagctatgtttcctt

SEQ ID NO: 738 - DNA, 3132 bp, HOMO SAPIENS
gaagcagaggaggaaggagagaagaggtggaggtggccgcaggctgagtcgcggccgggatgtccgggcagccgccgccgccgccgccgcagcagcagcaacagcagcagcagctgtcgccgccaccgccggcggccttggccccagtctccggagtcgtcctgccggcgcccccggccgtcagcgccggctcttctccggccggctcgcccggcggcggtgcgggcggcgaaggcttaggggccgcggcggccgccctgctcctccaccctccgccgccgccgcccccggccaccgcggccccgccgcccccgccgccgcccccgcctccccctgcctcagcggctgcccccgccagcgggccgcccgctcccccgggccttgcagcgggccccggcccggctggaggagccccgaccccagctctggtggcgggcagcagcgccgcggcccccttccctcacggggactcggccctgaacgagcaggagaaggagttgcagcggcggctgaagcgtctctacccggccgtggacgaacaagagacgccgctgcctcggtcctggagcccgaaggacaagttcagctacatcggcctctctcagaacaacctgcgggtgcactacaaaggtcatggcaaaaccccaaaagatgccgcgtcagttcgagccacgcatccaataccagcagcctgtgggatttattattttgaagtaaaaattgtcagtaagggaagagatggttacatgggaattggtctttctgctcaaggtgtgaacatgaatagactaccaggttgggataagcattcatatggttaccatggggatgatggacattcgttttgttcttctggaactggacaaccttatggaccaactttcactactggtgatgtcattggctgttgtgttaatcttatcaacaatacctgcttttacaccaagaatggacatagtttaggtattgctttcactgacctaccgccaaatttgtatcctactgtggggcttcaaacaccaggagaagtggtcgatgccaattttgggcaacatcctttcgtgtttgatatagaagactatatgcgggagtggagaaccaaaatccaggcacagatagatcgatttcctatcggagatcgagaaggagaatggcagaccatgatacaaaaaatggtttcatcttatttagtccaccatgggtactgtgccacagcagaggcctttgccagatctacagaccagaccgttctagaagaattagcttccattaagaatagacaaagaattcagaaattggtattagcaggaagaatgggagaagccattgaaacaacacaacagttatacccaagtttacttgaaagaaatcctaatctccttttcacattaaaagtgcgtcagtttatagaaatggtgaatggtacagatagtgaagtacgatgtttgggaggccgaagtccaaagtctcaagacagttatcctgttagtcctcgaccttttagtagtccaagtatgagccccagccatggaatgaatatccacaatttagcatcaggcaaaggaagcaccgcacatttttcaggttttgaaagttgtagtaatggtgtaatatcaaataaagcacatcaatcatattgccatagtaataaacaccagtcatccaacttgaatgtaccagaactaaacagtataaatatgtcaagatcacagcaagttaataacttcaccagtaatgatgtagacatggaaacagatcactactccaatggagttggagaaacttcatccaatggtttcctaaatggtagctctaaacatgaccacgaaatggaagattgtgacaccgaaatggaagttgattcaagtcagttgagacgccagttgtgtggaggaagtcaggccgccatagaaagaatgatccactttggacgagagctgcaagcaatgagtgaacagctaaggagagactgtggcaagaacactgcaaacaaaaaaatgttgaaggatgcattcagtctactagcatattcagatccctggaacagcccagttggaaatcagcttgacccgattcagagagaacctgtgtgctcagctcttaacagtgcaatattagaaacccacaatctgccaaagcaacctccacttgccctagcaatgggacaggccacacaatgtctaggactgatggctcgatcaggaattggatcctgcgcatttgccacagtggaagactacctacattagctatgcatttcaagagctcacacttatattgtggcatatagtcaacatggaagtagaccagctctgctgatttgaaatttagattttttaaattatgtactggggacaggtttttgtcgctttacattgcttcctagtttacagcatgatgcaaatgattttctaacttagtgttaggagaaattattttccatctttaacctcttagttgtctaagagttaaatattactgaatttcagacgttcaaattgatcatcacaaatcctttaaaacaattacctaaaagaaaccaaaaatcctgccttctttgtgggggaggggggagagaggggaaggaaatggaacaagttgtgtttgtgttagcatgtgggtgatgtaaacttcaaattgggagatgttccgacccccactcccatataagcattcaatcagtgtaacttgcaaaatgcataaacatccgacagtttgaatttatagtgttgatggaagaaatcatttttaatgtgtactgtaaaacttgaaatactcaggagctgagtgaatatgtttgttgctacttacaatcccgacctgttagtcccagtagttttgttttaacatggtctttttcaactttgtttcctgtttaactacagatgacttctgttgtagactcacaagtttaactgttgtattataacagtattacatgtcaacggtgtggttatgacctttatttatataaaaaccaaatatttagtcaatttaccgtgtcttaatttaatctttgtacaccttccatttttaagtgcttaaatgagtactatattgcaataaaatgtagtgatataattaaccagccattaaaaatttacttctacagaaaaaaaaaaaaaaaaaaaa

SEQ ID NO: 739 - DNA, 3243 bp, HOMO SAPIENS
gatcacacacgcgcccacgccggcccgcggggcgtgcactttcgctgggttccgtccgccgcagcccaaacagttaactgaacggggaggggagggggcggggcttacccggggtcaccgccagggccctgctgggttccacgccacgttcctgtctccgcagggcgttcgatccctagagggaggagcctgtccaaacggacgctaacggcctacctccccctcaggtgctcttacagcctgttccaagtgtggcttaatccgtctccaccaccagatctttctccgtggattcctctgctaagaccgctgccatgccagtgacggtaacccgcaccaccatcacaaccaccacgacgtcatcttcgggcctggggtcccccatgatcgtggggtcccctcgggccctgacacagcccctgggtctccttcgcctgctgcagctggtgtctacctgcgtggccttctcgctggtggctagcgtgggcgcctggacggggtccatgggcaactggtccatgttcacctggtgcttctgcttctccgtgaccctgatcatcctcatcgtggagctgtgcgggctccaggcccgcttccccctgtcttggcgcaacttccccatcaccttcgcctgctatgcggccctcttctgcctctcggcctccatcatctaccccaccacctatgtccagttcctgtcccacggccgttcgcgggaccacgccatcgccgccaccttcttctcctgcatcgcgtgtgtggcttacgccaccgaagtggcctggacccgggcccggcccggcgagatcactggctatatggccaccgtacccgggctgctgaaggtgctggagaccttcgttgcctgcatcatcttcgcgttcatcagcgaccccaacctgtaccagcaccagccggccctggagtggtgcgtggcggtgtacgccatctgcttcatcctagcggccatcgccatcctgctgaacctgggggagtgcaccaacgtgctacccatccccttccccagcttcctgtcggggctggccttgctgtctgtcctcctctatgccaccgcccttgttctctggcccctctaccagttcgatgagaagtatggcggccagcctcggcgctcgagagatgtaagctgcagccgcagccatgcctactacgtgtgtgcctgggaccgccgactggctgtggccatcctgacggccatcaacctactggcgtatgtggctgacctggtgcactctgcccacctggtttttgtcaaggtctaagactctcccaagaggctcccgttccctctccaacctctttgttcttcttgcccgagttttctttatggagtacttctttcctccgcctttcctctgttttcctcttcctgtctcccctccctcccacctttttctttccttcccaattccttgcactctaaccagttcttggatgcatcttcttccttccctttcctcttgctgtttccttcctgtgttgttttgttgcccacatcctgttttcacccctgagctgtttctctttttcttttcttttttttttttttttttttttaagacggattctcactctgtggcccaggctggagtgcagtggtgcgatctcgactcactgcaacccccgcctcctgggttcaagcgattctcctgccccagcctcccaagtagctgggaggacaggtgtgagctgccgcacccagcctgtttctctttttccactcttcttttttctcatctcttttctgggttgcctgtcggctttcttatctgcctgttttgcaagcaccttctcctgtgtccttgggagccctgagacttctttctctccttgcctccacccacctccaaaggtgctgagctcacatccacaccccttgcagccgtccatgccacagccccccaaggggccccattgccaaagcatgcctgcccaccctcgctgtgccttagtcagtgtgtacgtgtgtgtgtgtgtgtgtgtgtgtgtgtgtgtttggggggtggggggtgggtagctggggattgggccctctttctcccagtggaggaaggtgtgcagtgtacttcccctttaaattaaaaaacatatatatatatatatttggaggtcagtaatttccaatgggcgggaggctttaagcaccgaccctgggtccctaggccccgcctggcactcagccttgccagagattggctccagaatttttgccaggcttacagaacacccactgcctagaggccatcttaaaggaagcaggggctggatgcctttcatcccaactattctctgtggtatcaaaaagaaaaaaaaaaaaaaagaaggagtcggggccgggcgtggtggctcacgcctgtaatcccagcactttgggagaccaagtcaggcaatcatctgaagtcaggagttcaagaccagcctggccaacatggtgaaagcatgtctctattaaaaatacaaaaattagccgggcgtggtggcgggcgcctgtaatcccaggtatttggggggactgagacaggagaatcccttcaacccgggaggtggaggttgcagtaagtcaagatggcaccactgtgctccagcctgggggacagagcgagactccatctcaaaaaaaaaaaggaatcggacgaagaaccacaggatgttgaagacaactgtctgaagtatttgtgagggacagcgatgtggccctctgtgttaagaataacgtgtcctgctttggcagagagaagaaaatagccactgcccgctttcaaggcaagatcgaccttttctgttttgttttgtttttctttctttttcctggccatgaggacaaaaattactgagtggcccttaaagagggaagtttgttttcagctgttctcttttgcccgtaggtgggagggtggggattgctgcgtcctagctagaggaatggctttgcttgaatgtgtagtgcacacgcacgggtgtttctgtgtgctagttgcttcttgctgctgcttcctgcttgtctgggactcacatacataacgtgatatatatatatatatatataaatgtataaatatatattttatttttttttaaatccctggagcttctggttcctatcagttcctgttgttaatcgtagaaccgttgtcccttcccccattcccgtatccatcatgttctttttcttttaaatatcaatataaaggtaaaagaaaaaaaaaaaaaaaaaaaaaaaaa

SEQ ID NO: 740 - DNA, 878 bp, HOMO SAPIENS
gtcttcctgtgaaaattcagcccctcttcctcagttacccctttgcaacagaacgaggccggcattttctaaagcgtccttgaggagtccagttcctaaaagattatttcagagtccactgttgtgggctgacttgaatgctctcaaaattcgtaagttgaagccctgacccccaggacctcagaacgtgactgtgcttggacacagggactttccagaggtgattaaggtgaagtgaggtcactggatggccctcctcctatctgactggtgtcctgatggggacgcggacacccacacaggaacggacccggggagaacaacacatcgtctctgcgccagggagagaggcgtccggggaacccagccgtgcccacgcatttatctccgccttccggctcagaattgtgaggaaacccgcttctgttgtgcaagtcccgggtctgtggtgctcggccatggcgcccccagaactgcatccccaccttctgctctgagccacccatcccctctggaagggctgagcttctctccctttccaccttctgttctgagccacccgtcccctccagaagggctgagcttctctctctttcactgcctatgctctgggaaactttcagaatccccaggctgtttctggaatagtctgggatggtcattttcggtcctcacagaaccgggggtttggaaagtaggtgaagccatatgggttgcagagaatctggcccagcccctcactagtccctgtgcttgttagttattctttaattacttggatatcaactctgatttaaaacatcaatttaacatacagataatgctgggactgcagcttcgccaggtggccttcctctcccggtctcgggaggcgtcac

SEQ ID NO: 741 - DNA, 3660 bp, HOMO SAPIENS
ttgccgcagagacgccccgcccccgcgcggcgctgcggaaccggagctccgggcggcgtcggcagcggcgcgagaggcgacgaggcccgggcggcaggagccggcgcggcgaccgcggcgagggcggcggggacggagcagagcacgacgaagacgcacaggcagccgggccgggccgggccacggggagagcggccggcgggcagcgggcgggaggccgggcgggccgcgggcagccaccgagccgcgaagcgacatggtgctgctcaaggagtatcgagtaatcctgcctgtgtctgtagatgagtatcaagtggggcagctgtattctgtggctgaggccagtaaaaatgaaacgggtggtggcgaaggcgtggaggtcctggtgaatgagccctacgagaaggacggtgagaaaggccagtacacacacaagatctaccacctgcagagcaaagtacccacgtttgttcgaatgctggccccagagggagccctgaatatacacgagaaagcctggaatgcttacccctactgcagaaccgttattacaaatgagtacatgaaagaagactttctgattaaaattgaaacctggcacaaaccagatcttggcacgcaggagaatgtgcataagctggagcctgaggcgtggaaacacgtggaagccgtatatatagacattgcagatcgaagccaagtgctcagcaaggattacaaggcagaggaagacccagcaaaatttaaatctatcaaaacaggccgaggacccttgggccccaattggaagcaagagcttgtaaaccagaaggactgcccatatatgtgtgcatacaaactggtgaccgtcaagttcaagtggtggggcctgcagaacaaagtggagaacttcatccataagcaagagaggcgtctgtttacaaacttccacaggcagctgttctgttggctcgataagtgggttgacctgaccatggacgacattcgaaggatggaagaagagacgaagagacagctggatgaaatgagacaaaaggacccagtgaaaggaatgacagcagatgactaaagccgcctttcccctctgcactttttgcaagacagtggtcaacaggaagacccagcagctccaccctcccaagtgacaggccattttcggacgcagccgttctgtgcccattcttcaggcaactttcgattccttactgtagctaattctagatgcccttcagtattgtgaacaaatagaccgtctggtgtcacagagcccgcgtgtgcaggagcctgctcctccgagatacgtggcgtgtaggttgctgtagttacagcgcctccgtctctctccattgtgttccgatccatttctgtgtgttcccccaacctttatttccaagtgacattttcagtctttcaaatagctgccttttgtgatgtggtgatttaaatgatttaagttcatttgttctcaaccttggggtaaactgaggtattttgcttcctgggaagatcttcgcaattttgagtgctcctgtggggagcggggatgagctaaagatacaatgtttccctgccccgcaccgcttccacaaaatagcaatgtggttttgcagctctgacttctgctcccagtaacccatcgttagggcactctagcactatggaggtacccaaggctcagccagtctctatttaagaaaatttaacaaatacgagtaaccctgtcccaatcactgaatctctagttactactcttagaaacacctgtggcttcttggccctcctgttgcccgctctgaatctctctgcagtctacaaaatcgccccagtcaactctccacttggagggaattgtccagtgtggcccctagaattgagtcaccccctagataccaactgtctgaccccgaggagctctgtaagtccctgctcctcctcttccctttggggctggtgctgccactcagcaataatcctcttttctctgtgctttcttaggtccctgtcctctgtctttgaggctggttaggaagcaagagtcctgatctttcatgctgcacaatatgagcatgcaaaaagctttttccagcagaacatgttccctcgtctccagttgccggaaaggaatttggggatcaagaacttagctcgtcctacccccatgttgagttctgccctggaaaacccaaagcaagtagtgatcatagtacagaacccgaccaaagtaggctggtgaggaagtccaggctccaggggaacagacgctgcccagtgttcatagcttcctgcaacttgacagagcctgagtttgcctcttagtgggagaatgagagagagctgtagtgtcacctgacattccccaaaccttgtgaagcacgttggcctaagtgtgccgtgatcccagcccacactagcctgggtgcatctgctaatgggagaccaaatctttgtccgggaagcaagaagtgggtgggagaatgtatcctgtttttgtcagtttgtttgccttactcatttctaagtgcaataagggagtgtctcacaggattgcacctgtgacatcctgatggatgcttccctgtggccctcctggggcaagggtggacagactcagacccccagcatggttagcgctgaccttcattgaggtccctttggaaccagatgtcttgttacagacaccttcctctgtgtaagtctcctcaccttgaggggtctttagtaatgcatctgggtagcatctcaactgctggtagcatttatctgacttggaaagttggagaagaggcattcctactggagaaaaatgtcagtgttttcctataagctctgtgttagctattcattatatttgtgcttaaagatgttccttcattcatcaactaggggaagtccagatgcgggttatcttgaaagaaacaaactgacattctaggcagacagttgtctatgtggtctgagggtcagcagctgttagtctccttcctttggctcttgagacccacacatatcactttagccctaacaagggctcctcccacctccacctgttgccccagttgaaaagcatccattatgagctgaggtcagcctggatctggaattgcagcccacataaacataaaggaggatgtccctggtctgttccatccccacggatggtgttgctgctgggcaacagtgttggcttcttttaagtaccccctttcctcctcacccacctccaaactgactagcactcagagggacttatgataaaggttcagctccaggggtagtacctgagtgtgtgccatgccccttcagaccagctgcttccatcagaattccagggtcacagccccaacagaagcagcagtgcctctgtaggaggggtgctgggctctggccttctcatgcagagaggtccgggacagggtcagtatcgtgggcatgtgtatagcttcccaagttcttttacagtccctgctgggactccctgacttactttggttggttcctagtgctacttgttttacaaactacactttgtagaattgattagattaccttgtttatttaatgtgagtttgtgcctttttgtctcaatcttccaatacaggtatattgagaaaaaaagcagtctaataaaatcctagacagaaaaaaaaaaaaaaaaaaaaa

SEQ ID NO: 742 - DNA, 3570 bp, HOMO SAPIENS
agacaggtcaggacatttggtaggggaaggttgaaagacaaaagcagcaggccttgggttctcagccttttaaaaactattattaaatatatatttttaaaatttagtggttagagcttttagtaatgtgcctgtattacatgtagagagtattcgtcaaccaagaggagttttaaaatgtcaaaaccgggaaaacctactctaaaccatggcttggttcctgttgatcttaaaagtgcaaaagagcctctaccacatcaaactgtgatgaagatatttagcattagcatcattgcccaaggcctccctttttgtcgaagacggatgaaaagaaagttggaccatggttctgaggtccgctctttttctttgggaaagaaaccatgcaaagtctcagaatatacaagtaccactgggcttgtaccatgttcagcaacaccaacaacttttggggacctcagagcagccaatggccaagggcaacaacgacgccgaattacatctgtccagccacctacaggcctccaggaatggctaaaaatgtttcagagctggagtggaccagagaaattgcttgctttagatgaactcattgatagttgtgaaccaacacaagtaaaacatatgatgcaagtgatagaaccccagtttcaacgagacttcatttcattgctccctaaagagttggcactctatgtgctttcattcctggaacccaaagacctgctacaagcagctcagacatgtcgctactggagaattttggctgaagacaaccttctctggagagagaaatgcaaagaagaggggattgatgaaccattgcacatcaagagaagaaaagtaataaaaccaggtttcatacacagtccatggaaaagtgcatacatcagacagcacagaattgatactaactggaggcgaggagaactcaaatctcctaaggtgctgaaaggacatgatgatcatgtgatcacatgcttacagttttgtggtaaccgaatagttagtggttctgatgacaacactttaaaagtttggtcagcagtcacaggcaaatgtctgagaacattagtgggacatacaggtggagtatggtcatcacaaatgagagacaacatcatcattagtggatctacagatcggacactcaaagtgtggaatgcagagactggagaatgtatacacaccttatatgggcatacttccactgtgcgttgtatgcatcttcatgaaaaaagagttgttagcggttctcgagatgccactcttagggtttgggatattgagacaggccagtgtttacatgttttgatgggtcatgttgcagcagtccgctgtgttcaatatgatggcaggagggttgttagtggagcatatgattttatggtaaaggtgtgggatccagagactgaaacctgtctacacacgttgcaggggcatactaatagagtctattcattacagtttgatggtatccatgtggtgagtggatctcttgatacatcaatccgtgtttgggatgtggagacagggaattgcattcacacgttaacagggcaccagtcgttaacaagtggaatggaactcaaagacaatattcttgtctctgggaatgcagattctacagttaaaatctgggatatcaaaacaggacagtgtttacaaacattgcaaggtcccaacaagcatcagagtgctgtgacctgtttacagttcaacaagaactttgtaattaccagctcagatgatggaactgtaaaactatgggacttgaaaacgggtgaatttattcgaaacctagtcacattggagagtggggggagtgggggagttgtgtggcggatcagagcctcaaacacaaagctggtgtgtgcagttgggagtcggaatgggactgaagaaaccaagctgctggtgctggactttgatgtggacatgaagtgaagagcagaaaagatgaatttgtccaattgtgtagacgatatactccctgcccttccccctgcaaaaagaaaaaaagaaaagaaaaagaaaaaaatcccttgttctcagtggtgcaggatgttggcttggggcaacagattgaaaagacctacagactaagaaggaaaagaagaagagatgacaaaccataactgacaagagaggcgtctgctgtctcatcacataaaaggcttcacttttgactgagggcagctttgcaaaatgagactttctaaatcaaaccaggtgcaattatttctttattttcttctccagtggtcattgggcagtgttaatgctgaaacatcattacagattctgctagcctgttcttttaccactgacagctagacacctagaaaggaactgcaataatatcaaaacaagtactggttgactttctaattagagagcatctgcaacaaaaagtcatttttctggagtggaaaagcttaaaaaaattactgtgaattgtttttgtacagttatcatgaaaagcttttttttttttttttttgccaaccattgccaatgtcaatcaatcacagtattagcctctgttaatctatttactgttgcttccatatacattcttcaatgcatatgttgctcaaaggtggcaagttgtcctgggttctgtgagtcctgagatggatttaattcttgatgctggtgctagaagtaggtcttcaaatatgggattgttgtcccaaccctgtactgtactcccagtggccaaacttatttatgctgctaaatgaaagaaagaaaaaagcaaattatttttttttattttttttctgctgtgacgttttagtcccagactgaattccaaatttgctctagtttggttatggaaaaaagactttttgccactgaaacttgagccatctgtgcctctaagaggctgagaatggaagagtttcagataataaagagtgaagtttgcctgcaagtaaagaattgagagtgtgtgcaaagcttattttcttttatctgggcaaaaattaaaacacattccttggaacagagctattacttgcctgttctgtggagaaacttttctttttgagggctgtggtgaatggatgaacgtacatcgtaaaactgacaaaatattttaaaaatatataaaacacaaaattaaaataaagttgctggtcagtcttagtgttttacagtatttgggaaaacaactgttacagttttattgctctgagtaactgacaaagcagaaactattcagtttttgtagtaaaggcgtcacatgcaaacaaacaaaatgaatgaaacagtcaaatggtttgcctcattctccaagagccacaactcaagctgaactgtgaaagtggtttaacactgtatcctaggcgatcttttttcctccttctgtttatttttttgtttgttttatttatagtctgatttaaaacaatcagattcaagttggttaattttagttatgtaacaacctgacatgatggaggaaaacaacctttaaagggattgtgtctatggtttgattcacttagaaattttattttcttataacttaagtgcaataaaatgtgttttttcatgtta

SEQ ID NO: 743 - DNA, 2753 bp, HOMO SAPIENS
gagcgcagagcggtttggtcgttcgttgggcggtgctggtttttcgctcgtcgactgcggctcttcctcgggcagcggaagcggcgcggcggtcggagaagtggcctaaaacttcggcgttgggtgaaagaaaatggcccgaaccaagcagactgctcgtaagtccaccggtgggaaagccccccgcaaacagctggccacgaaagccgccaggaaaagcgctccctctaccggcggggtgaagaagcctcatcgctacaggcccgggaccgtggcgcttcgagagattcgtcgttatcagaagtcgaccgagctgctcatccggaagctgcccttccagaggttggtgagggagatcgcgcaggatttcaaaaccgacctgaggtttcagagcgcagccatcggtgcgctgcaggaggctagcgaagcgtacctggtgggtctgttcgaagataccaacctgtgtgccatccacgctaagagagtcaccatcatgcccaaagacatccagttggctcgccggatacggggagagagagcttaagtgaaggcagtttttatggcgttttgtagtaaattctgtaaaatactttggtttaatttgtgactttttttgtaagaaattgtttataatatgttgcatttgtacttaagtcattccatctttcactcaggatgaatgcgaaaagtgactgttcacagacctcagtgatgtgagcactgttgctcaggagtgacaagttgctaatatgcagaagggatgggtgatacttcttgcttctcatgatgcatgtttctgtatgttaatgacttgttgggtagctattaaggtactagagttgataaatgtgtacagggtccttttgcaataaaactggttatgacttgatccaagtgtttaacaattggggctgttaagtctgaccatacatcactgtgatagaatgtgggctttttcaagggtgaagatacaagtcttaaccacagtgtaacttacagtttcctttaaaaaaaaaaaaagtaaacctggcagctatagaatacactatgtgcatttataatagctattttatatattgtagtatcaacatttttaaattaaatgttttacattcacaagtggtggggagtcttgtcattaaggtgtgtgtaatttagagtccagttggttttcttctgactgcacttgttctcatagtagtaaaatgctatgcgcatttataccttgcataagtcctcattctaccacatgttaaccctctagctgataatgcaaacactaactgggggattttatttataagggctctagaaaaaacgagttattcacaccagcatcatcttaactaacattctgaactagttagtgcagcttttcattgtgttgtgtggttggtctcataactaggttgagtttttctcctctgctgaggaaacagtaccgaagttctttttcttgtggcatttgtattataaaaacttggtgtgggggaggagcacaaaactccagcccactgaacctctgccaattaagatggtgttgggttaggttacatctggttactgtcctgggaaaatcatttttatagagatggccttccaagtggttttaaaatttactgaagtttttaggtcaattatgtatgttgactaaatttacaaataaacttgtttatccaactaagtgtccaaaacctaaattgaatgtactaagttttcacatgtcccattatctaggtccttgtatactaatgttttgaacttagatcatttcaggtgttgtttggtggataaaggaaccttttatttataaagatactgtagaaagcatgtgaacagctctctgcttgattaagatgccataatagtgctgtatttgcagtgtgggctaagacaaagtatattaataagcttttcagcccccccactcccgttccgtagtgtagaagcccacaggtgtagaactcagtcttaaacttcagtatgaaaccagtttccttgtgcgatgatggccactaaagcatagtacgtggatgtcagtgagacagcatgagagccagcagtcatcaaagcgttccacgtttgaagttagcaactgcttaaagttatgccctattaaaattgctttctcaaaagtttgggttagtttcaaatgtgatattttggagggaaggtaaagtaggtatctttcaggtcgtgataatgagctcctatgaaaggatgcaatataatgacccgcttttctagaaagttcataatcagctctggaacaagcacacttgattcctcactgtgcttcagaatgagattaagatcagatgttggaacgtgctatgctgtagcgtgtctggaaacaaagtacacaaacctggctacggtgatgagttagcttctgcttactacctgtgacaacccaagtgggtgacactagtgaaccttctccagtctgcaggctggcatagaaggctcttagattatattgggcagcttgcaatctgccgaagcagtgacttgcatttccacacttggcttgagcactcaacccagaaggcgaagatagcttttggttgtaggcggcttcctgtatgggatatccctcggtaagggtaaaggagcagaggcaaaggagaaaagcagaagttgcagctgatgcaggtatcctatgcccttgatggatgagactaaaataaaatttttgaagttaaaaaaaaaaaaaaaaaaaaaaaaaaaaaaaaaaaaaaaaaaaaaaaaaa

SEQ ID NO: 744 - DNA, 2143 bp, HOMO SAPIENS
ttcccttactgagcttgctgagctccggggcccgcggagctcgcgccaggctcctgggaaaggacggggagtgttaccggggagcagctgctccattgtgcctcgaggccccgatcgggctaggccgacggcctccctcccttcacctttcctctcctggcggggttcggcggcgggcgagtgactgcggccacgcctgaaaggcgactctcctgattcaagatgaccaacgaagaacctcttcccaagaaggttcgattgagtgaaacagacttcaaagttatggcaagagatgagttaattctaagatggaaacaatatgaagcatatgtacaagctttggagggcaagtacacagatcttaactctaatgatgtaactggcctaagagagtctgaagaaaaactaaagcaacaacagcaggagtctgcacgcagggaaaacatccttgtaatgcgactagcaaccaaggaacaagagatgcaagagtgtactactcaaatccagtacctcaagcaagtccagcagccgagcgttgcccaactgagatcaacaatggtagacccagcgatcaacttgtttttcctaaaaatgaaaggtgaactggaacagactaaagacaaactggaacaagcccaaaatgaactgagtgcctggaagtttacgcctgatagccaaacagggaaaaagttaatggcgaagtgtcgaatgcttatccaggagaatcaagagcttggaaggcagctgtcccagggacgtattgcacaacttgaagcagagttggctttacagaagaaatacagtgaggagcttaaaagcagtcaggatgaactgaatgacttcatcatccagcttgatgaagaagtagagggtatgcagagtaccattctagttctgcagcagcagctgaaggagacacgccagcagttggctcagtaccagcagcagcagtctcaggcctctgccccaagtaccagcaggactacagcttctgaacctgtagaacagtcagaggccacaagtaaagactgcagtcgtctgacaaacggaccaagtaatggtagctcctcccgccagaggacgtctgggtctggatttcacagggagggcaacacaaccgaagatgactttccttcttctccagggaatggtaataagtcctccaacagctcagaggagagaactggcagaggaggtagtggttacgtaaatcaactcagtgcggggtatgaaagtgtagactctcccacgggcagtgaaaactctctcacacaccaatcaaatgacacagactccagtcatgaccctcaagaggagaaagcagtgagtgggaaaggtaatcgaactgtgggttcccgccacgttcagaatggcttggactcaagtgtaaatgtacagggttcagttttgtaatattttttcagcaaatttttatacagtgtcatttaatttgggagaggatactgtccagaaaattaatgcatacttttgtcacaatttgcctttttgtgggtgtacgttttggtttttttttgttgttttttttctttgttttttttttcttttctttttttttttttttttttttttttgcttcaatacttctgccgctttggaaattgtaacagttaattactttgaatgttgctaaaaggacattttgtgtagggtcaagttatttttatatgagttaatgtgaaattgtaaatggaaatttttccttaaaatacaacacaatgatgtctgtataaatctgtctgtttagaatctgtgctgtgtaagggcattcgtactcatgctgttactgtacttatgcaccattcagacttgttagagtagatgtgggtttatgactgccaagtttgcccagtacagtagttttttatcactaaaagttggactcattgatggagtcctgtagtagtttcagtgttagatacagttttttccaccatacatctgtgcattttctctttaggtgactgtttaagaaatttgtgtgcatagttactcagtttttatgaactgttgtatcctgttaatgcatattgctctgtgactccagtatatcttacctgtactgaccaaacctaaataaagatttttattgtaactccttaaaaaaaaaaaaaaaaaaaaaaaa

SEQ ID NO: 745 - DNA, 2307 bp, HOMO SAPIENS
cgcgactagggtgcagcgccaggtccggtgttggggtgtccgagttgccgccggagaggagtggcctcgcccgcttgagttttgattcatcatggataatctgtcatcagaagaaattcaacagagagctcaccagattactgatgagtctctggaaagtacgaggagaatcctgggtttagccattgagtctcaggatgcaggaatcaagaccatcactatgctggatgaacaaaaggaacaactaaaccgcatagaagaaggcttggaccaaataaataaggacatgagagagacagagaagactttaacagaactcaacaaatgctgtggcctttgtgtctgcccatgtaatagaacaaagaactttgagtctggcaaggcttataagacaacatggggagatggtggagaaaactcaccttgcaatgtagtatctaaacagccaggcccggtgacaaatggtcagcttcagcaaccaacaacgggagcagccagtggtggatacattaaacgcataactaatgatgccagagaagatgaaatggaagagaacctgactcaagtgggcagtatcctgggaaatctaaaagacatggccctgaacataggcaatgagattgatgctcaaaatccacaaataaaacgaatcacagacaaggctgacaccaacagagatcgtattgatattgccaatgccagagcaaagaaactcattgacagctaaagctactgctgttcttctttatcatttattcacttccgtagctcctccttgaaagttattaccttttcagagtttaagttttcggttccacgctcttctaattgggagataatatggaagaagggccagagcagttacagccctccttcttttttgttttctgttgagggccgactgctgctctgccttccttctagtattttctttctcaattcatacgcttagattggttttcatatgtcatgtttagtgttttcatcctcctcatatacttcagcaggttcttttgctttcaagatttggaagcattgccaaagacagccatgaagaaggaagctgtagaggtgttttttgttgttgtttatttttgcttttgtggttgagggaaggacaagagataagaggttgttacctcagtaaaaaccttcaggccacaaagcaaaaagttgcatagccacaacgaagatctagttggatatagtttttgatttaagttgcagttatagccaatttaggctaatgcttggttttggagcttttatacacaacgtttttgttaggcatcacagttttgcaacctctgctccaaagagaaaaatagaatgagttttctttcttttttttttttttggagtcagagtctcgctctcttgtccaggctggagtgcaatagcgcgatctgggctcactgcaacctccgcctccctggttcaagcaattctcctgccttgcctcctgagtagctgggattacaggcgtgtgtcaccacgctcggctaatttttgtatttttagtagagacagggtttcaccatgtcaagctggtcttggactcctgacgtcgtgatccacccgccttggcctcccaaagtactgggattacaggcgtgagccactgtgcctggctgagttttcttaaagtgagcttaatttctgaactcttagtgattcatatatgtacataaatctgtgatcccatttcttattgcaccattcaggaacactttatataaatgagtggctttttatttcatattattagtagtatcatggttccattacaggcctattaacatcatacattgtcattagtctttgaagaaaaaatatgtaaatatatatgtgtaacatgagaatttctctctaaagcagggcttaaaattttttggaaaagtttgacaaagcataccacatgaattcagatttacctcaatgctaagaattatgtttagttaggaaaaaggaaagtcattttgacctcaggtagaaaaatagattgctttgagttttatgtagctttagactttaaaaagttagaatttattctgtaactaaaaattatttgaaaaaattatgcctctggtttaattattggtgattacacactctttctcttacccttgtgtattgaactatgtccataatcaagttgatgtggatcctgaaaagtgttatgaacatctgattggtatttgtcacatttattttaaaattagcatctgaacacttcaaagctgtcagtgtgtattggtttcaccaataaccactgcttgatccttacaattaaattttttaactaac

SEQ ID NO: 746 - DNA, 1257 bp, HOMO SAPIENS
aatagagtctgcactaggaaactggtgggagccgaggtccggaagtccgacgctggtcggtgggcgcatgcgcagcgcgcgctctacggcgctgaaccggggcgagcagagagctgtcagatactatagccatatgaagttgaacatggcagaagaagaggactatatgtctgattccttcattaatgtccaagaagatatcagaccaggattgccaatgctaaggcaaatccgagaagcccgtcgaaaagaagaaaagcaacaggaagccaatttgaaaaacaggcagaagagtttaaaagaagaagaacaagaaagacgtgacattgggttgaagaatgcactaggctgtgaaaacaaagggtttgccttgctccaaaagatgggctataaaagtggtcaggcacttggcaagagtgggggtggtattgttgaaccaattcctctcaatatcaaaacagggaaaagtggcattggtcatgaggcatcattaaaacggaaagcagaggaaaaattggaaagctacagaaaaaagattcacatgaaaaaccaagctgaagaaaaagctgcagaacagtttcgaatgcgacttaaaaataagcaagatgaaatgaagctagaaggagatctcagaagaagccagcgagcctgtcaacaactggatgtccagaaaaatattcaggttcccagggaagcatggtactggttgaggcttgaagaggagactgaagaagatgaagaagaaaaagaacaggatgaagatgaatataagagtgaagatttaagcgtactggaaaaattacaaatattgactagttatttaagagaagaacatctatattgtatttggtgtggaacagcctatgaagataaagaagacctatcttcaaattgtccaggaccaacttctgcagatcatgactaagattattcccaataaagtggaaacttgaaaaatgttattacttcctagggatagacaatttagcagttggaaatctcaaattttttatgccagtaaagaaagggggactttatataatgttttgttctttttgtactttagaatatgaatgttcattgacttgaaaaaaataatgcaatggcatttcagaacacaagtatcacagagatggacagttacaatttattgctatattgtgatacgtgaggggtttaaggacaccaacaggtaacttcttattcccctcttcactttggaacaaattgagaaataagaaatgggagtcagaggaa

SEQ ID NO: 747 - DNA, 5228 bp, HOMO SAPIENS
agggcggggcgcagcgggcaggcaagggcggccgagcgggcggcgggcatgagcggggcgggcagggcgctggccgcgctgctgctggccgcgtccgtgctgagcgccgcgctgctggcccccggcggctcttcggggcgcgatgcccaggccgcgccgccacgagacttagacaaaaaaagacatgcagagctgaagatggatcaggctttgctactcatccataatgaacttctctggaccaacttgaccgtctactggaaatctgaatgctgttatcactgcttgtttcaggttctggtaaacgttcctcagagtccaaaagcagggaagcctagtgctgcagctgcctctgtcagcacccagcacggatctatcctgcagctgaacgacaccttggaagagaaagaagtttgtaggttggaatacagatttggagaatttggaaactattctctcttggtaaagaacatccataatggagttagtgaaattgcctgtgacctggctgtgaacgaggatccagttgatagtaaccttcctgtgagcattgcattccttattggtcttgctgtcatcattgtgatatcctttctgaggctcttgttgagtttggatgactttaacaattggatttctaaagccataagttctcgagaaactgatcgcctcatcaattctgagctgggatctcccagcaggacagaccctctcgatggtgatgttcagccagcaacgtggcgtctatctgccctgccgccccgcctccgcagcgtggacaccttcagggggattgctcttatactcatggtctttgtcaattatggaggaggaaaatattggtacttcaaacatgcaagttggaatgggctgacagtggctgacctcgtgttcccgtggtttgtatttattatgggatcttccatttttctatcgatgacttctatactgcaacgggggtgttcaaaattcagattgctggggaagattgcatggaggagtttcctgttaatctgcataggaattatcattgtgaatcccaattattgccttggtccattgtcttgggacaaggtgcgcattcctggtgtgctgcagcgattgggagtgacatactttgtggttgctgtgttggagctcctctttgctaaacctgtgcctgaacattgtgcctcggagaggagctgcctttctcttcgagacatcacgtccagctggccccagtggctgctcatcctggtgctggaaggcctgtggctgggcttgacattcctcctgccagtccctgggtgccctactggttatcttggtcctgggggcattggagattttggcaagtatccaaattgcactggaggagctgcaggctacatcgaccgcctgctgctgggagacgatcacctttaccagcacccatcttctgctgtactttaccacaccgaggtggcctatgaccccgagggcatcctgggcaccatcaactccatcgtgatggcctttttaggagttcaggcaggaaaaatactattgtattacaaggctcggaccaaagacatcctgattcgattcactgcttggtgttgtattcttgggctcatttctgttgctctgacgaaggtttctgaaaatgaaggctttattccagtaaacaaaaatctctggtccctttcgtatgtcactacgctcagttcttttgccttcttcatcctgctggtcctgtacccagttgtggatgtgaaggggctgtggacaggaaccccattcttttatccaggaatgaattccattctggtatatgtcggccacgaggtgtttgagaactacttcccctttcagtggaagctgaaggacaaccagtcccacaaggagcacctgactcagaacatcgtcgccactgccctctgggtgctcattgcctacatcctctatagaaagaagattttttggaaaatctgatggctcccactgagatgtgctgctggaagactctagtaggcctgcagggaggactgaagcagcctttgttaaagggaagcattcattaggaaattgactggctgcgtgtttacagactctgggggaagacactgatgtcctcaaactggttaactgtgacacggctcgccagaactctgcctgtctatttgtgacttacagatttgaaatgtaattgtcttttttcctccatcttctgtggaaatggatgtctttggaacttcattccgaggagataagctttaactttccaaaagggaattgccatgggtgtttttcttctgtggtgagtgaaacaatctgaggtctggttcttgctgaccttgttgccctgcaaacttcctttccacgtgtacgcgcacaccaacacgaaatgccatcactcctactgcggctgctatgaagcttactggttgtgatgtgttataatttagtctgtttttttgattgaatgcagtttaatgtttccagaaagccaaagtaattttcttttcagatatgcaaggctttggtgggtccaaaaaatgtctatcacaagccattttttccttttcctctctcgaaaagttaaaatatctatgtgttattcccaaaccctcttacctatgtatctgcctgtctgtccatcatcttccttcctccctatctctgtgtatctggatggcagccgctgcccaggggagtggctgtggggagggcaggtactgtctttgcctgtgggtccagctgagccatccctgctgggtgatgctgggcaagacccttggcccgtctgggccttggcttcctcacttgtgaaatgagcgggaagatgactctcagttccttccacctcttagacatggtgaggtaacagacatcaaaagcttttctgaaatcttcagaagaaatagttccattacagaaaactcttcaaaataaatagtagtgaaaacttttaaaaactctcattggagtaagtcttttcaagatgatcctccacaatggaggcagcgttcctacttgtcatcacacagctgaagacattgtttcttaggtgtgaaatcggggacaaaggacaaacagagacacacggcattgttcatgggaggcatcgtcaccctcctgggtgttctgtgggaatttcctgtgtgaggaaaacgtggccacagggttgtgctgtacccacccttccccggcgagatggccctcggcctgtgccgctgcttccaccctcgccactccatggcagcttttggtctgtttccggctctgccctctgccctgaactctcatccggcttgtacctgcctgctggacccctccacctggaggccagcccatgtctcaggcccagccctagcctcttctcctcaaattctaagtgttttctctttaggtttccctggctttgtgaatggatcatgtgtctctaggtataaacctgacatcatctttccacccggcttacctccaccagatctccccagttctgtctccatcttctacctgcagctgctctgttctcatggtcactgctgcatcactgagtctggacccttgttatcattttcaaactggcctccttccctcgttccccacttcttaaagtcacctgtccattgccaccagattaagctttctccagccagatcacctctctctgagaaacctccattgacatggaaacaccattgtctggcacacatactcacatactcaccttcccgtcttgatccccacacatctttccagcctcccctcccactccactccctgctctctcctccacctccccatcctcttgtctcccctcccctctgaatccagcccagcggggcttctcctgcctccatcacatcacagaagtacctcctgcttctggttttaattagagccttccccgattacattttcctctgaattttttcctatctacatttgatctgtcatgtttaaaccccctacttctaagggaacttctctaatctcttatcctcatccccaaatagtgttttcttcctctgggttcttataatgttggtatcaatctcacagcatttagtgcttcctgcctggtgtgacagttacctgtgtgcatgtgcaatttctaatttcccacgctagactgtgagcttcctaaggcaagaatcatgccttgttggtttctgtattcctcatggtgccaaacacagtgccttctacattgcaggcgctgaataaacatttttaaagcaaaatgatgtggatttttaaaataaatatttaagtgctggtaagatgagcatgtatccggggtgcccatgaaatgttcttggggccgtgtggggacagtcgtcattcctcctcctgccacccttttctttcagtgagtcactgtggatggtcccagctgtgtcatcccaaagttcagcagggaaagctgagctgggcctctccaggtgagttttctagaagcatttctcaaactgtgggttacatcaacttgggtgtcttgagctgtaaggaaggaactccggagtcagctgggctacaggggagcttctctaagtcctgcgggaggccagacccagcctgagcttgctgttagctagcggaggcagctgctggtggcccaggtgctcgacaccaggcatcccctctcctcccacgaagggtgtgccataatccccttcaacaggaaatgcttcccagaagcctctcagcagcctcccctcctgtcctatcagctagaagcgcctcgcttgtcccaagaccagcagggacagggaactgtccgagcccgtggctgtgtggaggaaggcgacccccagcacaagattggtttcctttgggaagggaagagggagtgtgttggggtaaggggtagagcagaggaatggtcagggggcaacaaccgctgacagctgcaacaggtgcatggcatctcacagggaggcagggaggtgcgagctcctaagtaatggagcaaaaaaattctattctgtagaatggggagagaaaatgtgacattttaatttttttttgcatttatattcctaattcctacttaaagtgaatatactgccgctgtagatcataaaatgtatcttttccatggccaacaaggggcatcttttataaatgcataataacccagtttgtatcaaagggtatcgacttaagtgaaatttcaacatgctgttactttttccttttaatgtaattctgttttccaaataaatgggggagacaaatggaaaaaaaaaaaaaaa

SEQ ID NO: 748 - DNA, 4564 bp, HOMO SAPIENS
ggggaggcgccgggggcgcgcgcgcgcgcgctgggcgctgctgggctgcggcggcggcggcggcggcggtggttactatggcggagtcggccggagcctcctccttcttcccccttgttgtcctcctgctcgccggcagcggcgggtccgggccccggggggtccaggctctgctgtgtgcgtgcaccagctgcctccaggccaactacacgtgtgagacagatggggcctgcatggtttccattttcaatctggatgggatggagcaccatgtgcgcacctgcatccccaaagtggagctggtccctgccgggaagcccttctactgcctgagctcggaggacctgcgcaacacccactgctgctacactgactactgcaacaggatcgacttgagggtgcccagtggtcacctcaaggagcctgagcacccgtccatgtggggcccggtggagctggtaggcatcatcgccggcccggtgttcctcctgttcctcatcatcatcattgttttccttgtcattaactatcatcagcgtgtctatcacaaccgccagagactggacatggaagatccctcatgtgagatgtgtctctccaaagacaagacgctccaggatcttgtctacgatctctccacctcagggtctggctcagggttacccctctttgtccagcgcacagtggcccgaaccatcgttttacaagagattattggcaagggtcggtttggggaagtatggcggggccgctggaggggtggtgatgtggctgtgaaaatattctcttctcgtgaagaacggtcttggttcagggaagcagagatataccagacggtcatgctgcgccatgaaaacatccttggatttattgctgctgacaataaagataatggcacctggacacagctgtggcttgtttctgactatcatgagcacgggtccctgtttgattatctgaaccggtacacagtgacaattgaggggatgattaagctggccttgtctgctgctagtgggctggcacacctgcacatggagatcgtgggcacccaagggaagcctggaattgctcatcgagacttaaagtcaaagaacattctggtgaagaaaaatggcatgtgtgccatagcagacctgggcctggctgtccgtcatgatgcagtcactgacaccattgacattgccccgaatcagagggtggggaccaaacgatacatggcccctgaagtacttgatgaaaccattaatatgaaacactttgactcctttaaatgtgctgatatttatgccctcgggcttgtatattgggagattgctcgaagatgcaattctggaggagtccatgaagaatatcagctgccatattacgacttagtgccctctgacccttccattgaggaaatgcgaaaggttgtatgtgatcagaagctgcgtcccaacatccccaactggtggcagagttatgaggcactgcgggtgatggggaagatgatgcgagagtgttggtatgccaacggcgcagcccgcctgacggccctgcgcatcaagaagaccctctcccagctcagcgtgcaggaagacgtgaagatctaactgctccctctctccacacggagctcctggcagcgagaactacgcacagctgccgcgttgagcgtacgatggaggcctacctctcgtttctgcccagccctctgtggccaggagccctggcccgcaagagggacagagcccgggagagactcgctcactcccatgttgggtttgagacagacaccttttctatttacctcctaatggcatggagactctgagagcgaattgtgtggagaactcagtgccacacctcgaactggttgtagtgggaagtcccgcgaaacccggtgcatctggcacgtggccaggagccatgacaggggcgcttgggaggggccggaggaaccgaggtgttgccagtgctaagctgccctgagggtttccttcggggaccagcccacagcacaccaaggtggcccggaagaaccagaagtgcagcccctctcacaggcagctctgagccgcgctttcccctcctccctgggatggacgctgccgggagactgccagtggagacggaatctgccgctttgtctgtccagccgtgtgtgcatgtgccgaggtgcgtcccccgttgtgcctggttcgtgccatgcccttacacgtgcgtgtgagtgtgtgtgtgtgtctgtaggtgcgcacttacctgcttgagctttctgtgcatgtgcaggtcgggggtgtggtcgtcatgctgtccgtgcttgctggtgcctcttttcagtagtgagcagcatctagtttccctggtgcccttccctggaggtctctccctcccccagagcccctcatgccacagtggtactctgtgtctggcaggctactctgcccaccccagcatcagcacagctctcctcctccatctcagactgtggaaccaaagctggcccagttgtccatgacaaaagaggcttttgggccaaaatgtgagggtggtgggtgggatgggcagggaaggaatcctggtggaagtcttgggtgttagtgtcagccatgggaaatgagccagcccaagggcatcatcctcagcagcatcgaggaagggccgaggaatgtgaagccagatctcgggactcagattggaatgttacatctgtctttcatctcccagatcctggaaacagcagtgtatatttttggtggtggtgggtttggggtggggaagggaagggcgggcaaggagtggggagggagtctggggtgggagggaggcatctgcatgggtcttcttttactggactgtctgatcagggtggagggaaggtgagaggtttgcatccacttcaggagccctactgaagggaacagcctgagccgaacatgttatttaacctgagtatagtatttaacgaagcctagaagcacggctgtgggtggtgatttggtcagcatatcttaggtatataataactttgaagccataacttttaactggagtggtttgatttctttttttaattttattgggagggtttggattttaactttttttaatgttgttaaatattaagtttttgtaaaaggaaaaccatctctgtgattacctctcaatctatttgtttttaaagaaatccctaaaaaaaaaaattatccaattgaacgcacatagctcaatcacactggaaatgtttgtccttgcacctgagcctgttcccactcagcagtgagagttcctctttgccctgaggctcagtctctctcgtattttgtccccacccccaattccttgagtggtttttgctctagggccctttcttgcactgtccagctggttgtaccctctccaggcatttattcaacaaatgtgggtgaagtgcctgctgggtgccaggtgctgggaatacatctgtggacaagacatgcttgggtcctactcctggagcactgtaaaaagagctgattcaagtaagtagatgcctgttttgagaccagaaggtttcataattggttctacgacccttttgagcctagaattattgttcttatataagatcactgaagaaagaggaacccccacaaccccctccacaaagagaccaggggcgggtgatgagacctggggtttagaaccccaggtgagacctcaaatcactgcattcattctgagcccccttcctgtccccaggggaggtgtattgtgtatgtagccttagagcatctctgcctccaacccagcagttctctgccaaagcttgtggaggagggagagccctgtccctgccctcaggctccccagtgctcctggcccttctatttatttgactgattattgcttctttccttgcattaaaggagatcttcccctaacctttgggccaatttactggccactaatttcgtttaaataccattgtgtcattggggggaccgtctttacccctgctgacctcccacctatccgccctgcagcagaaccttggcggtttataggtaatgatggaacttagactcctcttcccagagtcacaagtagcctctgggatctgccaacacacgtccactcccaagccactagcccactccccagttggcccttctgcccttaccccacacacagtccaactcttccacctctggggaagatggagcaggtctttgggaagctcccacacccacctctgccactcttaacactaagtgagagttggggagaaactgaagccgtgtttttggccccccgaggctaaccctgatccatagtgctacctgcacctctggattctggattcacagaccaagtccaagcccgttcttacgtcgccataaaggcccccgaacggcattctcggtacttctgtttgtttttgtacattttattagaaaggactgtaaaatagccacttagacactttacctcttcagtatgcaaatgtaaataaattgtaatataggaaatcttttgttttaatataagaatgagcctgtccaatttctgctgtacattattaaaagttttattcacagag

SEQ ID NO: 749 - DNA, 1767 bp, HOMO SAPIENS
gaaaggagcaagccaggaagccagacaacaacagcatcaaaacaaggctgtttctgtgtgtgaggaactttgcctgggagataaaattagacctagagctttctgacagggagtctgaagcgtgggacatggaccgttcactgggatggcaagggaattctgtccctgaggacaggactgaagctgggatcaagcgtttcctggaggacaccacggatgatggagaactgagcaagttcgtgaaggatttctcaggaaatgcgagctgccacccaccagaggctaagacctgggcatccaggccccaagtcccggagccaaggccccaggccccggacctctatgatgatgacctggagttcagacccccctcgcggccccagtcctctgacaaccagcagtacttctgtgccccagcccctctcagcccatctgccaggccccgcagcccatggggcaagcttgatccctatgattcctctgaggatgacaaggagtatgtgggctttgcaaccctccccaaccaagtccaccgaaagtccgtgaagaaaggctttgactttaccctcatggtggcaggagagtctggcctgggcaaatccacacttgtcaatagcctcttcctcactgatctgtaccgggaccggaaacttcttggtgctgaagagaggatcatgcaaactgtggagatcactaagcatgcagtggacatagaagagaagggtgtgaggctgcggctcaccattgtggacacaccaggttttggggatgcagtcaacaacacagagtgctggaagcctgtggcagaatacattgatcagcagtttgagcagtatttccgagacgagagtggcctgaaccgaaagaacatccaagacaacagggtgcactgctgcctgtacttcatctcacccttcggccatgggctccggccattggatgttgaattcatgaaggccctgcatcagcgggtcaacatcgtgcctatcctggctaaggcagacacactgacacctcccgaagtggaccacaagaaacgcaaaatccgggaggagattgagcattttggaatcaagatctatcaattcccagactgtgactctgatgaggatgaggacttcaaattgcaggaccaagccctaaaggaaagcatcccatttgcagtaattggcagcaacactgtagtagaggccagagggcggcgagttcggggtcgactctacccctggggcatcgtggaagtggaaaacccagggcactgcgactttgtgaagctgaggacaatgctggtacgtacccacatgcaggacctgaaggatgtgacacgggagacacattatgagaactaccgggcacagtgcatccagagcatgacccgcctggtggtgaaggaacggaatcgcaacaaactgactcgggaaagtggtaccgacttccccatccctgctgtcccaccagggacagatccagaaactgagaagcttatccgagagaaagatgaggagctgcggcggatgcaggagatgctacacaaaatacaaaaacagatgaaggagaactattaactggctttcagccctggatatttaaatctcctcctcttcttcctgtccatgccggcccctcccagcaccagctctgctcaggccccttcagctactgccacttcgccttacatccctgctgactgcccagagactcagaggaaataaagtttaataaatctgtaggtggctaaaaaaaaaaaaaaaaaaaaaaaaaaaaaaa

SEQ ID NO: 750 - DNA, 1840 bp, HOMO SAPIENS
gtctctggtatctcccgctgagctgctctgttcccggcttagaggaccaggagaagggggagctggaggctggagcctgtaacaccgtggctcgtctcgctctggatggtggtggcaacagagatggcagcgcagctggagtgttaggagggcagcctgagcagtaggattggggctggagcagtaagatggcagccggagcggtttttctggcattgtctgcccagctgctccaagccaggctgatgaaggaggagtcccctgtggtgagctggtggttggagcctgaagacggcacagctctgtgattcatcttctgaggttgtggcagccacggtgatggagacagcagctcaacaggaacaataggagggtacccgtggaggccaagtgcgatgtgcattttgtaagcactttggagccactatcaaatgctgtgaagagaaatgtacccagatgtatcattatccttgtgctgcaggagccggctcctttcaggatttcagtcacatcttcctgctttgtccagaacacattgaccaagctccagaaagatcgaaggaagatgcaaactgtgcagtgtgcgacagcccgggagacctcttagatcagttcttttgtactacttgtggtcagcactatcatggaatgtgcctggatatagcggttactccattaaaacgtgcaggttggcaatgtcctgagtgcaaagtgtgccagaactgcaaacaatcgggagaagatagcaagatgctagtgtgtgatacgtgtgacaaagggtatcatactttttgtcttcaacgaattatgaaatctgtaccaaccaatggctggaaatgcaaatgaataccgaattggaaaaacagatttctaatgaggctgatagtgaagaaatgaaaatgtcttctgaagtgaagcatatttgtggtgaagatcaaattgaagataaaatggaagtgacagaaaacattgaagtcgttacacaccagatcactgtgcagcaagagcaactgcagttgttagaggaacctaaaacagtggtatccaaagaagaatcaaggcctccaaaatttgtcattgaatctgtcactcttccactagaaaccttagtgtccccacatgaggaaagcacttcattatgtcctgaggaacagttggttatagaaaggctacaaggagaaaaggaacagaaataagattctgaactttctactggattgatggactctgaaatgactcctacaattgagggttgtgtgaaagatgtttcataccaaggaggcaaatctataaagttatcatctgagacagagtcatcattttcattatcagcagacataagcaaggcagatgtgtcttcctccccaacaccttcttcagacttgccttcgcatgacatgctgcgtaattacccttcagctcttagttcgtctgctggaaacatcatgccaacaacttacatctcagtcactccaaaaaactggcatgggtaaaccagctattactaagagaaaattttctcctggtagacctcggtccaaacagggccgtgggtctggatttccaggaaagcggagacctcgaggtgcaggactgtcagggcgaggtggccgaggcaagtcaaagctgaaaagtggaatcggagctgttgtattgcctggggtgtctactgcagatatttcatcaaataaggatgatgaagaaaactctatgcacactacggttgtgttgttttctagcagtgacaagttcactttgaatcaggatatgtgtgtagtttgtggcagttttggccaaggagcagaaggaagattacttgcctgttctcagtgtggtcagt

SEQ ID NO: 751 - DNA, 492 bp, HOMO SAPIENS
  misc_feature (61)..(61): n is a, c, g, or t
  misc_feature (345)..(345): n is a, c, g, or t
  misc_feature (376)..(376): n is a, c, g, or t
acgatttgatctaaatacaaccaacaataaatatttttattgaaacttccttttaattgangagtagtaatatggatgtcttcattagttgtaatgtcatttctattttactttcctaaatgtgaaagaaaagatgaaagaccatttcttggacatatcaaatgatttttaaggaatttctggtgattatttaaattttctagttaagctgtctaggtcagaattcatcattcaaaaatgctgctcaaacttgaagtgggtaggaatttctggggattttgattaagatgcagattctgactcattaaatctgagatgggcaagagtctgcatttctgacaagcncataggtgatgccagtgttcctgactacacnttcagtagcagagttacagattatcccacattttgggggattttggagaatgatcttagtagaaaagataacaacagatgtttgcagtgatttgcctggatgtagttggtctgaga

SEQ ID NO: 752 - DNA, 3996 bp, HOMO SAPIENS
gctgcgcggagggctcggcgatcagcggcggcggcggcagtggggaggccgcagcgccatgggggggcgttagacaggctgcggcggccgaggcgaggggcggcagcggttatctggtccgcggcgaccttcggccgggcccgggggtgggaaggcctggggcgggggtcgtccctggttgcacggggccgcggggcggggctcgccggccgtcggggtgcaggaggcctgggccgctgaaaggagaaggcgccgtcggtcgccaggccctgccgccgggccgcttgacgacgacgctcccgcgggggccccgcctgaggaggacgcggcggcggtggcggcgaggccgcgggaggccgcggaggatggaggagcggaaggaggagggcgaggccgagatccaggagcacgggcccgagcactggttctccaagtgggagcggcagtgcctggccgaggccgaacaggacgagcagctgccccccgagctgcaggaggaggcggcggccgccgcgcagcccgagcacaagcagcagaagctgtggcacctcttccagaactcggccaccgccgtggcccagctctacaaagaccgagtgtgtcagcagccaggactttctctctgggtccccttccaaaacgcagccaccgccgtcaccaatctctacaaagaaagcgtggatacccatcaacgaagttttgatattggaattcagattggctatcagcgacgcaataaggatgtgttggcttgggttaaaaaacgcagaagaactattcgtcgagaagatttgatcagcttcctgtgtggaaaagttcctccaccacgaaactctagagctcccccaagactgactgtagtgtcccctaaccgagctacttcaacggaaactagctcatctgtagagactgatttgcaacccttccgggaagccatagctctgcatggtcttagtggtgcaatggctagtataagcgtgcgttcgagtaccccaggctctcctacacatgtaagcagtggatcgaatgctagtcgaaggagaaatggactccatgatgtcgatttgaacactttcatatcagaagaaatggcactccacttggacaatggtggaactagaaagcgtacctcagcccagtgtggcgatgtcattacagactcaccaacccataaacgcaacagaatgatctaaactgcaaacattttcacacccaccatgctgcttgaaagccacttgatcctcaacatatactataattgcaaaggaaacatgaggccatcttcccttgttcactgtttaagacaagtgaattctatagtggttgccataaaaggaagttctaggtatttatagtagatgcctcttgtaattatggctttcttaaaactataatcctagcagaggacatcagatattgtgtagtcgttagcaagatcatcataggcaaacatatatccgttccaaggctaaaagtgaccttaactgtatttattctcaaagggaaaggaaatatcagatgtttatttggttatagaatgctttttttttttttgggtccatttcctgctgtgttgagtattttgcttcaacagtattgccaggttcctaaaattgtctaaaaacatgatttggcttccatttttgcagctgcactgtaccatgcacctggtttctatatagtaacagtgtgcaattctaattattggactgtgccctgtttttagttttcaaatcaatttctaattctggtgattgtgtgatgtaaagaggtgctatgatggtcatgcaattaatactaaatattgaatcaatgcccagagctttattggattcactttgtgtgtgttagtgctctaaagtagcagtattattattaaactgtccccagagtaaccctgtaggcctaaagtactcagttttaagacaaacactacttcccatgcggggtactttccttatggtaaatgtaaacatgtagactgcattcgaggtgacctaaagtagagaggtcatgaactttgagaatgggcttcctttttggttcagtattagtgagagggagagggagatggatggtggggtaggttttctagtctatcattttacatttttcatggagtccctgcttagtgcagtttccattggaatgggtggaagatgataaagctctcttttttatctactaataatgtgattgcaacttaaaatagcaaaacccaactctccctgtccctccaatccctctcctaaaaagttcagtttggaatctcattctggaaaagatggaatcgcatggagattctctagctgttaggtagacctaaataaaaagttctcaatagattcctcttttgagtaaatataagacctcttgtagctacaatgttttagagcatgtttcatcttcatttttaatatcctgaactgaatgatagtgtttttttagatgaagaactgatgtcagcctgccaggtactgtaatttattctatcatattattatattatatatcaagtaggacagtgaaaaatgtttccttgcaaacttgtagtccagtatcagttacttcctatttttatccttaaaagaccattgcaaatcagtgtaagggtttttccagtaattactcacagcactttgttaaagtttgcaatttcttcagccatttaataatatctttctgtgaagaaactttgctgagttaaccataaatgttcattcattgactgggtgggatgtgaatggaatgttagaaatgttgtgtgaattgaagttctgtattcattatagatgtagcccttatttaaaaaagtgaattccatactaaaactaggaatgaaagtgagagatttctaaacttttgcgaaagtgggtcattttttgtttgactataatagcaggaagaattatagcaatctgtcattttacctgaaacagacaagcctatgtattatgaatactttcaagcttccctttggaatatacaagacatgcgtttggagttacctttgtttttctatcgtaaatttagattctggaattggggtttggtggtgcaatgtgttgctcacaagtggccagaactcctattcctaaaaggattttgagatggaggaacacatatttaattcccctttatgccttggttcttgctcctctttccacgttggataacaattttttggttgttttgtttaagttggtgctctgaagcttaatctcagtaccctttactctgaattgtcaaattttgataaaacgtgccattttctttggtaagagaaagcaggtcttaatgtctgccagaacacaatttatatgccttattggcttcattaaacttttagaaaactttagcatttgttacttttttccattgcatttactttcaaatgcacctaatgaatttgtcacccagtcgcaacttttcccttctctgtcccattgctttctcctttccccgacgcacagaataaacatgaagctcagcagtagaagcgtaatgatttccctcaggaaaaacttctgacagctaggtttttcaagggtttccctgtgctagctgagatgcaaaacaaatcatggaagattgcatacctgtgtggtattttaaaaacaagttgactttttcagtttcttgaacggttaagggtggatttaaaaactagacagtttagttttggggaacagaagctctcttcgtcttaagccagattctctgattcttttagacgtcatagctccttagttctgctcctgtcgccctaacttggcatgggcaagttgaagttcatccttagactgcagcgttctgagcatggctgaagtattaaaatgtttaatattttttagagcaaaattgatggaaagcatttggctgaatctaaagacctgcagtcagattcttcaatgtggtttacccaactggagtagtgataaacaccttaatcataaaatgaataaaaacaaaaaaaccaaaaaaaaaaaaaaaaaa

SEQ ID NO: 753 - DNA, 3050 bp, HOMO SAPIENS
ggagtcagtgatttgaacgaagtactttcagtttcatattactctaaatccattacaaatctgcttagcttctaaatatttcatcaatgaggaaatcccagccctacaacttcggaacagtgaaatattagtccagggatccagtgagagacacagaagtgctagaagccagtgctcgtgaactaaggagaaaaagaacagacaagggaacagcctggacatggcatcagagatccacatgacaggcccaatgtgcctcattgagaacactaatgggcgactgatggcgaatccagaagctctgaagatcctttctgccattacacagcctatggtggtggtggcaattgtgggcctctaccgcacaggcaaatcctacctgatgaacaagctggctggaaagaaaaagggcttctctctgggctccacggtgcagtctcacactaaaggaatctggatgtggtgtgtgccccaccccaagaagccaggccacatcctagttctgctggacaccgagggtctgggagatgtagagaagggtgacaaccagaatgactcctggatcttcgccctggccgtcctcctgagcagcaccttcgtgtacaatagcataggaaccatcaaccagcaggctatggaccaactgtactatgtgacagagctgacacatagaatccgatcaaaatcctcacctgatgagaatgagaatgaggttgaggattcagctgactttgtgagcttcttcccagactttgtgtggacactgagagatttctccctggacttggaagcagatggacaacccctcacaccagatgagtacctgacatactccctgaagctgaagaaaggtaccagtcaaaaagatgaaacttttaacctgcccagactctgtatccggaaattcttcccaaagaaaaaatgctttgtctttgatcggcccgttcaccgcaggaagcttgcccagctcgagaaactacaagatgaagagctggaccccgaatttgtgcaacaagtagcagacttctgttcctacatctttagtaattccaaaactaaaactctttcaggaggcatccaggtcaacgggcctcgtctagagagcctggtgctgacctacgtcaatgccatcagcagtggggatctgccgtgcatggagaacgcagtcctggccttggcccagatagagaactcagctgcagtgcaaaaggctattgcccactatgaacagcagatgggccagaaggtgcagctgcccacagaaaccctccaggagctgctggacctgcacagggacagtgagagagaggccattgaagtcttcatcaggagttccttcaaagatgtggaccatctatttcaaaaggagttagcggcccagctagaaaaaaagcgggatgacttttgtaaacagaatcaggaagcatcatcagatcgttgctcagctttacttcaggtcattttcagtcctctagaagaagaagtgaaggcgggaatttattcgaaaccagggggctatcgtctctttgttcagaagctacaagacctgaagaaaaagtactatgaggaaccgaggaaggggatacaggctgaagagattctgcagacatacttgaaatccaaggagtctatgactgatgcaattctccagacagaccagactctcacagaaaaagaaaaggagattgaagtggaacgtgtgaaagctgagtctgcacaggcttcagcaaaaatgttgcaggaaatgcaaagaaagaatgagcagatgatggaacagaaggagaggagttatcaggaacacttgaaacaactgactgagaagatggagaacgacagggtccagttgctgaaagagcaagagaggaccctcgctcttaaacttcaggaacaggagcaactactaaaagagggatttcaaaaagaaagcagaataatgaaaaatgagatacaggatctccagacgaaaatgagacgacgaaaggcatgtaccataagctaaagaccagagccttcctgtcacccctaaccaaggcataattgaaacaattttagaatttggaacaagcgtcactacatttgataataattagatcttgcatcataacaccaaaagtttataaaggcatgtggtacaatgatcaaaatcatgttttttcttaaaaaaaaaaaaagactgtaaattgtgcaacaaagatgcatttacctctgtatcaactcaggaaatctcataagctggtaccactcaggagaagtttattcttccagatgaccagcagtagacaaatggatactgagcagagtcttaggtaaaagtcttgggaaatatttgggcattggtctggccaagtctacaatgtcccaatatcaaggacaaccaccctagcttcttagtgaagacaatgtacagttatccgttagatcaagactacacggtctatgagcaataatgtgatttctggacattgcccatgtataatcctcactgatgatttcaagctaaagcaaaccaccttatacagagatctagaatctctttatgttctccagaggaaggtggaagaaaccatgggcaggagtaggaattgagtgataaacaattgggctaatgaagaaaacttctcttattgttcagttcatccagattataacttcaatgggacactttagaccattagacaattgacactggattaaacaaattcacataatgccaaatacacaatgtatttatagcaacgtataatttgcaaagatggactttaaaagatgctgtgtaactaaactgaaataattcaattacttattatttagaatgttaaagcttatgatagtcttttctaactcttaacactcatacttgaaaactttctgagtttccccagaagagaatatgggattttttttgacatttttgactcatttaataatgctcttgtgtttacctagtatatgtagactttgtcttatgtgtgaaaagtcctaggaaagtggttgatgtttcttatagcaattaaaaattatttttgaactgaaaatacaatgtatttcac

SEQ ID NO: 754 - DNA, 1095 bp, HOMO SAPIENS
gcggcagaggtttcagcaacaccagtggcctacaaagaaggagccttcctcctctccccagactccagactctagagggcgacctcctcctgctcctgctcctggagcgcagccagcgcacagcgtttccgcaggaatcttgagaatggcaaggcccgcacacccgcggtggttcccaggcccgccccctctcgcagctgcagccccacctgccagtgcgtgccgcctccgagcgacttccgggagccgggcggccaccgcggtgcaggcgcgcgcccaaaggctttgcgaggctcactcggtctgagaggtcggaggctgcgagtgtcgctgctgaaggctgtggtggaccgggctggatcgcggattttggattagataatagatttgggatcgccgattgggggttggattgcggatttggggttggataggggatttggggctgggtcggcgggggcaggggcggggaggtgaaaaggtgacagggagctgcctcctctcaagagcagttggttgggagtctgagaagtcaccaccatgaagttgttcggcttcaggagccacaggggccagacggtcctgggcaccatagaccacctgtacacgggttccgggtaccgaatccggtactcggaactgcagaagatccacaaggcagctgtcaagggcgacgccgcggagatggagcgctgtctggcgcgcaggagcggagacctggacgccctggacaagcagcacagcagtgtgtccccaagaaagtgtcagagcctttacgtggaccttcccatggaaaaggaaacagaatagtcaatggaaaaggagaaggacctcctgcaaaacatccttccttgaagcctagcactgaaatggaagatcctgctgtgaaaggagcagtacaaagaaagaatgtacagacattgagagcagaaaaagccttaccagtggcttcagaggaagagcaacaaaggcgtgaaagaagtgaaaagaagcaaccacagctaattttagaacatgcactctgacagaaaagacatctgagaaacaaaacaagcaaatttgttttcctttttgcacctgccaaaaaaaaaaaaa

SEQ ID NO: 755 - DNA, 1614 bp, HOMO SAPIENS
tgcgggtttggcggcgctgcgccggcaggcagcgaggccgggcgggccctgggccctcgcgcccctcccgcgaggcctgtcatgcagggccccgccgggaacgcgagccggggactgccaggcgggccgccctccacagtcgcgtccggggcgggccgctgcgagagcggcgcgctcatgcacagcttcggcatcttcctgcaggggctgctcggcgtcgtggccttcagcacgttaatgctcaaacgcttcagagaaccaaagcatgaaagacgtccgtggaggatatggtttttagacacttccaaacaagccataggaatgctgttcatccactttgcaaatgtatacctagcagatctcactgaagaggacccttgttcactgtacctcatcaacttcctcctggacgccactgtgggcatgctgctcatctacgtgggggtgcgcgccgtcagcgtcctggtagagtggcagcagtgggagtccctgcgcttcggcgaatatggagaccctctgcagtgtggagcctgggtcgggcagtgcgctctttacatcgtgatcatgatttttgaaaagtctgtcgtcttcatcgtcctcctaatacttcagtggaaaaaggtggccctgttgaatcccattgaaaacccagacttgaagctggccatcgtcatgctgatcgtccccttctttgtcaacgctttgatgttttgggtagtggacaatttcctcatgagaaaggggaagacgaaagctaagctagaagaaaggggagccaaccaggactcgaggaatgggagcaaggtccgctaccggagggccgcatcccacgaggagtctgagtctgagatcctgatctcagcggatgatgagatggaggagtccgacgtggaggaggacctccgcagactgacccccctcaagcctgtgaagaaaaagaagcaccgctttgggctacccgtatgacacattcccatgctgggggtgacgggagggccccgccagccgctggtgtgcagaggtcatcccacagcatcgttccttaccctctctctgcccttcctttctacctctgctcctcttgctgtctctgcccgctctcgcctgcccccagactactgtgacttaaaaagagggaagaggagccagcgcccgagggggccactggcggctggaggtccccattcagttgcactacaaacactgaccaaatatgcaaggaaggagctgtgtttgtttgttgtcgtcccagacagtgttgtgagggacctgaggccctgccccgtgtccgaccaccgagtggcaaggtggaaggaagcacaggcacacagaccgtgggtgggtctcctcaccgtggctgtgggcagtgcgaacacgtaacaccctcgggctaaaagtgactcgttgaccaagttggaaccggaatgctttcttactcaaaatggcttttgtaactattgatttctgaagctggttttatgagttgtgacagtgttaccaggttgggggtatgtgtttatttcctacaaagtacttacgggactaatgggcaaaacagagatttttaagtcttccgtaaaaaaaaaaaaaaaaaaaaaaaaaaaaaaaaaaaaa

SEQ ID NO: 756 - DNA, 3175 bp, HOMO SAPIENS
tgttgatatcaatatggcggttgtcagccagacaaagacagtcagtctgatgtgattgagacaagggaggtttttcagggggagactgggagataggggcctcccctcccccttctcctcttcctgcgccggcctcaacccctccccagtcccctcccgacgggcgccccacgcggaagacacccctccccctcccgccttccctcctccctatctcagcccttcgtactgggacgttggggagggggctgtgccgggcggagagaactcagcgaggattctgagaatggtagataacgcagatcatctctggaaaggatattgatccgcctcatgtaaagtatgcttagttcctttccagtggttttgctggaaaccatgtctcattatacagatgaacccagatttaccatagagcagatagatctgcttcagcgacttcggcgtactggaatgactaaacatgaaattctccatgccttggaaactttggaccgtcttgatcaagagcatagtgacaagtttggaagaaggtccagctatggaggaagttcatatgggaatagtactaacaatgtcccagcatcttcctctacagctacagcttccacacagacgcagcattcgggaatgtccccgtcacctagcaacagttatgatacttccccacagccttgcactaccaatcaaaatgggagggagaataatgagcgattatctacatccaatggaaagatgtcaccaactcgctaccatgcaaacagcatgggtcagaggtcatacagttttgaagcctcagaagaggacctagatgtagatgataaagtggaagaattaatgaggagggacagcagtgtgataaaagaggaaatcaaagcctttcttgccaatcggaggatttcccaagcagttgttgcacaggtaacaggtatcagtcagagccggatctctcattggctgttgcagcagggatcagacctgagtgaacagaagaaaagagcattttaccgatggtatcaacttgagaagacaaaccctggcgctacactaagtatgagaccagcccccattccaatagaggaccctgaatggagacaaacgcctcccccagtctctgccacatctggtactttccgactgcgacgagggagtcgatttacctggagaaaggagtgcctggctgttatggaaagttacttcaatgagaatcaatacccagatgaagcaaagagggaagaaattgcaaacgcttgcaatgcagttatacagaagccaggcaaaaagctgtcagatctggaaagagttacctccctgaaagtatataattggtttgctaacagaaggaaggagatcaagaggagagccaatattgaagcagcaatcctggagagtcatgggatagatgtgcagagtccaggaggccactcaaacagtgatgatgtcgacgggaatgactactctgagcaggatgacagtacgagccatagtgaccaccaagaccccatctcattagctgtggaaatggcagcagtcaaccacactatcttggcattggcccgacaaggagccaacgaaatcaagacagaggccctggatgatgactgatcagggaggttaaacatgacaagttaacttagtttagacgtagcaccttagcagactttcctcggtccttaacatgtgttcttacagtataacttgcagtttcttgtatgtcaggtagctgttagggtcttgttctgtgaagatggcatggtgccctcagcctttgcatatactctctcagtattaactcccagtaaataataaccaaccaaccaaccaaacttccctctcccagcccccgaggctagaaaatcttgctgctccgtcttagcattccaagaaagtgcttccaggtatttagatagccctcagttctcaaatattagactacgtgtaaaatcttgggtacctttagattcttgtaacactagtctgtactcccttttccttccccaagactgataggatgcaagctgaggtcgtggcacaggaatgacagacaccatttggggagtatccacagagtcaaaggaacactagaatccccacctcagcgtgaggataattgatttccagctgcaataagccgtgcctcattatagccacactgtggctagattatacttctttgggtgctgtgctaagaatgtcaatggaaaaagccgatctcagattttgtttgaagttaacatgcctgacacagacatcctttcctctcacaagctgtgtgacttagtagataaaatactgccttctgcctttgggaccatgattaaaaacaaagacaaaaaccaaaagtcattaaaaaaaaaaaaaaaaaaaacccagcttgagagcattggaaaaaaaaaatatgagctgaatgtctaatggatgctaagtccagttttcagaaccactgtacattccacggcacagttagcagtgcctgcctggaaaagttttggaggtcatcgtggaagttgctttgcctcctgtcagtgtcccctttccctgctaccaaaaaagtctttcaaggatggagctaaggtcaaaaatgagtgaaaaaacttgcagtgtttgtatccattaaacggaagccccctcactctgagaggtcactagaggacttcatagtggggttgtgctgcttatcacagatgcagacacttgcccagataggagcagagaaaagcaggggacgtttcctactcacattgtggctgtatgagaacacgatgggactgctttgctgttctctttactctgtccttggagaggtgtgaaaagctgtattgctacaggcaatttatttaataattggaagccatattgataatggatgtggtaatatttgtaaagtttaatctactttaagcggcagtaactaatggaatttttttccttgatcacatatgtagcacttttgttactttttaaagatatttatatttgataaatctttttttcattttgagaactcaaaataccaaacagtgaacttgcattctaaagtcaccctgtgatcaccttgtcatctagtagcaaaatgatgaactattcatgcatcaaagaaaattacatctgctggccttgtatgaaaatgatctcttggcatcccgattaaatgacacactgtcactgtgggtaa

SEQ ID NO: 757 - DNA, 4077 bp, HOMO SAPIENS
gcggctggtccaagcccggcgctgggggcgcgcagccgagaaagggtttgacgtggcagttcccagcccagctgcaactccgagcgtgagtccaggctaaggggacgccggccggggaagaggcgcggcgggagaagcgaccgcagcgggagcccggccaccgagggctgccggcactaggcgcagagccgccagcgctcggaagcccgcggggtgcgggagcgggaacagacttcttttgtagaattatcctatggaatgatattttcataatgagtcaacaaggttacgtggctacacctccgtattctcagcctcagcctggaataggcctttctccacctcattatgggcactatggggatccgtcgcacacagcatctccaacaggtatgatgaagccagcagggcctttgggggccaccgccactaggggaatgttgcctccgggtcccccacctcctggaccccatcagtttggtcagaatggagctcatgccactggtcaccctccccaaagatttccaggccctccacctgtcaacaatgtggcatcctcacatgcaccataccaaccctctgcacaatcttcttatccaggtcctatatccacttcatctgtcacccagctgggcagccagctcagtgctatgcaaatcaacagctatggttcaggcatggctcctccaagccagggaccccctggccctctgtcagccacatcattgcagactcctccacgacctccacagccttccattttgcagcctggatctcaagttcttccaccaccacccaccacactcaatggtcctggtgcctcacctttgcctctaccaatgtacagaccagatgggctctctgggcctcctcctccaaatgcccagtaccagcccccacctcttccaggccagaccttgggtgctggatatcctccgcagcaggccaactctggtccccagatggcaggcgcacaactgtcttacccaggaggcttccctggaggtcctgcacagatggctggtccgccacagccccagaagaagctggatcctgactctatccctagcccaatccaggtgattgagaatgatagagccagcagaggaggacaagtttatgccaccaacaccagaggccagatccctcccctggtcactacagattgcatgatacaagaccaaggaaatgccagtcctcgattcatccgttgtacaacatactgttttccatgcacgtcagatatggctaagcaagctcagattccattagctgctgtcatcaagccctttgccaccattccttcaaatgagagtcccctttacttggtaaatcacggcgagagtggaccagtcagatgcaacaggtgcaaggcctacatgtgcccatttatgcagttcatcgaaggaggaaggagatatcagtgtggattttgcaactgtgtgaatgatgttccaccattctatttccaacatctggaccacattggaagaagactggaccactatgagaaaccagagttatctctaggatcttatgaatatgttgccactttggattattgcagaaagagtaagcctcccaacccaccagcctttatcttcatgattgatgtttcatatagtaacataaagaatggacttgtcaagctcatatgtgaagaactgaagaccatgctggaaaaaattccaaaggaagagcaagaagagacgtctgcaattcgagtgggttttatcacatataacaaagttctccatttctttaatgtgaagagtaatctggcccagcctcagatgatggtggtgactgatgttggagaagtctttgttcctttgttggatggtttccttgtcaactatcaagaatcccaatctgtgattcataatttgttggaccagattccagacatgtttgcagactctaatgaaaatgagactgtctttgctcctgtcatccaggctggcatggaagcactaaaggcagcagactgtcctgggaagctgttcatcttccattcttccttgccaactgctgaagcaccagggaagctcaaaaacagagatgacaaaaaactggttaatacagacaaagagaagatacttttccagccccaaacaaatgtctatgactcattggccaaggactgcgtggctcacggctgctctgtgacactcttcctctttcctagtcagtatgtggacgtggcctcgctggggctggttcctcagctcactggaggaaccctttacaaatacaacaatttccagatgcacttggatagacaacaatttttgaacgacctcagaaatgatattgaaaagaaaataggctttgatgctattatgagggttcgtaccagcacaggtttcagagccactgatttctttggtggaatcttgatgaacaacaccaccgatgtagaaatggctgccatcgattgtgacaaggcagtgaccgtggagttcaagcacgatgacaaactcagtgaagacagtggagccttaatccagtgtgctgtgctttacacgacaatcagtggtcaaagaagacttcggattcacaatcttggcttaaactgcagctctcagctagctgatctttataagagctgtgagacagatgctcttatcaacttctttgccaagtcagcttttaaagcagttctccaccagcctttgaaggtcatccgggaaattctagttaatcagactgcccatatgttggcatgttaccggaagaattgtgcaagtccttctgcagcaagccagcttattctaccagattccatgaaagtattgccagtgtacatgaattgcttgttgaaaaactgtgtactactcagcagaccagagatctcaactgatgaacgagcataccagagacagctggtcatgaccatgggtgtggctgactctcagcttttcttctacccacaacttctgcccatacacacgttagatgtcaagagtacaatgttacctgctgccgttcgttgctctgagtcccgtctttcagaagaaggaatattcttactggctaatggtctacacatgttcctgtggttgggagtaagcagcccaccagaactgatccaaggaatatttaatgtgccatcttttgcacatatcaacacagatatgacattgctgcctgaagtgggaaacccatactctcaacaactcagaatgataatgggtattatccaacaaaagaggccatattcaatgaagctcacaattgtaaagcagcgagaacaaccagaaatggttttccgacagttcctggtagaagacaaaggactttacggaggctcttcttatgtggatttcctttgttgtgttcacaaggagatctgtcagctgcttaattaattgaaacttctctgtcattgatgttgcatttccaaggagataatctccttcttggtgcctaattttctagatgataataggctagttttgatttcttgctcattttcagaataactttccaggaagagatggcatttagaacttcagctttggtgctcaggtataaagccaattaaggtacaattgtaccataaagggaacaatctgtttctgattgcacagtttctaatttttaaaactgatgtggtttgcatttcataaaaggcaaagtttacagaaccataaacattctcaattttctttatgctagacatataaattatttttcaaactgtatagatttggggtaaaaagttgtctcagttcctctcccaattgcaatgagaaaaaaaagcttaatttttacattatacttaattttctaaaaccatgtaactccattgaacacatttttcaacttaaggtctgcatagcagacttttaataaccttgggatttatctggtagaacaatatgtgttctacatttttttcataattatatattgtgtatgttaaaactattttccagttgttttgtctgtaaaactgtctttatcaatatgcttaatggttctttgtacaattttgaaagtttctacctgtatataatggatgttaaccagtatcaataaatcacttcgtataatcttaaaaaaaaaaaaaaa

SEQ ID NO: 758 - DNA, 374 bp, HOMO SAPIENS
  misc_feature (33)..(33): n is a, c, g, or t
  misc_feature (63)..(63): n is a, c, g, or t
  misc_feature (75)..(75): n is a, c, g, or t
  misc_feature (161)..(161): n is a, c, g, or t
  misc_feature (165)..(165): n is a, c, g, or t
  misc_feature (201)..(201): n is a, c, g, or t
  misc_feature (268)..(268): n is a, c, g, or t
  misc_feature (320)..(320): n is a, c, g, or t
gggaggaagagagctcccatcttttccattacngtatttacttaaaactggaaaaaactgaancactgggatggnatttcatttatcttttgaaatgaagaatagatacattaatttaaatgattctctaaagactgtccttcagcatccctaaagcattncaanactataggcacagtttttattttatctttctggcancctggtttgggctttgggcttagattaaaaagacgagccttctcctgcccctgctcccttttattcnctgccatctgctaagctcgactttttatctctcaggccaaatttgactctgnaagggactttgcataacgtttcatcctcagaatcgctaatgatgggcagaggac

SEQ ID NO: 759 - DNA, 5887 bp, HOMO SAPIENS
ctcttttccctcacagcccgggcgccgggcggcgagtgcgttagtcggccgggacgcggagctgtgtgcatctcctacgcgggctcgctcgctcccgggagccgcgcagcttccccggcggtggcaggagcggcgaagagcgccatcagcgggcccttacggccccaggcctcgcggcgcgcggtccgctcgccctcctcgtccgcccaacctgcggcctgtggaggcgtgaggcgacgacaggcgagcgcctcgagcagcgttagccgctgcggccgccggtcctccctccacctcctcctcggccccccctcgcttccctcctcccacttcccgagctccggcgtgtcccggccacgctcgacgctgctgcaggaacaaaggaagaccccgcggcggcggcggcgccacctccgcctgctgctccgacccgctcccggcccgcggcggcggcaccagggcgcccggctcagccttcccggaggcctcggcccggcctcatcgtgccggcttcgcgcgcgaacccggctttcgcatttgggaccctgcagggccctgaaaaggagcctttaaaagtcaattctactccatttggcaaagagggaactgaaatctggaaagtaaggacttgcccaaggtcactgacttagtggcagactagagacttgaactcaggtctccattcccagcagaaaaatatggctcaggagactaaccagaccccggggcccatgctgtgtagcacaggatgtggcttttatggaaatcctaggacaaatggaatgtgttcagtttgctacaaagaacatcttcagaggcagcaaaatagtggcagaatgagcccaatgggaacagctagtggttccaacagtcctacctcagattctgcatctgtacagagagcagacactagcttaaacaactgtgaaggtgctgctggcagcacatctgaaaaatcaagaaatgtgcctgtggctgccttgcctgtaactcagcaaatgacagaaatgagcatttcaagagaggacaaaataactaccccgaaaacagaggtgtcagagccagttgtcactcagcccagtccatcagtttctcagcccagtacttctcagagtgaagaaaaagctcctgaattgcccaaaccaaagaaaaacagatgtttcatgtgcagaaagaaagttggtcttacagggtttgactgccgatgtggaaatttgttttgtggacttcaccgttactctgacaagcacaactgtccgtatgattacaaagcagaagctgcagcaaaaatcagaaaagagaatccagttgttgtggctgaaaaaattcagagaatataaattacttcttgtgaagagactgaaactttgtttttattttaatatatcgtaggaaaacattaaagagcagatgcatggccatttttctttgatgttctccagagttttacattacacttgtctgtcttataattgatattttaggatgtttgggtgtttgttacaggcagaattggatagatacagccctacaaatgtatatgccctcccctgaaaaaaattggatgaaaatctgcacagcaaagtgaaacacacagataataggaacaaaatgtagttcccatgtgccaaacaaaataaatgaaatctctgcatgtttgcagcatatctgccttttgggaatgtaatcaaggtataatctttggctagtgttatgtgcctgtatttttttaaaatggtacaccagaaaaggactggcagtctacttctaccatagttaaacttcaccctctttaatttcacaacatattctttggaagcaggaagaaatgctcataaagaggatcagaccttctttcccgtgaaaccagtatttggcgccatatataagcctggttaaattggtcatctaaagctgtcaaataagacattctgtgaaaggtaaacatcgaaactggttataagtaaaaccatcaagccaacaacagggtcttgagataacctttgaagcttattgtactggcctgcaccagaagatgtctgcattactcattgctaaaaatgtgtagcacagaactgcactaggattaatttgtttacaagaagaaatttaaactctacgtttggttttcacatacagcagctctattgaataacatgcatctgaattttaagttgcaaaggtatctgaataatttttcatgtgcatcttttgtcgaatgttttggttcaagaaagaatgtttaaagctttttaaaagacttcagttcttaatgtaactgtacccttctgcatggaaaatcataaccaacatggctgcagtagacttcttagtggtatccagcaccacttgcagagggctgctttatcatattgtacttgggtgtaggactctagtgttcttgggtgtattgcatgggctgcattatctacagcattgtacaataacaactagaaaaggcagtatacttcactgatgcttgtctggtaataatcacttctgtgttataatggaaggttttttgtgatgtatgaaacttgtgttttttatatataaatgagtatagttagtgttgtggtaatgcctgttttcatctgtaaatagttaagtatgtacacgaggcactacttctgatttattgcaatgttcagtcctagtttttacttttattcttaaagcattcagttttgctttcaattttatgtaccttagttctgagttagacctgcagatgtgtacagatagttcatatttatgtattgcacataatcatgctattcagcattgatgctatattgtattatgtaaataataaaagccatgtacagagggaaacttcacttgttcattgggtttttaagccatagttggagtcctaaagggggaaaattagaaaatgttactttacatggctatataattttttttcctttgccatcgctgaacttgttcaagtgataatcaagagatattagaagcatttgcaggtatgatacctgataggcagtttatttttgaagaattcaataggcacctttgggattaaaacaattttaaaatttgagaaagatgaaatttgaacaattatggcctacctcgcttctccatgttgtaaaagatgatgttttatgacaattctgaagaagaaagtaggtatgacttagtttacaaaaagagttctgttttatttctgttttgggtttggctctaatacagagattcacccatggacttggtctctgtagcgtttatgccagatcataaagaacaaggggtgacaggtacatgttgactttacctggggtaaatgattaccagagtgcaactgttgcttctctgtgatggagtttggggtggaaataccctagttttatctgtcagttctttgcatgctgctacttttgcttcaagttagggaggtacatatgtatgtcaaagttcctatactgacatagggtagtatttctctgaatatgaaaagtcacaattgagttgaaaatttagaagttgaagatttagaagggcaacttaatttttcaagttaaaaatggaagtaagagtggtatagagaaggtaagatgagccctcggactccatcactctgaaggtctgagtagtagcaagagatagatttttgtttggccaggctgcagtgcaatggcgtaatcttggctcactgcaacctctgcctcctgggttcaagtgattctcctgcctctgcctcctaagtagctgggatcacaggcaccagccaccacgcccagctaatttttgtatttttaatagagacagtttctccatgttggtcaggctggtcttgaactcctgacctcaggtgagctgcccgcctcggcctcccaaagtgctgggattacaggcgtgaggcaccgcacccggccaatcagttttttttgttttttttttgtttgtttgttttacaagaaacattaaaccagatcagaacaaagatttgtcagggttgtccattgactggggagaaagggaatcagtgtgtaaggcacctgagaggactcagttctacccaaattcttgcattcaaacctgaatgcaaggccatgaagtcctttgaaatgtacagatattaagcaatttaataatataccatgtttcccttacataagcagacaaatatttacacccccatgacctgaagttttgttaggctgtgaccacatgaattcgcagtataaatgggtgagtcctttttgaaaacctcatcttcagtgtgcctgatctgtaaaactagagcctcaggtttgatcctaggtaggcttcccacaacgtggggaaaattagtttgtgagggaaagctgtttctgagcattatggcatagtgattaagatgagggaccctggaaccagcccgtgattttgggcaagttattttaggtccactttggactgcttcatctcttaaatgaagacagcaaccaccttcaggagtgtgaaggtgacaacacttaaaactgtgcctggcacattgtatttgctattgtcttaatgttctggaataatggtttccataacttgggaagaaaactttgagaacaggattggttacatcaagttgtatagtgaaaagataaagatttgttatttaaacttgcagtttaaagtcattagaatcattcttttccgtaaggctttctttgcaagagatctgcattaaataaagttgctaggaaataactaaaattggggaaataatctaataatagcaagatgttaagcatactattattgtattttgggggttggtaataacattcacatggatttatcaatacacactgagaagcaaagcctctcaagctgtcccatatcctccatttcaaaggcacacatacattttaggtaactcataatttagaaaggttatttaatcttttccacatgtaaatatttgaatatgtacaaagacttgatttgactcttgtctgtttttgttttgttttgtttgtttgagacagaggctccgtcgcccaggctggagtaaaatggcatggtctcagctcactgcaagttccgcctcccgggttcacgccattctcctggctcagcctccggagtagttgggactacaggcacccgtcaccacacctggctaatgttttttgttttttgggtttttttgtatttttagtagagagagggtttcaccgtgttagccagggtggtctcgatctcctgacctcatgatccgcccaccccggcctcccaaaatgctgggattacaggtgtgagccactgcgcctggccgactcttgtctgtttgaatgcaaagttctcaatagtggtttttgtccataagtattaacttataattttggagagtgataggtatggttgctggttgattagcaataagattatgtagccttaaactagctagaagagtttgcatgggtgaggcaacaggctgttaacaaaaagaaactggaaatacagtttcccctgtttgtttctcctgtttgtacaatctgctttaaaaacaagtgaacatgcaccatgtcagtcatggtgaatcggccaacagccagcccttgccagttgacatcacagtctaagatgggaaactggtacagatagacatgaagagagcttagcagtggttgaggtggtgactaaatatacagtcattgaataaataccgtgtagcaaatgtaaaaaaaaaaaaaaaagtacaacagaatacaaaagtgccatttaatattttatagctatttctatgcacaagtgctggttttaaatttatataaaagcaaagactgtttctgtgttttcttccagagtatttctgttacagccatagaagtaaagttaataaatgtaagactttttttgtttaaaaaaaaaaaaaaaaaaa

SEQ ID NO: 760 - DNA, 5123 bp, HOMO SAPIENS
aacaagatgagctgatagggttcccaggctgcctggagttacataacccattgtgcttccaggacagctcacaatcttaggatttgccctaacaagcaaactcagaaaactgctgaggaaggcacgggagggtggctgtgcgaggtactgccggggctgagctctcatggaggctctctctgttctctgaagtgcctttggagtttatgtctgcacatggcattggtttttcaattcgggcagcccgtcagggctcagcctctgccaggactctgccacggcaagctcattcggacaaacgcctgtgatgtgtgcaacagcaccgatcttccggaagtcgagatcattagcctgctggaggagcagctgccccattataagttaagagccgacaccatctacggttatgaccacgacgactggctccatacacctctcatttctccagatgccaacattgacctcacaaccgagcaaattgaagagacgttaaaatacttccttttatgtgctgaaagagttggccagatgactaagacatataatgacatagatgctgtcactcggcttcttgaggagaaagagcgggatttagaattggccgctcgcatcggccagtcgttgttgaagaagaacaagaccctaaccgagaggaacgagctgctggaggagcaggtggaacacatcagggaggaggtgtctcagctccggcatgagctgtccatgaaggatgagctgcttcagttctacaccagcgctgcggaggagagtgagcccgagtccgtttgctcaaccccgttgaagaggaatgagtcgtcctcctcagtccagaattactttcatttggattctcttcaaaagaagctgaaagaccttgaagaggagaatgttgtacttcgatccgaggccagccagctgaagacagagaccatcacctatgaggagaaggagcagcagctggtcaatgactgcgtgaaggagctgagggatgccaatgtccagattgctagtatctcagaggaactggccaagaagacggaagatgctgcccgccagcaagaggagatcacacacctgctatcgcaaatagttgatttgcagaaaaaggcaaaagcttgcgcagtggaaaatgaagaacttgtccagcatctgggggctgctaaggatgcccagcggcagctcacagccgagctgcgtgagctggaggacaagtacgcagagtgcatggagatgctgcatgaggcgcaggaggagctgaagaacctccggaacaaaaccatgcccaataccacgtctcggcgctaccactcactgggcctgtttcccatggattccttggcagcagagattgagggaacgatgcgcaaggagctgcagttggaagaggccgagtctccagacatcactcaccagaagcgtgtctttgagacagtaagaaacatcaaccaggttgtcaagcagagatctctgaccccttctcccatgaacatccccggctccaaccagtcctcggccatgaactccctcctgtccagctgcgtcagcaccccccggtccagcttctacggcagcgacataggcaacgtcgtcctcgacaacaagaccaacagcatcattctggaaacagaggcagccgacctgggaaacgatgagcggagtaagaagccggggacgccgggcaccccaggctcccacgacctggagacggcgctgaggcggctgtccctgcgccgggagaactacctctcggagaggaggttctttgaggaggagcaagagaggaagctccaggagctggcggagaagggcgagctgcgcagcggctccctcacacccactgagagcatcatgtccctgggcacgcactcccgcttctccgagttcaccggcttctctggcatgtccttcagcagccgctcctacctgcctgagaagctccagatcgtgaagccgctggaaggttccgccacacttcaccactggcagcagttggcccaacctcaccttgggggcatcctggacccccggcccggtgtggtcaccaagggcttccggacgctggatgttgacctggacgaagtgtactgccttaacgactttgaagaagatgacacaggtgaccacatttctctcccacgcctagctacctccactccagttcagcacccagagacctcagcgcaccatcctgggaagtgcatgtctcagaccaactccaccttcaccttcaccacctgtcgcatcctgcatccttcagatgagctcactcgggtcacaccaagccttaactcagccccaactccagcttgtggcagcaccagccacttgaaatccacgccggtggccacaccatgcactccacggagactgagcctggctgagtccttcactaacacccgtgagtccacgaccaccatgagcacatccctggggctcgtgtggctgttgaaggagcggggcatttctgctgccgtgtacgacccccagagctgggacagggccggccggggctccctcctgcactcctacacgcccaagatggctgtgatcccctctactccgccgaactcgcctatgcagacacccacatcctccccaccctcctttgagttcaagtgcacgagccctccctacgacaatttcctggcttccaagccagccagctccatcctgagggaagtgagagaaaagaacgtccgcagcagcgagagccagaccgacgtgtccgtctccaacctcaacctcgtggacaaagtcaggaggtttggggtggccaaagtggtgaactcagggcgagcccatgtccccaccttgactgaggagcagggacccctcctctgtgggcccccggggccagcaccagcccttgttcccagaggcctggtacctgagggcctgcccctcagatgccccactgtcaccagtgccatcggtgggctgcagctcaatagtggcatccggcggaatcgcagcttccccaccatggtgggatctagcatgcagatgaaagctcctgtgactctcacctcgggcatcttgatgggtgctaagctctccaaacaaactagcttacggtgaggactggaggggggccggttgccctagaggagacccacgttctcctctcttgctcccacctccctctcttccccccacagtgcactccctccctctgcccttctctgtccaccccctcctaagctagacaaatcaacctcgtgcctaatggaggaagtgtggaaactttgtaaaatgtgtacataggacttggagaccttgtgtccgccctgctctttcttccgatcccacaggaagtgcccctgcactgtcatcactctcacgaggacgtcacctgtgctaacctgggggaaggtggggtcctttcttctttccttttgagaagcactgaaactcccaagtgtgttcttatcccatggataggaaaccagtgaattccgtggctggcacaccacgagctgtcacgcggcacgggtcataacacatctgggtgtcatcggacacctcacctcgcccaccctgtaggagcgtaaggagcctccatcctcagccacgtgcagctgacgtggctttcctgatcggagggcttttcttttatgggtggcccagcttcttcaagaccttcactgctctgcctcagtggacagtcgtttcttttttgaggtgtgaccttttgttttcatgccttccccttgaagtcatcctgtgttttgtaatcagctgtcaggccaaatgtctgacccgaaagagaatgtatttacactcatgctgcgttgttcagcagcccctctgtgttctgtgtgatttgttttatttttccttttttttacatatatatgcagggaagtaatggtactggtagtgtatgttttctatgtggttcaaatatgaatttcgaacacaccaagccgctaatgagatagcagcttttttctgggacccagagtcacaaccaaattgatttaagaccggacccaagacacctttaacaataggactgaaaggaaaaaggatagggaaaaagcttattaaagaaatgtgtcaacaccaaatgtagaggggaagaaccacaaccaggcataataccaaaccggttccagggggaaacaaggctttggtattccgctggctccagcgctttttctgaaacccgaggctggccagggtgctgtcaccatgcggtctttgattgcagccattcaatgcccacatgcttttccttcttgtttcagaacagcacatggtcacaacaagatattttctttccctccaaagccttttgtctccttgtgcctctttttatccttaggaaaagatccaggtgcttgtgaaaagaatcatgaatgcaacaagggaggctggtcctgttgctgtcgccgattaagttttaaacttttatttattatttatgtctgccgtattttaaataaacattctcgttccttccagtttcagtcatagtgtgtctgtggcattccagtccaaccatgtgacttatttattctaatttgagggctgcactgtacaccatggtgtcctgtgacaccgtgttccagacatttatggaaggaaaacatcccatataaatgaaactgtcatgctgtgtcctccccggcagcagaagatgtgtccttccattgagtgagggtaaccttatgtccaccaaggatactttgagaaagcccctaaggaacaagcctcagtcccacggtttcagactatttattctctgaacacaagagtattggttaattatgttctcagctctccctgctgttgtatgtgtgcattcactgcaagtaacttatatctttttatttgaatgtattttaaagcagtagatagaataacaaaggaatatgaaaaccatggactgaatggaccattttatgtattcagagagagaagccactcatcattgccagaaataccatgtaaaaattggcagttcagaggttgcaatacttagtatagtaaataaataaacggtcaacattgtgcaaccactaccaaaaagtgtgttgtaatgcatcaaaaatcaacacaattttattcactaatgagtatcaataaaataagttcaaatgatggaaaccacaaaaaaa

SEQ ID NO: 761 - DNA, 5395 bp, HOMO SAPIENS
aattcactaatgcattctgctctttttgagagcacagcttctcagatgtgctccttggagctggtgtgcagtgtcctgactgtaagatcaagtccaaacctgttttggaattgaggaaacttctcttttgatctcagcccttggtggtccaggtcttcatgctgctgtgggtgatattactggtcctggctcctgtcagtggacagtttgcaaggacacccaggcccattattttcctccagcctccatggaccacagtcttccaaggagagagagtgaccctcacttgcaagggatttcgcttctactcaccacagaaaacaaaatggtaccatcggtaccttgggaaagaaatactaagagaaaccccagacaatatccttgaggttcaggaatctggagagtacagatgccaggcccagggctcccctctcagtagccctgtgcacttggatttttcttcagcttcgctgatcctgcaagctccactttctgtgtttgaaggagactctgtggttctgaggtgccgggcaaaggcggaagtaacactgaataatactatttacaagaatgataatgtcctggcattccttaataaaagaactgacttccatattcctcatgcatgtctcaaggacaatggtgcatatcgctgtactggatataaggaaagttgttgccctgtttcttccaatacagtcaaaatccaagtccaagagccatttacacgtccagtgctgagagccagctccttccagcccatcagcgggaacccagtgaccctgacctgtgagacccagctctctctagagaggtcagatgtcccgctccggttccgcttcttcagagatgaccagaccctgggattaggctggagtctctccccgaatttccagattactgccatgtggagtaaagattcagggttctactggtgtaaggcagcaacaatgccttacagcgtcatatctgacagcccgagatcctggatacaggtgcagatccctgcatctcatcctgtcctcactctcagccctgaaaaggctctgaattttgagggaaccaaggtgacacttcactgtgaaacccaggaagattctctgcgcactttgtacaggttttatcatgagggtgtccccctgaggcacaagtcagtccgctgtgaaaggggagcatccatcagcttctcactgactacagagaattcagggaactactactgcacagctgacaatggccttggcgccaagcccagtaaggctgtgagcctctcagtcactgttcccgtgtctcatcctgtcctcaacctcagctctcctgaggacctgatttttgagggagccaaggtgacacttcactgtgaagcccagagaggttcactccccatcctgtaccagtttcatcatgagggtgctgccctggagcgtaggtcggccaactctgcaggaggagtggccatcagcttctctctgactgcagagcattcagggaactactactgcacagctgacaatggctttggcccccagcgcagtaaggcggtgagcctctccgtcactgtccctgtgtctcatcctgtcctcaccctcagctctgctgaggccctgacttttgaaggagccactgtgacacttcactgtgaagtccagagaggttccccacaaatcctataccagttttatcatgaggacatgcccctgtggagcagctcaacaccctctgtgggaagagtgtccttcagcttctctctgactgaaggacattcagggaattactactgcacagctgacaatggctttggtccccagcgcagtgaagtggtgagcctttttgtcactgttccagtgtctcgccccatcctcaccctcagggttcccagggcccaggctgtggtgggggacctgctggagcttcactgtgaggccccgagaggctctcccccaatcctgtactggttttatcatgaggatgtcaccctggggagcagctcagccccctctggaggagaagcttctttcaacctctctctgactgcagaacattctggaaactactcatgtgaggccaacaatggcctagtggcccagcacagtgacacaatatcactcagtgttatagttccagtatctcgtcccatcctcaccttcagggctcccagggcccaggctgtggtgggggacctgctggagcttcactgtgaggccctgagaggctcctccccaatcctgtactggttttatcatgaagatgtcaccctgggtaagatctcagccccctctggaggaggggcctccttcaacctctctctgactacagaacattctggaatctactcctgtgaggcagacaatggtctggaggcccagcgcagtgagatggtgacactgaaagttgcagttccggtgtctcgcccggtcctcaccctcagggctcccgggacccatgctgcggtgggggacctgctggagcttcactgtgaggccctgagaggctctcccctgatcctgtaccggttttttcatgaggatgtcaccctaggaaataggtcgtccccctctggaggagcgtccttaaacctctctctgactgcagagcactctggaaactactcctgtgaggccgacaatggcctcggggcccagcgcagtgagacagtgacactttatatcacagggctgaccgcgaacagaagtggcccttttgccacaggagtcgccgggggcctgctcagcatagcaggccttgctgcgggggcactgctgctctactgctggctctcgagaaaagcagggagaaagcctgcctctgaccccgccaggagcccttcagactcggactcccaagagcccacctatcacaatgtaccagcctgggaagagctgcaaccagtgtacactaatgcaaatcctagaggagaaaatgtggtttactcagaagtacggatcatccaagagaaaaagaaacatgcagtggcctctgaccccaggcatctcaggaacaagggttcccctatcatctactctgaagttaaggtggcgtcaaccccggtttccggatccctgttcttggcttcctcagctcctcacagatgagtccacacgtctctccaactgctgtttcagcctctgcaccccaaagttccccttgggggagaagcagcattgaagtgggaagatttaggctgccccagaccatatctactggcctttgtttcacatgtcctcattctcagtctgaccagaatgcagggccctgctggactgtcacctgtttcccagttaaagccctgactggcaggttttttaatccagtggcaaggtgctcccactccagggcccagcacatctcctggattccttagtgggcttcagctgtggttgctgttctgagtactgctctcatcacacccccacagagggggtcttaccacacaaagggagagtgggccttcaggagatgccgggctggcctaacagctcaggtgctcctaaactccgacacagagttcctgctttgggtggatgcatttctcaattgtcatcagcctggtggggctactgcagtgtgctgccaaatgggacagcacacagcctgtgcacatgggacatgtgatgggtctccccacgggggctgcatttcacactcctccacctgtctcaaactctaaggtcggcacttgacaccaaggtaacttctctcctgctcatgtgtcagtgtctacctgcccaagtaagtggctttcatacaccaagtcccaagttcttcccatcctaacagaagtaacccagcaagtcaaggccaggaggaccaggggtgcagacagaacacatactggaacacaggaggtgctcaattactatttgactgactgactgaatgaatgaatgaatgaggaagaaaactgtgggtaatcaaactggcataaaatccagtgcactccctaggaaatccgggaggtattctggcttccctaagaaacaatggaagagaaggagcttggatgaggaaactgttcagcaagaggaagggcttctcacactttcatgtgcttgtggatcacctgaggatcctgtgaaaatacagatactgattcagtgggtctgcgtagagcctgagactgccattctaacatgttcccaggggatgctgatgctgctggccctgggactgcactgcatgcatgtgaagccctataggtctcagcagaggcccatggagagggaatgtgtggctctggctgcccagggcccaactcggttcacacggatcgtgctgctccctggccagcctttggccacagcaccaccagctgctgttgctgagagagcttcttctctgtgacatgttggctttcatcagccaccctgggaagcggaaagtagctgccactatctttgtttccccacctcaggcctcacactttcccatgaaaagggtgaatgtatataacctgagccctctccattcagagttgttctcccatctctgagcaatgggatgttctgttccgcttttatgatatccatcacatcttatcttgatctttgctcccagtggattgtacagtgatgacttttaagccccacggccctgaaataaaatccttccaagggcattggaagctcactccacctgaaccatggcttttcatgcttccaagtgtcagggccttgcccagatagacagggctggctctgctgccccaacctttcaaggaggaaaccagacacctgagacaggagcctgtatgcagcccagtgcagccttgcagaggacaaggctggaggcatttgtcatcactacagatatgcaactaaaatagacgtggagcaagagaaatgcattcccaccgaggccgcttttttaggcctagttgaaagtcaagaaggacagcagcaagcataggctcaggattaaagaaaaaaatctgctcacagtctgttctggaggtcacatcaccaacaaagctcacgccctatgcagttctgagaaggtggaggcaccaggctcaaaagaggaaatttagaatttctcattgggagagtaaggtacccccatcccagaatgataactgcacagtggcagaacaaactccaccctaatgtgggtggaccccgtccagtctgttgaaggcctgaatgtaacaaaagggcttattcttcctcaagtaagggggaactcctgctttgggctgggacataagtttttctgctttcagacgcaaactgaaaaatggctcttcttgggtcttgagcttgctggcatatggactgaaagaaactatgctattggatctcctggatctccagcttgctgactgcagatcttgagatatgtcagcctctacagtcacaagagctaattcattctaataaaccaatctttctgtaaaaaa

SEQ ID NO: 762 - DNA, 1308 bp, HOMO SAPIENS
ccgggagcgctaggcctggtccctcttcctagaatagcgttgcgcgcatgcgccttgacgagtgagccggggagccatggacaactgtttggcggccgcagcgctgaatggggtggaccgacgttccctgcagcgttcagcaaggctggctctagaagtgctggagagggccaagaggagggcggtggactggcatgccctggagcgtcccaaaggctgcatgggggtccttgcccgggaggcgccccacctagagaaacagccggcagccggcccgcagcgcgttctcccgggagagagagaagagagacccccaacccttagtgcttccttcagaacaatggctgaattcatggactatacttcaagtcagtgtgggaaatattattcatctgtgccagaggaaggaggggcaacccatgtctatcgttatcacagaggcgagtcgaagctgcacatgtgcttggacatagggaatggtcagagaaaagacagaaaaaagacatcccttggtcctggaggcagctatcaaatatcagagcatgctccagaggcatcccagcctgctgagaacatctctaaggacctctacatagaagtatatccagggacctattctgtcactgtgggctcaaatgacttaaccaagaagactcatgtggtagcagttgattctggacaaagcgtggacctggtcttccctgtgtgatgttgaccatcactgccatcacatcacctttttttaagtagtaagaataaagccactgtatgattctcttaatagctatacattaatcctgtttttagtgctgactgggtcagccttccgggaactggagtctgtctctttcagtgcttttttgtttgtttggttggtttttttttgagacagtctcactctgttgcccaggctggagtgcagtggcgtgatctcggctcactgcaagttccgcctcccgggttcacaccattctcctgcctcagcctcccgagtagctggcactacaggcacccgccaccatgcccggctattttttttgtatttttagtagagacggggtttcaccatgttggccaggatggtctcgatctcttgacctcgtgatccacccaccttggcctcccaaagtgttgggattacaggcgtgagccaccgcgcccggcctcagtgccttttttaacttgagggtgtagaggtcctccacgcttgtttgcctgaaagtaatataatgatgctgtctgaacaggttttactgcttgctttccaagtaaaggttaattatgataataaagagatttggaaatgaa

SEQ ID NO: 763 - DNA, 429 bp, HOMO SAPIENS
tatagagacatccagcacactccatttaaaaaaaaggggggaaaaaggtaaaaaacaaaaccccagaaaattgcaaagttctgttactgttgtggtacctggcaccgttttttaaaattagcttctgaatcatcatctggaaagaaaacattctagaataacatcattaaaaacagctctgataaagcacggtcactactacgtatcataaagcaggtacaagatattttacattcacagaggtatgatacagtactgtcctatatctataatactagaggatacaattaaaaaggcattatttgagacttgattctacttttccagcagagggcccaaaggatggcatgacacagctctgtaaagaaatgcaccttcttaggatttcctttaattagtggcacagttctaggtactcactgttcttca

SEQ ID NO: 764 - DNA, 3783 bp, HOMO SAPIENS
ggggcggggccgggagggtacttagggccggggctggcccaggctacggcggctgcagggctccggcaaccgctccggcaacgccaaccgctccgctgcgcgcaggctgggctgcaggctctcggctgcagcgctgggtggatctaggatccggcttccaacatgtggcagctctgggcctccctctgctgcctgctggtgttggccaatgcccggagcaggccctctttccatcccctgtcggatgagctggtcaactatgtcaacaaacggaataccacgtggcaggccgggcacaacttctacaacgtggacatgagctacttgaagaggctatgtggtaccttcctgggtgggcccaagccaccccagagagttatgtttaccgaggacctgaagctgcctgcaagcttcgatgcacgggaacaatggccacagtgtcccaccatcaaagagatcagagaccagggctcctgtggctcctgctgggccttcggggctgtggaagccatctctgaccggatctgcatccacaccaatgcgcacgtcagcgtggaggtgtcggcggaggacctgctcacatgctgtggcagcatgtgtggggacggctgtaatggtggctatcctgctgaagcttggaacttctggacaagaaaaggcctggtttctggtggcctctatgaatcccatgtagggtgcagaccgtactccatccctccctgtgagcaccacgtcaacggctcccggcccccatgcacgggggagggagatacccccaagtgtagcaagatctgtgagcctggctacagcccgacctacaaacaggacaagcactacggatacaattcctacagcgtctccaatagcgagaaggacatcatggccgagatctacaaaaacggccccgtggagggagctttctctgtgtattcggacttcctgctctacaagtcaggagtgtaccaacacgtcaccggagagatgatgggtggccatgccatccgcatcctgggctggggagtggagaatggcacaccctactggctggttgccaactcctggaacactgactggggtgacaatggcttctttaaaatactcagaggacaggatcactgtggaatcgaatcagaagtggtggctggaattccacgcaccgatcagtactgggaaaagatctaatctgccgtgggcctgtcgtgccagtcctgggggcgagatcggggtagaaatgcattttattctttaagttcacgtaagatacaagtttcagacagggtctgaaggactggattggccaaacatcagacctgtcttccaaggagaccaagtcctggctacatcccagcctgtggttacagtgcagacaggccatgtgagccaccgctgccagcacagagcgtccttccccctgtagactagtgccgtagggagtacctgctgccccagctgactgtggccccctccgtgatccatccatctccagggagcaagacagagacgcaggaatggaaagcggagttcctaacaggatgaaagttcccccatcagttcccccagtacctccaagcaagtagctttccacatttgtcacagaaatcagaggagagacggtgttgggagccctttggagaacgccagtctcccaggccccctgcatctatcgagtttgcaatgtcacaacctctctgatcttgtgctcagcatgattctttaatagaagttttattttttcgtgcactctgctaatcatgtgggtgagccagtggaacagcgggagacctgtgctagttttacagattgcctccttatgacgcggctcaaaaggaaaccaagtggtcaggagttgtttctgacccactgatctctactaccacaaggaaaatagtttaggagaaaccagcttttactgtttttgaaaaattacagcttcaccctgtcaagttaacaaggaatgcctgtgccaataaaagttttctccaacttgaagtctactctgatgggatctcagatcctttgtcactgcctatagacttgtagctgctgtctctctttgtccctgcagagaatcacgtcctggaactgcatgttcttgcgactcttgggacttcatcttaacttctcgctgccccagccatgttttcaaccatggcatccctcccccaattagttccctgtcatcctcgtcaaccttctctgtaagtgcctggtaagcttgcccttgcttaagaactcaaaacatagctgtgctctatttttttgttgttgttgtgactgacagagtgagattccgtctcccaggctggagtgcagtggcgccttctcagctcactgcaacctgcagcctcctagattcaagcgattctcctgcttcagccttccgagtagctgggatgacaggcactcaccaatatgcctgggtaatttttgtatttttaagtacatacaggatttcaccatgttggccaggctagtttcaaactcccggcctcaggtggtctgcctgcctcagcctcccaaagtgttgggattacaggcgtgagccactgggccctgcctgtattttttatcagccacaaatccagcaacaagctgaggattcagctcataaaacaggcttggtgtcttggtgatctcacataaccaagatgctaccccgtggggaaccacatccccctggatgccctccagccttggtttgggctggagtcagggcctgtatacagtattttgaatttgtatgccactggtttgcattgctggtcaggaactctagtgctttgcatagccctggtttagaaacatgttatagcagttcttggtatagagcaaactagaagaaccagcaatcattccactgtcctgccaaggtacacctcagtactccccttcccaactgaagtggtatgaggctagctctttccaaaagcattcaagtttggcttctgatgtgactcagaatttaggaaccagatgctagatcaaataagctctgaaaatctgaggaacattgtaggaaaggtttgttaagcatctcttaagtgccatgatgagcataacagccggccgtcgtggctcacgcctgtaatcccagcactttgggaggccaaggtgggaggatgacaaggtcaggagttcaagaccagcctggccaacatgctgaaacctcacctctactaaaaatacaaaaattagctgggcatggtggcacatgcctgtaatcccagctacttgggaggctgaggcaggagaatcgcttgaacccgggaggcggaggttgcagtgagccaagacagtgccagtgcactccagcctcggtgacagcgcaaggctccgtctcaataattaaaaaaaaaaaaaaaaaaaaaaaggccgggcgcagtggctcaagcctgtaatcccagcactttgggaggctgaggcgggcagatcacctgaggtcaggagttttgagatcagccttggcaacacggtgaaaccccatctctactaaaaatacaaaattagccaagcatgctggcacatgcctgtaatcccagctactcgggaggctgaggtacgagaatcgcttgaacctgggaggcagaggatgcagtgagccgagatcacgccattgcactccagcctgggggacaagagtgaatctgtgtctcaccaaaaaaaaaaagaaaaagaaagatgcttaacaaaggttaccataagccacaaattcataaccacttatccttccagtttcaagtagaatatattcataacctcaataaagttctccctgctcccaaa

SEQ ID NO: 765 - DNA, 438 bp, HOMO SAPIENS
  misc_feature (330)..(330): n is a, c, g, or t
  misc_feature (380)..(380): n is a, c, g, or t
gacaactgcatgttacatcatcggcactttatacattactgttaccatgaaaaagaaatgaacagcagcacgtctgataccatcagctgggcagatgcattaaggttaaatctaagtgtcaagaaaaccctatttctttataatatttatgcagctgttaagcgtaacatggtggcagcttcacaacaagaaccgtgatcatgcatgcagtcatgtctccagtattctgtgaaaagccaggatacgttaggatgtgagtttagaaactgagtccattcggtgcatggaaatccaccgcggagtcacacaatgctcctcactgtagtccangcgattggtgggccgccagcaccctgcgggcttcacagggacgcgtgctngttctccaagccccgcaacccttactgtgcacacaacatcgcacacacctttgttttt

SEQ ID NO: 766 - DNA, 423 bp, HOMO SAPIENS
tgatgtggacaccagtacccagtaaattactgtgaaaaaaaggcaacttctcttggtccagtttacctttagataaatgttttaagggtaaaaatatgtgtatttcaagatatgtcttatgtaaacttttttaagttatgaaaatcatccatattgaaaaatagaatgttttctattttgaaactgttttgcattgtcagttacttaagcagccattttacattttggtttttgagaacataatagggacctgtatactccttgtggggccgcattttaagactcctgacagctcatcctgcaaaattaaaatccaaaatctaagtcgcaaaattctcttttctccttcctcagttatttacttagagtgtagaacagacatcctcttagagttttttgtaactatcagttatcgttaacatc

SEQ ID NO: 767 - DNA, 4142 bp, HOMO SAPIENS
attaacccccgaaccgccgcgagctgtccctagcagtgccttagccagggacctgcttggccagcgacagatcctttgctgctctgtctgccggttcttgaggtgaatgtcggaatccattatctttcgggaaagctctctggggcagggagcgtcctggggagttggaattcagaaggaatctctcagacgcaaatctccatctcctccctgcctcacctgggcagccttttcagactgtctctgcccagaatgtcaggagaggccacagtcttggcctaccatgctccagaagaacaggaaggacttctagttgtcaaggttgaagaagaaaattatgttttggaccaggactttggccttcaggaaaacccctggagccaagaggtattccggcagaagttcaggcagtttagttactctgactccactggccctcgggaggctctgagccggctgcgagagctttgctgtcagtggttgaggccggaggtgcactccaaggagcagatcctggagctgctgatgttggagcagttcctggccatccttcctgaggagctgcaagcttggctgcgagagcatcggccagagaatggagaggaagctgtgactatgctggaggagctggaaaaagaactggaggagccaaggcaacaggacacaactcatggccaagaaatgttctggcaggaaatgacatccacaggagcactgaagtctctgtctctgaatagcccggtgcagcccttagagaaccagtgcaagactgagactcaggagtcccaggctttccaggagagagatggcaggatggtggctggcaaagtgttgatggcaaagcaagaaattgttgaatgtgtagcctcagcagctatgatatcgccgggaaaacttcctggagaaacacattcccaacggatagctgaagaagctttgggaggtctggacaactctaagaagcaaaagggaaatgctgcagggaacaaaatcagtcagcttccttcccaggacagacatttcagtctggcaaccttcaacagaagaatccccacagaacacagtgtccttgaatctcatgagagtgaaggaagtttcagtatgaattcaaatgatattacacaacagagcgttgacactagggaaaagctctatgagtgctttgactgtgggaaggccttttgccagagctcaaagctgattagacatcagagaattcatactggagagagaccttatgcatgtaaagaatgtggcaaagccttcagtttgagctcagaccttgttagacatcagagaattcatagtggtgaaaaaccctatgaatgttgtgaatgtggaaaagccttcaggggcagttcagagctcatcaggcatcggagaatccacactggagagaagccttatgaatgtggagaatgtgggaaggccttcagccggagctcagcccttattcagcataagaaaattcacactggagataaaagctatgaatgtattgcatgtggtaaggcttttggtaggagttctatccttattgaacatcaaagaattcacactggagagaaaccttatgaatgtaatgaatgtggaaaatccttcaatcagagctcagccctcacccagcaccagagaattcacactggagagaagccttatgaatgtagtgaatgtagaaaaacatttaggcataggtcaggccttatgcagcatcagagaacacacaccagagtttaactctgtgggtaagagttgtacaattgtgaaatgcaaggagttcactgtaggggtgagactccacagaaaagaaaagtttcctgagagcagaacttctgtccttccctcccagttcggtactataagaagacatgcacacaaagatgtttgttatgattattgaagtgttaaatggaagaaaaatgttacccaagtcttctccaaaaagaatggtagatatttccttgaaatgcctaacccatttctggatgagactcatcaatatccccttcactccactctctgccaactcagatataatttccattgggcaccttcacagtaatgccaggattggggcagagatcctgaaagagcttcttataagatggcaaatgtgcctggcaagagcatttgtattttgtcaggtggaggcatgtgctgagagttattcaactatctgaaatgttgaatttggaggttgtgaaaatattgaattatgctattagtttaataatatctgaggcagtaaaatagtacctgaggaatggtgcctcattctgcccccttgccagttgtctcctcaatcctgagcttcctgctgaggttaattcaagtctactagtttattgagcacctgctatgtgctaggcattgaggtagacctggtcattgccctcccagagttaagggctaataggatatgcatatatactaaacagtaattacagtaaagtgtggtaagtgctttggtaggaaaaatgcgggtttccatcaaagtacatggcagggatacctaaatctggtctatgagtcactaaagacttcctggatatgatggtatctcagacataaaggtgggtagaaggtagcaagggcaggggagaagagaacaggatctggagacactccatgaagactcttctctactgcagaaattgtcatagacctaatttttaaaaaaatgaatctgaaggagtaattcaacaaatatttattgccctcaagtataatagctcagggcctgcaagcctggtaaggaggggtgtgggcagggaatggggaatagcagagcctgggaaggcagatcaccgtgttcctttatacttcccactgcctgagtcccagagtcatgggacacaaacactccagtccccactgtctctctagcctctgatatgcattctttccctgtgtatatacatgccttttcccataaaatgcaccagtctctcaccacactaattctgagtacttcagagtctcacaggtcattctgggtctagaataggctccccaactcagtgattataagtaggaagaggaaaagcaacacatggggattctgagccaggctttatgacaactaattcctgctggagagaagagtcctgatgatgggctgtctccagatcctatcttatcttcatgccattgtatgggctataacctctgcctgtaactctctctgctaatttttattttggcagttttaattaacccacaattgctgagggcaattaatacctaaaagaaagtttgattcctcttctaagatatcctaggtagtgtcatttctaaagaagacttggtgatcactgcttgtattagtccattttcacagtgctatgaagatactacctgatactgggtaatttattaaaaaaaaaaaagaggtttaattgactgacagttctgcagggctggggaggcctcaggaaacttaaatcatggtggaaggcgaaggggaagcaagcaccttcttcacaaggtggcaagagagagtgcaggggaaatgctaggcacttatcaatcagccaaatctcatgagaattcactatcatgagaacaagggggaaatctgctcccatgatctaatcacctcccaccacgaccctccctcaacacctggggattactattggagatttgggtggggacacaagagccaaaccatatcactgctgttgtgggtaataggggaggtgaaattggggggacaattcggcctctttgtgtccagaggttgtgcagttatcgagtgaggtcgatcagaagtctaaagggatctttcaaatggatagtgagttgccttttcctataggtgacaatcagagatttaatgttttaagtatcatataataggtttttctcctgattgtgaattgtaagtgttggtaatacagaaaatgagaaagtataaaccacccccaatcccaatgcccatagaaacgttgttaacattttggagtactttctattagtgtttatttttcccaatcctagtatttttagtaaaactactgtttagtaaatgatttttggtaactaatttcaaaatttatacttcaaccgtttattattagaatgtaatgcaagatgtattgcaataaaacttgagttttaaaagttaaaaaaaaaaaaaa

SEQ ID NO: 768 - DNA, 4068 bp, HOMO SAPIENS
gcacccaggtcgggcggtgggggcgagcggaggggctgaggggcggagaggcctggcgggccgctgctgcgggccaggggacgggggcggagccggagccggagccgacgggcggtggccgcactgggaccccggaatcccgcgcgctgcccacgattcgcttctgaggaacctagaaagattgtacaatgaatggtgattctcgtgctgcggtggtgacctcaccacccccgaccacagcccctcacaaggagaggtacttcgaccgagtagatgagaacaacccagagtacttgagggagaggaacatggcaccagaccttcgccaggacttcaacatgatggagcaaaagaagagggtgtccatgattctgcaaagccctgctttctgtgaagaattggaatcaatgatacaggagcaatttaagaaggggaagaaccccacaggcctattggcattacagcagattgcagattttatgaccacgaatgtaccaaatgtctacccagcagctccgcaaggagggatggctgccttaaacatgagtcttggtatggtgactcctgtgaacgatcttagaggatctgattctattgcgtatgacaaaggagagaagttattacggtgtaaattggcagcgttttatagactagcagatctctttgggtggtctcagcttatctacaatcatatcacaaccagagtgaactccgagcaggaacacttcctcattgtcccttttgggcttctttacagtgaagtgactgcatccagtttggttaagatcaatctacaaggagatatagtagatcgtggaagcactaatctgggagtgaatcaggccggcttcaccttacactctgcaatttatgctgcacgcccggacgtgaagtgcgtcgtgcacattcacaccccagcaggggctgcggtctctgcaatgaaatgtggcctcttgccaatctccccggaggcgctttcccttggagaagtggcttatcatgactaccatggcattctggttgatgaagaggaaaaagttttgattcagaaaaatctggggcctaaaagcaaggttcttattctccggaaccatgggctcgtgtcagttggagagagcgttgaggaggccttctattacatccataaccttgtggttgcctgtgagatccaggttcgaactctggccagtgcaggaggaccagacaacttagtcctgctgaatcctgagaagtacaaagccaagtcccgttccccagggtctccggtaggggaaggcactggatcgcctcccaagtggcagattggtgagcaggaatttgaagccctcatgcggatgctcgataatctgggctacagaactggctacccttatcgataccctgctctgagagagaagtctaaaaaatacagcgatgtggaggttcctgctagtgtcacaggttactcctttgctagtgacggtgattcgggcacttgctccccactcagacacagttttcagaagcagcagcgggagaagacaagatggctgaactctggccggggcgacgaagcttccgaggaagggcagaatggaagcagtcccaagtcgaagactaaggtgtggacgaacattacacacgatcacgtgaaacccttgctgcagtctctctcgtccggtgtctgcgtgccaagctgtattaccaactgcttgtggactaaagaggatggacatagaacttccacctctgctgtccctaacctgtttgttccattgaacactaacccaaaagaggtccaggagatgaggaacaagatccgagagcagaatttacaggacattaagacggctggccctcagtcccaggttttgtgtggtgtagtgatggacaggagcctcgtccagggagagctggtgacggcctccaaggccatcattgaaaaggagtaccagccccacgtcattgtgagcaccacgggccccaaccccttcaccacactcacagaccgtgagctggaggagtaccgcagggaggtggagaggaagcagaagggctctgaagagaatctggacgaggctagagaacagaaagaaaagagtcctccagaccagcctgcggtcccccacccgcctcccagcactcccatcaagctggaggaaggagacggatgcgctagagagtacctgttaccctaaccttgtgccggagccgactactggagatgacagtgatgctgccacctttaagccaactctccccgatctgtcccctgatgaaccttcagaagcactcggcttcccaatgttagagaaggaggaggaagcccatagacccccaagccccactgaggcccctactgaggccagccccgagccagccccagacccagccccggtggctgaagaggctgccccctcagctgtcgaggagggggccgccgcggaccctggcagcgatgggtctccaggcaagtccccgtccaaaaagaagaagaagttccgtaccccgtcctttctgaagaagagcaagaagaagagtgactcctgaaagccctgcgctaacactgtcctgtccggagcgaccctggctctgccagcgtccccggccacgtctgtgctctgtccttgtgtaatggaatgcaaaaaagccaagccctccgcctagaggtcccctcacgtgaccagccccgtgtagccccgggctgacccagtgtgtgctcagcagccccaccccaccctgccccttgtcctctcagagcctcagcttctgggggagacatgctctccccacaggggggaggcactaagtcatggtcctggctggaaggtactgaaggcttctgcagctttggctgcacgtcaccctcctgagcctcacctttcctgccgtccctcctgttgtgaaatcaccacattctgtctctgcttggcttcccctccaccctaaagtctcaggtgacggactcagactcctggcttcatgtggcattctctctgctcagtgatctcacttaaatctatatacaaagccttggtcccgtgaaaacactcgtgtgcccaccagcggccttgaagaggcaggtctgggccagatgctgggcaggaaaccccagcggcagatgggcctgtgtgcacccaacgtgatgctatgcatgtctgaccgacgatccctcgaccagaatcagattcaggagctcagtttctttttcacttgggtctctggattcctgtcatagggaaggtatatcaggaggggaagaggcctttctagaattttctttgagcaggtttacaatttagcttacatttttcgactgtgaacgtgaataggctgctttttgctttcttctttccagaccccacagtagagcacttttcacttatttgggggaggcttcaggggactgttctcaccttaactcagccagaaagatgccctagttgtgatcaaaggtaactcgaggtggagggtagccctggggcccctcgacatcaccgtcattgatggagcctgaaccgtgtgctcctcggcagatgctgttgttgttacttccctccaagaggctggaaaagggctcagagctgctgagcaggaaccggagggtgacccatttcaggaggtgccggtaccagcctgactaggtacaggcaagcttgtgtgggcccaacaggcccttggtagagctggtgccagatgtgggctcagatcctgggcatgatgggccgagccacctcggatcccactgattggccagccgagcgagaaccaggctgctgcatggcactgaccgccgcttccagcttcctctgagccgcagggcctgctacgcgggcaagcgtgctgcctctcttctgtgtcgttttgttgccaaggcagaatgaaaagtccttaaccgtggactcttcctttatcccctcctttaccccacatatgcaatgacttttaattttcacttttgtagtttaatcctttgtattacaacatgaaatatagttgcatatatggacaccgacttgggaggacaggtcctgaatgtcctttctccagtgtaacatgttttactcacaaataaaattctttcagcaa

SEQ ID NO: 769 - DNA, 4190 bp, HOMO SAPIENS; identical to SEQ ID NO: 546

SEQ ID NO: 770 - DNA, 3859 bp, HOMO SAPIENS
aaagatgactcctgtacggtccctgccgtccaggaccctggagtcaagtcagaaatggatgtgtccacagctgattgtgtgacaaggtctggatttgtgggtgttttcattggagtccagggaccctggtaccttatgtgcttttttgccttgtttctttccagattgctcatttagaaagtggatgtgtgggataacatgtccaatgtgtccgaggagagaagaaaaaggcagcagaacattaaggaaggactgcagtttatacagtcaccgctgtcatatccaggaacacaggagcaatatgcggtatatttgcgtgctctcgtgagaaatctttttaatgaaggaaatgacgtttatcgggaacatgattggaacaactcgataagccagtacacggaagccttgaatatagctgattatgcaaaatctgaagaaattttaatccccaaagaaataattgaaaaactatatataaatcgtattgcctgctattctaatatgggtttccatgataaagttttggaggactgcaatatagtcctcagtttaaatgccagtaactgcaaagctctgtatcggaaatctaaggctttaagtgatttaggaagatacaaaaaggcttacgatgctgtagcaaagtgctccttagcagtgcctcaggatgagcatgtaataaaactaactcaagaactagctcagaaattgggatttaaaataagaaaagcgtatgtcagagctgagctctcattaaaatcagttcctggggatggggctaccaaggctttgaaccattctgtggaagatattgagccagatttattaactccaaggcaagaagcagttcctgttgtctctttaccggcacccagtttttctcatgaagttggaagtgagctggcctcagttcctgttatgcccttaacttctattttgccactacaagtggaagagagcgctctgccatctgcagtgctggcaaatggaggaaagatgcccttcactatgccagaagcttttctagatgatggagatatggtccttggagatgaactagatgacctgcttgattctgcacctgaaactaatgaaactgttatgccgtcagctttagtcagaggaccccttcagacagccagtgtctctcctagcatgcccttttcggcatcgctgttaggaaccttacccattggtgcgaggtatgctcctccaccctccttctcagaattttatccacctttgacttcatccttagaagatttttgttcttctttaaattcattttcaatgagtgaatccaaacgagatctgtccacctcaacttctagagagggaacaccgcttaacaacagtaattcttcccttttacttatgaatggaccaggtagtttgtttgcttcagagaatttcctgggaatttcaagtcagcctagaaatgactttggaaacttttttggaagtgcagttaccaaaccatcttcatcagtgactccaagacatcccctcgaaggaacccatgaattgagacaagcttgccagatctgttttgtaaaatcaggccctaagttaatggatttcacttaccatgctaacatagatcataagtgtaagaaagatattttaatcggtaggataaagaatgttgaagataaatcatggaaaaaaatacgtccaagaccaacaaaaacaaattatgaaggaccatattatatatgtaaagatgttgctgctgaggaggaatgtagatattcaggccactgcacgtttgcttattgccaagaggagatagatgtgtggacactggagcggaaaggagcattcagccgggaggctttctttggcggcaatggaaagattaaccttactgtgttcaaacttctccaggagcatcttggggaatttatattcctttgtgagaaatgttttgatcataagcctagaatgataagtaaaagaaataaagataattctactgcttgttctcacccggttacaaagcatgagtttgaagacaataagtgccttgtccacattttgcgagagacaacagtaaaatactccaaaatacgttcttttcatggtcagtgtcagcttgatttatgtcgacatgaagttcggtatggctgtttaagggaagatgagtgcttttatgcccatagtcttgtggaactgaaagtctggataatgcaaaatgaaacaggtatctcacatgatgctattgctcaagagtctaaacgatattggcagaatttggaagcaaatgtacctggagcgcaggtacttggtaatcaaataatgcctggatttcttaatatgaagataaagtttgtgtgcgcccagtgtctgagaaacggtcaagtcattgaaccagacaaaaacagaaaatattgtagtgcaaaagcaaggcattcgtggaccaaagaccggcgtgcgatgagagtgatgtctattgaacgtaagaagtggatgaacatccgtcctctccccacaaagaaacaaatgcctttacagtttgatctgtgcaaccatattgcttctgggaaaaaatgtcaatatgttggaaactgttcctttgctcatagtcctgaggaaagagaagtttggacttacatgaaggagaatgggatacaagatatggagcaattttacgaactatggctcaagagtcaaaaaaatgaaaaaagtgaagacatagccagtcagtcaaacaaggaaaatggaaaacaaattcacatgccaacagattatgctgaagttacagtggactttcactgctggatgtgtgggaaaaactgcaacagtgagaagcagtggcagggccacatctcctccgagaagcacaaagagaaggttttccacaccgaggacgaccagtactgctggcagcaccgcttcccaacaggctatttcagtatttgtgataggtatatgaatggcacctgcccagaaggaaacagctgtaaatttgcacatggaaatgccgaacttcatgaatgggaagaaagaagagatgccctaaagatgaagctcaacaaagcacgaaaagatcacttaattggcccaaatgataatgactttggaaaatatagttttttgtttaaagatttaaactaatatgctggcttttatgtatgatacctaatcagagcattgaccagaaaaattgaaagtgttctgaggcacatagcagaggagctgcagatttcctgcttgtattggcgtatatcgttcctcctgagcagcaacccacagtaggtaggaaaatgggctgtttcacaggcctggccacgctctcacggaaccactggcatcagatggtgaagtgactgctacccggttgccatctgttgaacagacttttggatgaagtgtgttggggaagaggataaggttatatctaggacaactctttgagttggtccttcatataagaatcgtgacggtaagagaataaacacttgtactgggatcagaatacatgatggatgaaattctttacatgttttagcagaatgaatttgtttaatataataaagtttgctacttatctgtatgtaggttgctaaaaaggattttcttaactcagattttaagccaaataaccatttaacactagtatttgttaaatggggtatttttctgtatttgtatgtttcactataataagggaattaaggataatgtgcattgagaatattttgaaaaataattgactcaaattttatttcttggtcttttgctgtttaaatgatgattttgaaagattaaacctgtactgttggtattgtgttagtgtatggaccaatactgcctgtaataaagattttatatatagatgcctttcaaaaaaaaaaaaaaa

SEQ ID NO: 771 - DNA, 352 bp, HOMO SAPIENS
tactaggttgccactaagtctacaaactattgaagaccagaatttacataaatcgtatgcagtcccacatctgacaggcttgcaaaaccttccacatttccatgagtaagcctatccaaatagtactacttctcaattgcaaatcataacaacctcttgtgtggccgtcagagctgactaagcagaaactatgatcctctgaatttagtatttttcctgtttgccaaaaatgatgtgtcattagtgacgaagttattcttaaagttcctttaacaaaactgtgatttatatcaaataacaatggcttggagggggtatggaaaattgattattcttcctaacaaatctatta

SEQ ID NO: 772 - DNA, 1482 bp, HOMO SAPIENS
gcttctggtacttttgacgcgtctgctaacgtagtccctcagtgcgcatccggacgtaggaggtggaggttgtggaattcgccgttcgaaagcagggactaaaagccccacttcgtcttacgttccgaaaggaaggcgtctgttgagcctttctctcagtcgtgagggaggcgtcgacggcgtgcggaagtcctgagttgaggcttgcgggatcctttccggagaaagcgcaggctaaagccgcaggtgaagatgtccaactacgtgaacgacatgtggccgggctcgccgcaggagaaggattcgccctcgacctcgcggtcgggcgggtccagccggctgtcgtcgcggtctaggagccgctctttttccagaagctctcggtcccattcccgcgtctcgagccggttttcgtccaggagtcggaggagcaagtccaggtcccgttcccgaaggcgccaccagcggaagtacaggcgctactcgcggtcatactcgcggagccggtcgcgatcccgcagccgccgttaccgagagaggcgctacgggttcaccaggagatactaccggtctccttcgcggtaccggtcccggtcccgtagcaggtcgcgctctcggggaaggtcgtactgcggaagggcgtacgcgatcgcgcggggacagcgctactacggctttggtcgcacagtgtacccggaggagcacagcagatggagggacagatccaggacgaggtcgcggagcagaaccccctttcgcttaagtgaaaaagatcgaatggagctgttagaaatagcaaaaaccaatgcagcgaaagctctaggaacaaccaacattgacttgccagctagtctcagaactgttccttcagccaaagaaacaagccgtggaataggtgtatcaagtaatggtgcaaagcctgaactgtcggaaaaggtaacagaagatggaactcgaaatcccaatgaaaaacctacccagcaaagaagcatagcttttagctctaataattctgtagcaaagccaatacaaaaatcagctaaagctgccacagaagaggcatcttcaagatcaccaaaaatagatcagaaaaaaagtccatatggactgtggatacctatctaaaagaagaaaactgatggctaagtttgcatgaaaactgcactttattgcaagttagtgtttctagcattatcccatccctttgagccattcaggggtacttgtgcatttaaaaaccaacacaaaaagatgtaaatacttaacactcaaatattaacattttaggtttctcttgcagatatgagagatagcacagatggaccaaaggttatgcacaggtgggagtcttttgtatatagttgtaaatattgtcttggttatgtaaaaatgaaattttttagacacagtaattgaactgtattcctgttttgtatatttaataaatttcttgttttcattcttaaaaaaaaaaaaaaaaaa

SEQ ID NO: 773 - DNA, 3216 bp, HOMO SAPIENS
ggcagtttcctggctgaacacgccagcccaatacttaaagagagcaactcctgactccgatagagactggatggacccacaagggtgacagcccaggcggaccgatcttcccatcccacatcctccggcgcgatgccaaaaagaggctgacggcaactgggccttctgcagagaaagacctccgcttcactgccccggctggtcccaagggtcaggaagatggattcatacctgctgatgtggggactgctcacgttcatcatggtgcctggctgccaggcagagctctgtgacgatgacccgccagagatcccacacgccacattcaaagccatggcctacaaggaaggaaccatgttgaactgtgaatgcaagagaggtttccgcagaataaaaagcgggtcactctatatgctctgtacaggaaactctagccactcgtcctgggacaaccaatgtcaatgcacaagctctgccactcggaacacaacgaaacaagtgacacctcaacctgaagaacagaaagaaaggaaaaccacagaaatgcaaagtccaatgcagccagtggaccaagcgagccttccaggtcactgcagggaacctccaccatgggaaaatgaagccacagagagaatttatcatttcgtggtggggcagatggtttattatcagtgcgtccagggatacagggctctacacagaggtcctgctgagagcgtctgcaaaatgacccacgggaagacaaggtggacccagccccagctcatatgcacaggtgaaatggagaccagtcagtttccaggtgaagagaagcctcaggcaagccccgaaggccgtcctgagagtgagacttcctgcctcgtcacaacaacagattttcaaatacagacagaaatggctgcaaccatggagacgtccatatttacaacagagtaccaggtagcagtggccggctgtgttttcctgctgatcagcgtcctcctcctgagtgggctcacctggcagcggagacagaggaagagtagaagaacaatctagaaaaccaaaagaacaagaatttcttggtaagaagccgggaacagacaacagaagtcatgaagcccaagtgaaatcaaaggtgctaaatggtcgcccaggagacatccgttgtgcttgcctgcgttttggaagctctgaagtcacatcacaggacacggggcagtggcaaccttgtctctatgccagctcagtcccatcagagagcgagcgctacccacttctaaatagcaatttcgccgttgaagaggaagggcaaaaccactagaactctccatcttattttcatgtatatgtgttcattaaagcatgaatggtatggaactctctccaccctatatgtagtataaagaaaagtaggtttacattcatctcattccaacttcccagttcaggagtcccaaggaaagccccagcactaacgtaaatacacaacacacacactctaccctatacaactggacattgtctgcgtggttcctttctcagccgcttctgactgctgattctcccgttcacgttgcctaataaacatccttcaagaactctgggctgctacccagaaatcattttacccttggctcaatcctctaagctaacccccttctactgagccttcagtcttgaatttctaaaaaacagaggccatggcagaataatctttgggtaacttcaaaacggggcagccaaacccatgaggcaatgtcaggaacagaaggatgaatgaggtcccaggcagagaatcatacttagcaaagttttacctgtgcgttactaattggcctctttaagagttagtttctttgggattgctatgaatgataccctgaatttggcctgcactaatttgatgtttacaggtggacacacaaggtgcaaatcaatgcgtacgtttcctgagaagtgtctaaaaacaccaaaaagggatccgtacattcaatgtttatgcaaggaaggaaagaaagaaggaagtgaagagggagaagggatggaggtcacactggtagaacgtaaccacggaaaagagcgcatcaggcctggcacggtggctcaggcctataaccccagctccctaggagaccaaggcgggagcatctcttgaggccaggagtttgagaccagcctgggcagcatagcaagacacatccctacaaaaaattagaaattggctggatgtggtggcatacgcctgtagtcctagccactcaggaggctgaggcaggaggattgcttgagcccaggagttcgaggctgcagtcagtcatgatggcaccactgcactccagcctgggcaacagagcaagatcctgtctttaaggaaaaaaagacaagatgagcataccagcagtccttgaacattatcaaaaagttcagcatattagaatcaccgggaggccttgttaaaagagttcgctgggcccatcttcagagtctctgagttgttggtctggaatagagccaaatgttttgtgtgtctaacaattcccaggtgctgttgctgctgctactattccaggaacacactttgagaaccattgtgttattgctctgcacgcccacccactctcaactcccacgaaaaaaatcaacttccagagctaagatttcggtggaagtcctggttccatatctggtgcaagatctcccctcacgaatcagttgagtcaacattctagctcaacaacatcacacgattaacattaacgaaaattattcatttgggaaactatcagccagttttcacttctgaaggggcaggagagtgttatgagaaatcacggcagttttcagcagggtccagattcagattaaataactattttctgtcatttctgtgaccaaccacatacaaacagactcatctgtgcactctccccctcccccttcaggtatatgttttctgagtaaagttgaaaagaatctcagaccagaaaatatagatatatatttaaatcttacttgagtagaactgattacgacttttgggtgttgaggggtctataagatcaaaacttttccatgataatactaagatgttatcgaccatttatctgtccttctctcaaaagtgtatggtggaattttccagaagctatgtgatacgtgatgatgtcatcactctgctgttaacatataataaatttattgctattgtttataaaagaataaatgatatttttt

SEQ ID NO: 774 - DNA, 493 bp, HOMO SAPIENS
  misc_feature (336)..(336): n is a, c, g, or t
  misc_feature (338)..(340): n is a, c, g, or t
  misc_feature (343)..(343): n is a, c, g, or t
ttcaggattctctgatttccccaactttcctttattcttcttttagtgggagaaggggcaaaagtagaaacctaaaaaatcctgggaaaaggagccttttctgaggaaacttcagcagatgaaatatttaagacttgaactgggatctctagggggaacgttggaacatctattgattgatgtgtcaaagtccggaatttcactgtaattagtgaacgattataacttgtaactttgtctgttatgtaagaaattacattttggtctcttagatccaagagttcttgtctgttacgatttgtaactgcttgttaaaattaaacatttacatatttnannntcngtgagttgtcatttttttgttagagaaagttccagttatttcagatttacttacctgtaaaaatgtcagcataatcaaaagtaaggatctgtagtcaaactggaagcaaattatggataacacgtgcgtgccatgaagttctgacagcct

SEQ ID NO: 775 - DNA, 1081 bp, HOMO SAPIENS
ggttcccaggggagagccagccgctgccgcggcactggttcagacggccaggccctagggacccaccatggatcctgaacacgccaaacctgagtcatccgaggcaccttcagggaacttgaaacaaccggagactgccgcagccctggcaagtagcggcagcgtagtgagttctgtacccaaggcacagcgcaacatctcagcgaagaccgcaccccggaagcaccccgcagtctcaattcgcagtgcgcagtccgcagccgccgcacgtccccaaggcagtgagggcaccgcaccctcaaggaaagccaccacacgcccacccccaaagcccacactcccaccccccacgccctctgcacacactgaatccaaactcttaaatgagatggcgatcaaagagcgcgtggagggccgagccaaagtcccgtacaaattcagggacagcctcaaacgtttctccttctcgcccactggaatgttgaagatcctgagactgagtcttatcttaggagcattagcttgtttcatcatcacccaagccaatgagtcatttataacaatcacaagtctggaaatctgcattgtcgttttttttattctaatatatgtgctaacccttcaccacttgctgacctatttacattggcccttacttgatcttaccaacagtatcattacagctgtgttcctttcagtagttgccatcttggccatgcaagaaaagaaaagaaggcatttactctatgtcggggggtccctgtgtctcacagcggtaatcgtgtgttgcatcgatgcgtttgtggtcaccacgaagatgaggaccaacttgaaaagattcctgggagtcgaagttgaaaggaagctttcccccgccaaggacgcctaccccgaaaccggccccgacgccccgcagaggcccgcctgaagccagcccggcgccctagcagatgcacgtgtctgtcgaatcgctgcctccgagcccacccccgagctcgcatgctgtcacccattccagcctaaatgtgaccataaaattagggctgctgcttttatcgagaaaaaaaaaaaaaaaaaaaaa

SEQ ID NO: 776 - DNA, 8841 bp, HOMO SAPIENS
agatagaaaaagtagtttgcttggcatctcccaaattatcttgagcaaacaataaaataagaaatgtttcagaagacaattcggctcccaggcccaaaccaaaactcgaacctggtactttttgtaagtgcgggccaagaaaggggctgtaaagttaaagagccggtggcgcctctgaacacacccgggcagggcgagcaggatgtccttgtccagggagaccccttctcctggctttgaggaaggtgctccctatccccgcgggttcctccgccaagcgggacgccgcgccgggcgggtgagagaaagcccgggcaggagagcacagagccggcgactggacgcgagcgcggggcgggtggagagcgtctctccgggcgccgctgctgttgtcccgggtgctgaaaagccgggaacttcccgggaagcagcggcacttttctccctggaaggctaaacatatttttgactggtatgaacccattctactttcatgcagtaaatataattttacactgcttagtgactcttgtgctgatgtacacctgtgataaaactgtcttcaagaatcgtggacttgcttttgtaacggcattgctttttgctgtacatcctattcatactgaggcggtggctgggatcgttggcagagcggacgtgttagcgtgtctgctgtttctattggcctttctctcgtacaacaggagtctggatcagggctgtgttgggggaagtttcccttccacggtgtctcccttcttcttgctgctcagtttgtttctggggacctgtgcgatgctggtgaaagagacaggcatcacggtgtttggagtgtgcttggtttatgacctcttttccctttccaacaagcaagacaagtcgagcaatggggccctctgtccacgcagcccacagcagcccgggagcccccagccctcctcactgccaggccatcctcaccgggagaatgggaagcagcagcggttccctcacaaaggagcttggggtggctgccactctccactgccaccagaacccaagagcagtggattcccagtgtccccacgagctgtgtggtccatgatgagattcctcacctattcctacctcttggccttcaatgtgtggcttctgcttgcacccgtgaccctgtgctatgactggcaggtcggcagtattcctctggtagagaccatatgggacatgcggaacttagccaccatctttctggcggttgtgatggccttattgagcctgcactgcttagcagcctttaagagactggagcacaaggaggttttagtcggcttgttgttcctggtgttcccgttcattccagccagcaacctcttcttcagggtgggttttgtggtggcggagagagtcctttacatgcctagcatgggctactgcatcctttttgtgcatggactgagcaagctctgcacttggctgaatcgatgtggggccaccaccctgattgtgtccactgtgttgctgctgttgcttttctcttggaaaactgtgaaacagaatgaaatttggctgtcaagagagtccctattcaggtctggagttcaaactctgccccacaatgccaaggttcactacaactatgccaatttcctgaaggaccaaggtcggaacaaggaagcgatctaccactacagaacagctctcaagttgtatccacgccatgcaagtgcgctcaacaaccttggaacactgacgagagacacagcagaggcaaagatgtactatcagagggctctccagctccatccacagcataaccgggctcttttcaatctggggaatctcctcaagtcccaggagaaaaaggaagaagctatcaccttactgaaggattccatcaaatatggtccagagtttgcagatgcatattcaagcttagcttcgttattggctgagcaggagcggtttaaagaagctgaagaaatataccaaactggaataaagaactgtccagacagctcagatttacacaacaactatggggttttcttagttgatactggcttaccagaaaaggcagtggcccattaccagcaggccatcaaacttagccccagtcatcacgtggccatggtgaacttgggaagactctacaggtcactgggagagaacagcatggctgaagaatggtacaagcgcgccctgcaggtggcacacaaagctgagatattgtcacctttgggagcactgtattacaacactggccgatacgaagaggctttgcagatttaccaggaagctgcagcacttcagccttctcagagggagctccgcttggcactggctcaggttttggccgtgatgggtcagacaaaagaagctgaaaagatgaccaatcacattgtgtcagaggagaccggatgccttgaatgctatcgcctcttgtcagccatctatagcaagcaggagaaccacgacaaggcacttgatgctatagacaaggctctccagctgaaaccaaaggacccaaaagtcatttctgaactttttttcacaaaaggaaaccaattaagagagcagaaccttctcgacaaagcttttgagagctatagagtggctgtgcaactaaacccagaccaagcacaggcctggatgaacatgggtggcatccaacacatcaagggaaaatatgtgtctgcaagagcttattatgagagagccttacagctggttccagacagcaaactgctgaaggaaaatcttgccaaattggatcgcctagaaaaacgattacaagaagttcgagaaaaggatcaaacatagcaccaccgtctgacccaacctcataggataatgtggtgcctctgaaaggggagtgatggaagccttgctttcacatcagcaggggcacaactaatgagattttctctcattccgagttcagggtgacacattttgggacatctgctggtagcccagtgctgaaggacttgcttttccatgaagaagacgaaaacagcaaacaagggcaagaaggtctgagagggaaggagaatgacatttacacattttacagatttttgtttggtttaactccagatttctcttgatatatctctgtgcttttgagacctggagatctaattctgtttagacattttttgtcccagaaatacagaagcttgaaatgctatgaaggcagagcttctattctttatgggatgaaatatttcaaaagaggataaatcctctgtggtaagccatttggaaaatcctaccaagaattggcttatttaattttccagaaccaggaatgagtatctaatagcttttgtagaaccttccagaatatgtggggaaaaagggctattgctaagtgagctttatctaatatcctcctaagagttttactagtgcttttttgaggaattacagggaagctcctggaattgtacatggatatctttatccctagggggaaatcaaggagctgggcacccctaattctttatggaagtgtttaaaactattttaattttattacaagtattactagagtggtggttctactctaagatttcaaaagtgcatttaaaatcatacatgttcccgcctgcaaatatattgttattttggtggagaaaaaaatagtatattctacataaaaaattaaagatattaactaagagaaatgtcctactttattatcttaatgttcagacatcatgagatttattatttttttgaaaaatatattgaaccattgaggaacctttatgatgtatcacagaaatcttcatagattctaactagatggaaaaagagctctatttatttgtgttcctaggcttaatgagaattctgggcttagaacatcaacgattaatacccagaattctttgttttgagaatattatggagaatgctctaaaaatctagggtaaagatctaaattcaaattttaaatatatatttatatttaagaaataggaaaggcaaagttgaactcacaatttgacatttatttttagtgttatttatttcataacttataaaatatttaatatatacatacacactcttcttttttctctgtacaaagtggttttaatatcagctttcaaaactgatcttataaaatgtaaatctaaattgtaaaatagttaagttttaacagtccctcccaaactttgtgttgattattcacttgctaaagagatgtgaggaatcagccttcagttttttggcagtagtatattttggaagtgaagaaattggaacacctgtttctaatttggtcttcatcattagagacaaaaccaaaacactccaggcagtactgtttatagtgctgagccaggtagcacacagacatagtagcctaaaggctcacataattcgcatgctcaggccagggcagggtaaaaatagccttctgcttctttcaacccagtatcaggaagcactaccccagtgttattatttgttttgtcaaggtaagtctaaataaacaagaaaaacttcttcggaaggcatggcgaagggagtattttaaatgaaaatgattacagaatttgaattagcatgcatctctttgtgtgcaacagtaatccaagaatgtatatgttaccactacaaccatttgtttctaatagttttttcatgttatataacataaatgtatccacaaccttaattaagaactattcttcccccaaaatcatagtcctagtgtcaagaaacatactccagtgtttattgtaaaataacaaccacaccctcaaattgaaaaaagtgaatgtctaggactttattacaacttttcagaataatctgtaatgaaaactcatgcttaaaaatttaatggaaaagactgagccccaaattttgaatagtgattacgccttacttgaagtgctaataaaggtaggagagtacatttgttggaataacagaaatggtgatttcagcctaaaagtttctgagggtaaaggatcacatgaccttcaggaaactctctgcctcctgtaggtgctttcctatctcccccatccttccctaccccttttcccttttccttcctctctttttctctcactgtcactctgtctacacacactggcatcttttgaacactaaaagtaagcactgttttttaaaaaagtaattatttgttggatcagatacttttatcccaagtgaataccttcactgagatgtggccaatgcaatagtttcacagtaaaaacagtgcctataagaaaatagatcacatactatttttcaatgatattaagtgtattttgtaactattttcatttggtccttgtaacatgaaataatacatggaacttacctttataataaaaatggagtgccctggttcatcatagaggtgcatctagtttgcccttaatggaagtatacttgctgtgtggattgatagcaccttcttgaaatggaggagctcagctggcctcatggatgtgcaatttttgcagtcccacagggccttgcatacagaagcaccccgagctcagttgaatgtctgtttgattttttcttatttatttttttgagacacagttccactttgtctttttgtcacccaggatggagttcagtggcacaaacatggctcactgtagcctcgacctccctggctgaagggatcctcccacctcagcctcccaagtaaccgagactacaggcatatgccagcatgtccagctaatttttgtattttttgtagagacagggtttcaccatgttgcccaggctggtctcaaactcctgggctcaagcgatctgcccacctctgcctcccaaagtgctgggattaaaggcataagccaccatgtccaactgaaattcttaataattaataatttttgagcaagaggtccacactttcattttgcactgggttcccaaacaggtcctgggtaggaaggatggctgaggataaaacaggagttgctttggcctggctgaacatttgaaccaatgatcagagtttcattttatgattgtgttactctgaacagatttgctatttttttccagctacatttagagttcctcatgtatatatcacccctctttttccagtccatctaacctctccttttttttgtgcctagaatcagttctccttgccttcaaaatccctgataagtgtccatttctttttgtatcctttgatgtagaagccacaagaatggctttagcagcttattttaatcttatgaattattcattcaggattttttaaatgattcagatgctttcaatctgttaacagtatttataaaacatgtttcagtgatacaacataggtgaactaaaccaaagatgcaaatgccttggaggaaaagaaattgtattatagagaatcctgagatatatccttttgggttgtttaatttaaagcctatcacaaaacaaagagaattgtcgcactttaattccaacctcctgcagtacttcacaacccttagcataagattctgaaatttgtaataggtggtacctagtttgatgcagggttttgcagcagttgtgcgaatgcctctgcgcaacggcctttcagtcagactaaatgagaaaatccaaactgtcctatcaaaactgacccacaataactgtactctgaggcgaaacagagcaaatgtgggtttcctgttttcattgtaaaacattccaggttctcagattgaagagctacattcagctgatagttgacatctgttccctcacacgtagtggctctcaacacgggctgcactttggaatcacctgaggacctttcggaatcttcggttgaatcatcctggctgtcctggtgatgcttcttatgtgcagctaggctggagaaccactacagggctgacacctggaatgggagcttgtaacttttacaaaataatagatgtttatcatcttttgcaatttttacttttaagtctatactaaaatgagccaaagaagtcttaacaatgatgtatggcacaattggttggttgaggctatcattccatgattacaaataggtggttatgtggggtggttttgcacttgtggcaattggactgcaatttggccttaaaatgacacaattcctcgttctcagatggagaggaattgccttgaaatttgcatgtaccagactaagtgccagtatatatatgactgatattttcgtgactcatagaaggtgtccatggtatagagtttatgcctacatctctatctttattttgggcacacatgagcttttgttaattatttctttgtacttgttagaatctgtttttgaaaaaaaaaaaaacttttgctttgatttgtggtggattcaccttcttaaaataataaatttagaggatattaggaatgacattcaaaacaaatatagtgagaggtgattttttaaaaatttttgttcctggtttccaaattatgtttactttgatttgattatatgttggtatctcccaaatataggttaacttagctatttaaatggtatcttttgacatttaaaaagaattaagtacctgtcaaatctagcattgaggttgcagttgaataagataaaagcttaggatgtcaaaaaataatatagagaaatattataagattttatgattattcttgacgtttttgatgcaaaaggaaaatatgctgaatagttcttccaaaaaatattatttccctcaatattttatttgtagccatgtaatttaaagagaacagaaaataactgcaatcaaaagtatggtttaatatcaatcaaagtggcacaacagaattgataagatctttataacaatcaattggctgatattaaaatattgattttaattgatcttttcaattaaaatctttagggcctgtaactcataaaatcagcatccaccacaatatatggtcattattggtttgtaagcatagatcaccattgactcctacctggagagacatgtctatttctaaaaatccagtagtttctttgcattctcagtagtacacgttgtatatatatatatgtaacaaatttggtagttttcagtatgtgtgatgtcctttgggggttatttatcttgctggtccataggaggggtacactaccccaagaatcaagacatctgagttctagttctagttctagctctgccactgaagagccaccttacctggggcaagttagccattgtctcccagtcatgtttaccacccatgaaaggactcgtcggtttgatgtttccattaagctcaatgagtaactctaatagttactcttgaatctggattgaaaaacaccatgcatctgatgagataattcataaatgttgccccttttttaaatgatacaaccctaaaagtgactgaattgcccaagtgcttgaacatggcagaggtagttactcctattttgcagtttgtgcacttaaaaattcctacagtgattgttactttactggggaaaaaagatgaggtgaaacttcctcccaaggaattaaaatatctgtagaagccatggcttgcttttataatgtggaaatcatttgatttgctgtaattcacgcagatccctccttttgtcagggggaaatgatttgcatcatgttcttttttcataatgcttttacttcctgtttggatcagttgtatgtaaatgtacatttttgttactttggctgtgcccgttagaatttatcttccataaagtatttctcccattgagtctaatgatgtatactttgcctaggtctttccaaaattaaatttatgtaaatgtctattttatataaaatatgattaaaataagtatgtctggtttcaatctctcaagtaaaaaaaaaa

SEQ ID NO: 777 - DNA, 4133 bp, HOMO SAPIENS
ggcttcttggatgggctgggcgtgcatggcataaccgtttgagaacaacaaaccaagccggccgggctgccgctctgtttcctgcgaggagggaagttacagatctccgccctggcgtccggggaaggatgggacaggctgctgagccaactgggtacatggaaaactcagtctcctacagcgcaattgaagacgttcagctgctgtcctgggagaatgccccgaagtactgtttacagctcacgattcctgggggaactgtcttactgcaggctgccaatagctacctgcgagaccagtggttccattctctgcaatggaagaaaaagatttacaaatataagaaagtgctgagtaacccaagccgctgggaagttgtcttgaaagagatccggaccctggtggacatggccctgacatcccccctgcaggatgactccatcaaccaggccccactggaaatcgtctcgaaactgctctcagagaacacaaacttgaccacccaggagcatgaaaacatcattgtggcaatcgctcctttgctggaaaacaaccacccaccaccagatctctgtgaattcttttgcaagcactgcagagagcggccccggtccatggtggtcatcgaggtgttcacccccgtggtgcagcgaatcctcaagcataacatggactttgggaagtgcccgcgactgaggctgtttactcaggagtacatccttgccttgaacgagctcaacgcggggatggaagtggtgaagaagttcattcagagcatgcacggccccacagggcactgcccccacccccgggtcctgcccaacctggtggccgtgtgcctggctgccatctactcctgctatgaagagttcatcaacagccgcgacaattccccaagcctgaaggaaatccggaacggctgccagcagccgtgcgaccggaagcccactttacctctgcgccttctgcaccccagcccggacctggtgtctcaggaagccacgctgtctgaggcccggctcaagtcggtggtcgtggcctccagtgagatccacgtggaggtggaacgcaccagcactgccaagccggcgctgacggccagcgcaggcaacgacagcgagcccaacctcatcgactgcctcatggtcagccccgcctgcagcaccatgagcatcgagctgggcccccaggccgaccgcacgctcggctgctacgtggaaatcctcaagctgctgtcagactatgatgactggagaccgtctctggccagtttgcttcaacccattccattccccaaagaagctctcgcacatgagaagttcaccaaggaactgaagtacgtgattcagaggttcgccgaagaccccaggcaagaggtccactcatgcctgctgagcgtgcgggccggcaaagatggctggttccagctctacagccccggaggggtggcctgcgacgatgacggggagctgttcgccagcatggtgcacatcctcatgggctcctgttacaagaccaaaaaattcctgctctccctggcagaaaacaagctgggtccctgcatgctcctggcactgagggggaaccagaccatggtggagatcctgtgcttgatgctggaatacaacatcatcgacaacaacgacacccaactgcagatcatctcaaccctggagagcacagacgtggggaagcgcatgtacgagcagctgtgtgaccggcagcgggagctgaaggagctgcaaaggaaaggcgggcccaccaggctaacactgccctccaagtccacagacgctgacttggctcgtttgctgagctccggctccttcggaaacctggagaacctcagtttggccttcaccaatgtaaccagtgcctgcgccgagcacctcatcaaactgccttcgctcaagcagctgaacctgtggtccactcagtttggagacgctggccttcggctcctgtcggaacacctcaccatgctccaggtgctgaacctgtgcgagaccccggtcacagacgctggcctgctggccctgagctccatgaagagtctctgcagtttaaacatgaacagcaccaagctctcagctgacacctacgaagatctgaaggccaagcttcccaatttgaaggaagtggacgtccgctacaccgaagcctggtgaagctcccagctcaaggcaggaagacgtttgcaaccgcgacaaaataactcttgactaacagccgcagagcagccggtcctggggtcccaccctggtgccctggctgtgagatagatggggagtctttctgggggcggaggggggagggggtggggagggggcccacaagcacgcccagcccccgccgaattcttttagcttcgtaattggaacctttgacctgatctaaagtggactttgtagcaacaagaggagcatcagcgggtcggggaggggtttgggggtgggctggggggtgggggaccctttgtggattttctttgcctttgtgtttgatgccgtcgtgtgggaaaagtcaactccgatgccaccattgcgggccggacgaaggatgctttcttcctagaggctccgagctgagctgcgaactcgccccccgcccttgggacaagaagacccagtcacatcactgcacccgtcctgtgtcctcaccattgctatgcaaagtgattcttgttgtacataagatttaaataatgcacctatttaagacatgttgacaaattgcgggtctgggacccgcctcttatttatgaagtctttgaccgtcccccccgcccgaccccaccgccctcccgcccccacctggcgtgtagtactgtataaaccagtcagctgtcgggttagtggtagtattattgttatttttttaaaggaaacaaacagacaacaaaaagaagaaaaaaaaaaagaacctccttggaaaaattaattgctttttcgtaatggattctctatgctaatgctctctcgtctgtctgtctgtctgcccactcccccacccaccactgtgcgtttctgatttccaaatgtctccaactccctcacgaggtggggctcaggctggaggaggagggattaagatccccttgctccactaaggcccaagctctttctctcggcaccttttagacttgaatgggaggctgctaacccgccctctccagtccaccccggtaaaagagctgttccccacccccagggagctcctgtccctgtcagcctttgctgtcccctgtccccaacggagactctgtcacccctgggctccccctgccatcgtgtgcttcacgtggccccatgcatgcccgcctctctgcatggtctcttgggaaaagagagatgtgtcgcctccgccagtccgactgccctccccaccccacccccgccaccccccacatgtgaccactgcaacgaagacactccttctgtccccacctgctccgaagacaaaccaacctccgtttcttttataaacagtcggctttttcttaataagccctcactgtacagaacagcccgttgatggtttatttggggtccccctctccccccagcccttttttctgttggtttagcacaaatacttccctcctccggcacctccaaacctaccccacagtcagtgtacttgttttatatatatttaatcttattcaatggaaaccatgcttttgtcgttttatactttgctaggtagactttattacccccccactatgccctcatttttttaaaaaaggaaaaaaaaaagaaactgggttccagtcttaattcattttccgtgccaggttttatttcgtgtgtgtgtgagtgtgttctgttttgtgttttgttttttgttgttgtttttagttgtttggttttcttttctttcccccctccggtcccatacttcacagcactctggtgcgggaagaagcagaagcaaaaaaaataaaaataaaaaaataaataaaaataaaaaaaataaaaaaggaaaaaaaaaaaagaagaaacaagacatgccacctttcccctcgcactgttgcttttcctgatggttaatactactgtcacgtagctgtgtacaaagagatgtgaaatactttcaggcaaaaataaactgtaagtgactcatcaaaa

SEQ ID NO: 778 - DNA, 6994 bp, HOMO SAPIENS
agaagctcccggccgggggcgcgcacgtaggcacgcagaggccgtcacgtgggtcgccgaggctcgcaagtgcgcgtggccgtggcggctggtgtggggttgagtcagttgtgggacccggagctgctgacccagcgggtggcccaccgaaccggtgacacagcggcaggcgttagggctcgggagccgcgagcctggcctcgtcctagagctcggccgagccgtcgccgccgtcgtcccccgcccccagtcagcaaaccgccgccgcgggcgcgcccccgctctgcgctgtctctccgatggcgtccgcctcaggggccatggcgaagcacgagcagatcctggtcctcgatccgcccacagacctcaaattcaaaggccccttcacagatgtagtcactacaaatcttaaattgcgaaatccatcggatagaaaagtgtgtttcaaagtgaagactacagcacctcgccggtactgtgtgaggcccaacagtggaattattgacccagggtcaactgtgactgtttcagtaatgctacagccctttgactatgatccgaatgaaaagagtaaacacaagtttatggtacagacaatttttgctccaccaaacacttcagatatggaagctgtgtggaaagaggcaaaacctgatgaattaatggattccaaattgagatgcgtatttgaaatgcccaatgaaaatgataaattgggtataactccaccagggaatgctccgactgtcacttcaatgagcagcatcaacaacacagttgcaacacctgccagttatcacacgaaggatgaccccaggggactcagtgtgttgaaacaggagaaacagaagaatgatatggaacctagcaaagctgttccactgaatgcatctaagcaagatggacctatgccaaaaccacacagtgtttcacttaatgataccgaaacaaggaaactaatggaagagtgtaaaagacttcagggagaaatgatgaagctatcagaagaaaatcggcacctgagagatgaaggtttaaggctcagaaaggtagcacattcggataaacctggatcaacctcaactgcatccttcagagataatgtcaccagtcctcttccttcacttcttgttgtaattgcagccattttcattggattctttctagggaaattcatcttgtagagtgaagcatgcagagtgctgtttctttttttttttttctcttgaccagaaaaagatttgtttacctaccatttcattggtagtatggcccacggtgaccatttttttgtgtgtacagcgtcatataggctttgcctttaatgatctcttacggttagaaaacacaataaaaacaaactgttcggctactggacaggttgtatattaccagatcatcactagcagatgtcagttgcacattgagtcctttatgaaattcataaataaagaattgttctttctttgtggttttaataagagttcaagaattgttcagagtcttgtaaatgttattttaataatccctttaaattttatctgttgctgttacctcttgaaatatgatttatttagattgctaatcccactcattcaggaaatgccaagaggtattccttggggaaatggtgcctcttacagtgtaaatttttcctcctttacctttgctaatatcatggcagaatttttcttatcccttgtgaggcagttgttgactgagtttttcatccttacaatcctgtcccatggtatttaacataaaaaaaaataaaactgttaacagattcttgctcgatagcttgtttgtgtctgtcgtgttattagagggaactccactatatatggtcacttgaaattatgatgcaaaggtttctcttgcattgaaaccctcttggatattacagtatttttaattgaaagtcctaattctgttaaggaaaggagttgattaaattttaaggtaccactggtattttgggagattataatcagtttgttttcaagataatagaaaataaggtccatgagaatagaagttatgtgatttcagtgagttgatgtgtacagcatggctgtgctccatctgatttaccccattcttaagttctgagagtatgttctcaaggaagatttaactctctttggttttaaattactttttaaccagcctaataaataagtcttactacttttcataatatttcataatagttaaaagtaggtgtttttttcgtgctcaatttggcactcaaaataatgttcattatggaagtttggtaatactgagcaagcctgtggaattttctttatgaaaaatgattttagcctttgcaaatgttaaccatgtgaaacacattttcagtataagtatgcgttacagggtttgatactttcctgcacttaggtttgtcctattcttcatttattcatactaggatagaaaattttggaatcagaaaatagatccagtgtttagctacatacaatctagtacaagtgaatttttattcttaaacataggtgtgttggctctttttttaaaagatgcgctctacctgaaaaggaaattggattttagaactggatgtggtgcagtgaagtattttaggcccaggtctgtgtacacattttatagaagaatgaagtactctgaagtattttggttgccttttcatttcaactgtgttttgaatttgtcagatcacacatatattgtgttattgggcgctgtggtatcttttataaaacctcttgcttgtgtgcaaaagttcctaaaaggaaacacaagtaatgcctatccattactagcatgctatgctgcatgctttactgccattgctgtatgctttactgtctttgtaaaaatccccctctccccttttctggtaactggaaaagcatgctaaaaatagtcttatattttcaccccataaatgcagaatcagtaattccttggcttaaagctcttatataatcaatattattggtggtaaataccaagtttggtatctcatagctatctttttttaaagaaattaagttcttgaaaatttagccaaatcccgttttatgggaatgctctttagaattcattttgttcagcccctttgttctatggttgagaaatctgaggccttacgaaggttaagagaactttccccgtgtctcacaggtaggtagaggcagagctggaactagatatctggtctgttgactctagctcagtgtcttctggtaactgttgaaaattgtcttagtttgagagatggctgaaataatgaacataaaatgctatttataataacaagtatatgtgaaatttcttattgtaagactactaccggcttactgttgaatagtttggttatagtgtttaggctagaaatgcctcccacattggtaataaacattacaaaatacaatgtatttttaggtaggcattttataaaatgcattatgccatggttgcttttgagatagattgtagtctgggtagcatctttaaaatgtatgtgggcttaactgttgttcatatcaggagatgctctgattgtataggtgagactctgtttctgttatttttaattgctgtatgaaatgtgatcagattattttactaccaacagttatagtttgaaagtccaactgtattaattgactgataatatgataatatagagattaaattgtttgtcttcattccttatatgtttagaagtttttgctttgtctgcctgcttacttgtatatgtaagcatgagggaaatacactgttgctaatactgaaattacaatcaagtaactaaggccttgagttcatatgtgacactgaatgcactagcttccttcgttctataactaatgtaccttaacttcccccattcttatatttacaagaagctaagtcattatgttctgagtgtgtggtatgttcccttaaaaaaaaatgacacttggaagaaaaatgtatgaaattcagaaattccgatcaaagaaaagtaattctttctttttttttttgagacagagtcttgctttgttgcccaggctggagggcagtggtgtgatctcacctcactgcagcttccgcctcctgggttcaagtgattctcatggctcagccgcctgagtagctgggattacaggtgtgagccaacaagcccggctaatttttgtatttttagtagagacaaggtttcaccatgttggtcaggctgggctcaaactcctgaatccgcctgcctcggcctcccaaagtgctgggattacaggtgtgagctgccgcacccagccaagaaaaataatactcttaaatacttagatgttcacctaaagttgatattatttggtatgggaattacttttgaactgtaatctttcagattacaccactttgaaaacaagttttaacagtagggtaaaaatatagtttttgagggtattcccaacttgtgatcttctaccactttagagacattcaagtaatagttttcttagagctttgcacattcctattcactgagattttaaaaatttcacctttattcgagggaaggatcaatgcttattaccatttggaaaaacgaagatcagaaggtaaatgatctttattttctagctttaaagggaaattaaaccattcatgaataaactttaaaaatgtgaagtgtccttttccttttcacaatacaaaaaaaatttcaacagattgtgtggtttgtgcatttatatcctgttaagcattaatagctaatcactgggacttgaattctgatggcagatagtctcttgcttagtgagatggagttaactattttttagtaggaagtgagaacagctgattttcatgccacgtttcatagccccacttttggtagactaccaccacgcttcttcgcgtaagcagtggcatcttgggaatgaatgcccagccgctcgtgggttggtgcaaagaagtataaacatatatcactaaggaaaaagaaagtttgtcttgcccttctgacacagtgtgtgcacttcaggcaatttttggaaaatataaaaaattccaaattctgcctttcagcagcatcaattgctaggaacatttcattcatttccctgtaatattaatgttctttaagcataatcactaattataagttgtatcctatttttttccagcttaatttctgtggtttattgaaaaccaagtataaatgtgactaaaagcattttgctttgtttttatagttaactttcttaaggttatggacattttataatgtaacatttgattggcctggcctcttgacaattcccttctagttatgcatatcctcctgttgccacatttcttgttttaaaactcagtttcttgttttccagttgttgctatgtataacacccatcttgaaagagagtatataggaagttattcagataacttttgtagtagtgatattcaactatagcagtaccttaactcatgatgagcttaggaacataaaagataattgttgcttgaatagcacccccagagatactgacctaattggtctggggtggagatctggcatggtagtttttttcaagctccaatcatcggccagacagttgctttatgtaggtttttaaatgccaaaggcagatatgaagtagatttaattaagacttgacttcagcaatacaggggaacttaaaatacttatttttctttaaactgcaggagtcactgttaggtattgcttaaaaaaaattgcataaaagctttgcttgtcaagttaggattgctggaataccactaaagatttttgacttgtgaataaatgagctgtcatcgcaaaaaggcgatttgagaaatgtgggcttcagtattaattgccattttgctgacacccagtgtacctacctacctgagaaatttattttgtccatcatgtatttctcaaagcaaaaggtggttttcaagtataatgtcgttttcaacatgcttattacttagttttacgtcagctcatttcatcatcattgataacttgtgaaatacttatctccatcctatggaataggggagacgggtttagacaggttcaattagctcaagtctacacagctgaagtagcagagaaagtgggatctagatggtctgatcctagtgatctaccatatgaaggacatagtttgtgtcctggtccaagtcaaatattgactcctcacaaacagtaagtatggcaattttgtgatgcctttgattccactttacatggagtactattatttgtgaaatgtctttaagatttttggtcttaaatttttgaagactgctttccccctttatctcccagaaaattgagaagaagtaaactcctgcccactaacaatctcagtccgtgaacaaaaccaacatgaacattcctaaacaagagtgtgtgttactctaagaagaaggctatagaatttatggaaatggcttatgtaacctacaagactggagaacagaatgtgactggccttttctaatggtcctttaagatttaatgattaaagcaagagttttttataattgactttgtggtctaaattcttgatactgtttataattctacaaagaacaaaaattgttatgtactataggcacttaagaaccctgaggaaaaataatacaatgtgtgtgtgtgagagagagagtgagttactgacattgttccaaaaaaaaaaaaaaaaaaaaaaaaaatgtggagggttgaaatggtaaggaattggaatcttttgtattttcgagcaataagaattcctattcttgtttcaaatagaggtttgttaggaattacagttgtggggagcaaactttcttttttgtgctgttttaattcaaaatgtatatccttaattgtatataatatgtagataaatatatgagggtattaagctactttgaattaaatttaaggatatatttcacatgaaaacaaatacaaacgagaatcaaaataaagttttgcaaagta

SEQ ID NO: 779 - DNA, 402 bp, HOMO SAPIENS
  misc_feature (182)..(182): n is a, c, g, or t
atttgttgtcgttaactgggcattttgacaaccgttccattccccagtgtctttttacacgtaatgagtggcggagtcagatccagctagaaatcactgtagatggcaacacctgacttgtctggagttaacttagagttgtagagcggccttagctcattgaaaaaaacatcttggggtanctagagagaaaaggcagtgggaagctaaatcatcctcagcagccaaaatcgacggcaaacaatgtatggtatttcttataggagggcctctagtgcttactcaggaagtccttattaatttacctgtaattctaattagtttagttacctggcttcccaggctgtaactaatggcattatattagaaaaaagcctggatagacgtccgaacttagccagt

SEQ ID NO: 780 - DNA, 4559 bp, HOMO SAPIENS
aatgctgtgtatttacttgaactcatacatcagaagatagtgatcttaacacattatgtttgggaagtttaaaatatctcttccaaatgcttgatgaaaaaggtgggaggatcacttgagccagggagttgaaggctgcagtgagccctgtttttgccaccacactccagcttggagaggtgaggggctgtcctctggatggcaattgatgaaggatgagtctgtgccctgaaggggagatcagtccagcccagctccccactgctgcctcgtgtgtggtggcttctccaggagagaggattgattcctaaagactcatgttacgtgaggaagcagctcagaagaggaaaggaaaggagccaggcatggctcttcctcagggacgcttgactttccgggatgtggctatagaattctcattggcagagtggaaatgcctgaacccttcacagagggctttgtacagggaagtgatgttggagaactacaggaacctggaggctgtggatatctcttccaaatgcatgatgaaggaggtcttgtcaacagggcaaggcaatacagaagtgatccacacagggacattgcaaagacatgaaagtcatcacattggagatttttgcttccaggaaattgagaaagaaattcatgacattgagtttcagtgtcaagaagatgaaagaaatggccttgaagcacccatgacaaaaataaaaaagttgactggtagcacagaccaacatgatcacaggcatgctggaaacaagcctattaaagatcagcttggatcaagcttttattcacatctgcctgaactccacatatttcagatcaaaggtgaaattggtaatcaacttgagaagtctactaatgatgctccctcagtttcaacattccaaagaatttcctgtaggccccaaacccagatttctaataactatgggaataatcccctgaattcttcattactcccacaaaaacaggaagtacacatgagagaaaaatctttccaatgtaataagagtggcaaagcctttaattgtagctcactcttaaggaaacaccagataccccatttaggagacaaacaatataaatgtgatgtatgtggcaagctctttaatcacgagcaataccttgcatgccatgatagatgtcacactgttgagaaaccttacaagtgtaaagagtgtggcaagaccttcagtcaggagtcatcccttacctgccatcgtagacttcatactggagtaaaacgttacaattgtaatgagtgtggcaagatctttggtcaaaattcagcccttctaattgataaggcaattgatactggagaaaatccttacaagtgtaatgaatgtgacaaggcttttaatcaacaatcacaactttcacatcatagaattcatactggagagaaaccttacaaatgtgaagaatgtgacaaagttttcagtcggaaatcaaccattgagacacataagagaattcatactggagagaaaccatacagatgtaaggtttgtgacacagctttcacgtggcattcacagctggctcgacatagaagaattcatactgcaaagaaaacttataaatgtaatgagtgtggcaagaccttcagtcacaagtcatcccttgtatgccatcatagacttcatggtggagagaaatcttacaaatgtaaggtttgtgacaaggcttttgtgtggagttcacaactggcaaaacatactagaattgactgtggagaaaaaccttacaagtgtaatgaatgtgggaagacctttggtcaaaattcagatcttttaattcataagtcaattcatactggggagcaaccttacaaatgtgatgaatgtgaaaaggttttcagtcgtaaatcaagccttgagacacataagataggtcatactggagagaaaccatacaaatgtaaggtttgtgacaaggcttttgcgtgtcattcctatctggcaaaacatactagaattcatagtggagagaaaccttacaagtgtaatgagtgcagcaagaccttcagtcacaggtcataccttgtatgccatcatagagttcatagtggtgagaaaccttacaagtgtaatgagtgcagcaagaccttcagtcgcaggtcatcccttcattgccatcgtagacttcatagtggtgagaaaccttacaagtgtaatgagtgtggcaataccttccgtcactgctcatcccttatataccatcgtagacttcatactggagagaaatcttacaaatgtacaatttgtgacaaggctttcgtgcgtaattcactcctgtcaagacataccagaattcacactgcagagaaaccttacaagtgtaatgaatgtgggaaggcttttaatcaacaatcacacctttcacgtcatcatagaattcatactggagagaaaccttagaaatgtgaagcatgtgacaaagtttccatttggaaatcacaccttaaagacataggagaatttatactggagagaaagcttacaaatgtaaggtttctgacaagacttgggagtgattcacacctggaacaacatactggacttcacactggagagaaaccttacaagtgtaatgagtgtggcaaagcctttggcaagcagtcaacacttattcaccatcaggcaattcatggtgtagggaaacttgactaatgtaatgattgtcacaaagtcttcagtaatgctacaacgattacaaatcattggagaatccataatgaagagagatcttacaagtgtaataaatgtggcaaatttttcagagatcgttcacatattgcaggtcatcggtgaactcatactggagagaaaccttacaaatgtcatgactgtgccaaggtcttcagtcaagcttcatcctatgcaaaacataggagaatttatacaggagagaaacctcacaagtgtgatgattgtggcaaagcctttgcttcacgttcacacgtcattagacatcagagaatctatactggacagaaatcttacaaatgtcatcagtgtggcaaggtcttcagtccaagatcactccatgcagaacatcagaaaattcatttttgagataaccgttcccaatgaaatgagtatagcaaaccatcaagcattaattgacattggagtcaattcagcattgacttgagtttgtgttgacttaacattgagttcaagcctttattgacattcaagtgtttatgttaagaggatggggccaggtgtggtggctccgacctgtaatcccagcacgtcgggaggccaaggcacataggtcacttgaggtcaggagtttgaaaccagcatggccaacagatgtgagccacttttctcagcctgttttttgtttcttattttctattatttttttgagccagtactttttaaagagatagtacttttttcagttagtactttttgaaagggatatatcatagtaatttttaaaagggatatgaggccaggcacggaggctcatgcctataatcccagcactttgggaggccgaggcaggcagatcacggggtcaggagatcgagactttcctggctaacagggtgaatccctgtctctactaaaaatacaaaaaattagctgggcatggtggctggcgcctgtagtcccagctactccagatgctgaggcaggagaatggcatgaacctgtgaggcggagcttgcagggagtcgagatcgcaccactgggctccagcctgggcgacagagtgagagtctatctcaaaaaaaaaaaaaaaaaaaaggatatcaaagcctcggtacgtggtggctcatccctgcaatcagagtactttggtcgacccatgtgaactggtcacctaaggtcacaatttcaaaagcaccctaacatggtgaaaccccatctctactaaaaatacaaaagttagccgggggtgttggtgtgcacctttagttccagctacttgggaggctggggcatgagaattgcttaaacctaggaggtagaagttgcagtgaaccaaaattgtgccactatactgcagcctgggtggcagagtgagtctccatctcaaacaaacaaaaaataacaaaaaaagacctcaaaaatgcttttcttctcgtataatggacttccttctttttctttctggttcctcttcatttctctctttattttttatttatttatttatttattttgcagtttgagtttgagataaatctaagttataaaagttgtatttcttaatacataatgacttctgaaagatgcctttgcagcatcctataatcagctcacatcattcgtttctgtacttgtatattttccagttattttccggttgaccccagaattcgttagatttttttaaaaaacaatttcaaaatagttgctgttttaaattagttgcatccagttcatatcaatgtctgcatgctttctagtctttgttatttattgaaaacctttggtacctaaacttaagtttgattgtttcagtgtgtacttggtaaatatgtcagtggccttttaactaaacatcaaaatgtactttaa

SEQ ID NO: 781 - DNA, 5734 bp, HOMO SAPIENS
gctgccatggagacacggcccagcggccgccggccccgccctgggagccccgcagtgcgtcgcgccgctgcccgcatctccgaggcccgcgacgagcggggcctcacgggagctggatgctcggagcagcaaggcggccctgggggccccttccggtcccggggctgacgcctggcggcgtctccgggaacccgcgccctttcaagcgccgctggctcctgtttcacagatggagaccctgaagccccaacaagcagcctccccagcacctcccagtgactgaaaaagctggcactgggcgcccgtctcactctccacccagctcccaggctgccccacgggaccagcacctttggggagagacgagacctgaacaaacgctggggctggatccccagggtgggtcagaacagccgttgccctgaaagctggcccggacagatgcgtgcggggcgtgccaccggagctccttccagcttgcgtctggggccaccatgtcccttcctcagggcactggatccatctcttcaagctcagtggtccaggccatggtggcagaatcaccccccagggtgtgacgcctcgtccctgtcaattccacacagctgcacccggaagagctgtggccgggcgccgctctgacctgtgtgcggtcccctgaatgggtctcaggtgtcttcagaatggtgaggccgcctcatttcctcaccacacaaccctcctgaggacgttgcctgcaaatgggcggaattcctaatttctaccattcagttaaacgagggatccttaagccccaaagctgggaaagctgtccgttaatttagtgcgcgtgggccgtctcagaacagcagggttcccaggagtccagcgggacgggggaggggatgagtggccgtgtccccctggcagagaaggccttgtctgaaggctacgcccgcctccggtacagggacacctccttgctcatctggcagcagcaacagcagaagttggagtcggtgccacctgggacgtacctgagcaggagccgaagcatgtggtactcacagtatggaaatgaggccatcttggtccgagacaaaaacaagctcgaggtctctagggacacagggcagtccaagttttgcacaattatgtaattccgatgtgagcacctgaacccaggaccacactttgaggaaaacagacctgagtttcattcagttgtcttgttgatttccaatccttgctggaagattttgaataatgaacgtgaagatcaaactgtggtgtaagaacccaagaagcgcagaattggcccccgaacccctcagcacagccgcggtgtgactggtgcacaggacacttcccctctagagtcccctccgtggtcagctgttgtgacatttgaattctccaggtgctgctagggacagcataggcccgggcactgctagatgcttggtttaaaccaggccaagagtaaccctcccatccccattacaaaccaccttttcaagttttttaggttttagttttttgtttttagcataaatggcggagtagcagcagcatctcaccaggagctttgtcgcattacattttgtattttgcttttttgagacggggtctcactctgttacccaggctggaatacagtggcacaatcacagctcactgtaggctctatctcctgggctcaggtgatcctcccaaactcagcctcccaggtagctgtggctccaggcgaactactgtatatagagacagggtttccctatgttgcccaggctggtctggtcttatagtcctgggctcaagcctcccagagtgctgggattacaggcatgggtcaccgcaccaagcccgcatttatattttgagttaccaaaatgatcatcatctgtgaagcatcatggtagcttccaagcatttgcggcccactggccagtgcatccaaaacacattcaggaaacccgagagttgtaagttgcacatgtgtggcctacagtgacttccatgtagtaacagggctgagcaaggcaggctctccaccagacttaaagcattcaaccactctgcccccaggccgacactgacatgtgttcactgtcgctgccacagctggccacctgtgttcagtctccatgaaggattcaccttctgctctcactgacatctccttggctacacaaatgtgcaggtgtctcttgtcaaagctaatttttcttttctaaataaacatcctttaatacactcctccccttcctcacacttatttttatccttgttcgtaatatcctacttggcttcccattttttatagcagtaatatgtaattgattgctaaagactgcaatacacaaaggcataaagcaaagcacaagtgctctccgtggggagaacccggccggcagctggggatgcgtcccacagctcctcagcatgcacacacggtcacgtgattctgacggcctcatcctgcaccatgcctcttgtatccgccattttctttcttgctcaactgtacagactgggcattcacttaatgcttttctttttttttaagagagtctcactctgttgcccaggctggagtgcaatggcacaatctcagctcactgcaacctctgcctcctgggttcaggcgattctcctgcctcagcctcctgagtagctggaattacaggtgcctgccaccacgcctggctaatttttctatttttaatagagacaaggtttcaccatgttggccaggctggtctcgaactgccaatctcaggtgatctgcccacctcggcctcccaaagtactgggattacaggcgtgagccaccgcacccggcccacttcatgcttttaacctctgactcgcagctctcccgtgagcccacagacgggcacagtgacagcatccaggttgtcatctgtgcaaacagcatgttctgaatgtgcctgtactctgttcgtgcttctctttgcagctgtgcaagttcattcgcaaacgtcctagaagtggaactgctgggtcaaagtgcattccccaaatgtcctgccagaggcctggtcggcagcagcctcctgcacagcccgagtcccttctgcgagagtcctggcttgtttgcagcctgcagctgggagatttgaagtcagacttccaggattgccgcatggagctgcagagggagtgagcatggggctggaggacctgccccgccggctgacactcccacagcaaggcgggcccgccaaggaagcactccacatccgctaggtagggtttgtctgcatcttttcagttcttcagtttaagtcctgcctgggaagaaagcaaactccagaggcaaatctggaatgcctgtgtgccaccttctcaccgcaccacagactcccctgaggacgggttgtggcggggttggccccaagcatgggaggcagcgcagacatgcagaatggggtctgaggtcacgttgcaacgctggcaggatgtgtgctcaagggccagtctctgcaggggtcagggcgtgtgggccacgcacaaggagctggcactaagccgcttaggctgcaggaagacaccatctgcctggggcggacaaggccccatgtccgtcctcaaggaggctggtctggatgagaagggtcacagtctggccaggagtgtcaccgtgccccctgaccccatctggggtcgggctggacaggtcctcaggcctagacgtgggcccagccagaaccttctcccctggcatgtctcttccaggcctagttccagagctgtcattcttcggcgagccgcgctgcacgccagcctccagtctggcagttaaacctcactatgaaaatctgcttttgggattttatttgcatttccattagactgagcgcatcacaagccacttcaggatagactgaggtgcagagggaggggacaagcggccaggttgactagaagagcacagaacctggctgtctcgaagagggcagcttgttccagggaaccaatgaactgtcagtaaaggggattgtggcttcctagtgaggcaagaaatgatgctcccttcatcctgccagggctcaggacaagagctacttaatggtttgattattattattttttaagagatgttgtccaggctggagtgcagtgatgcaatcatggcttactgcagcctcaaactcctggcctcaggccatcctcctgcctcagcctcccaaagtgctgtgatcacaggcacgagccactgcatcctgcctttaaatggttttttggggccccttttggatgctctgggtgtttttgccaagagttacaggatgtcaagtgtggggagctcagcacccttgctgtggaccagtgaaggctgttccagaccaggtgcttccagacatttccaggctccaggagagaggctgggagcccccacagaaagcacaggaaaatgcaaaaaaaaaaaacagtctttttttttttttttttttttgctttttattatgaaaacaaaacaaatgccccaggagaagggtccatgattaccagaaacatcaaagagtactttctaccatttttattctgttgtgttgaggccagcattgcaataaacaagctaaactacttacattggactcattttcagtaactgacatttacaggaatatactagaaacggcactaaaaagtttaagaaaagttacggtaaacttgcatgcacatcatacagaaaagtaacattttaaatataaaaaagaaaaacttcctggaagcattatgccagtattaaggaacagtgctactctggatgtgacaaattctgtatgtgggtgttactctttcccaaaagactgtcagaggcgtgagtgctgcaaaagaacaacaacaaaaacaaacacacaaaaaaatgtgtcttacagtttgtaagcaagatgacactgcccaacacaaagaggggtctggagttcagttcacgcccgaagcctgccccctcggcctccaggggtcattcagagtgttctcaaatccaattccgacacacgacttgtcactactcctctccccttgaaaaaagcatgttagaagctgccctacaggtctcagcagtgggacaatctaattgaatcaccgcagccttctaatacagaagaaacggacgtgactgtcaccctcagcccgccagcaagggcgctgaggaagtcattaatccttcgaaactctgaaaagaaaccagtgttgaagtctggacagaaagccttaaaaaagtgacagcaccaatgcagctgctcagtgtacccgccgtgggctgtcagggtcagtggcttctttctagatgaaaggagcagaggcgagccgacgccaccgtcacagagaaccagccgagaaggaaaggccccacgatgctcctgctgcgctgcccccacagccggccgctcccccgacggctcacacaggcagcacctcactgccctgtggctggaggggcattgcaaggagcgccccccagccccaggcacccccggcttagggtgtacgtatcacccagccctgtgctggcagcacgttaccaaccagcctgcgtgaagacctgtcaactgtcgtgtgtgaattccttaaattcggtttaaatagtccattaaagatctgtttagaaaatacctttgaaaacgagggtaactttaaaaaatggaaactttcaaatccatttatatttttattataaacaaaacttaattaaaagtttaacaaactggctgaaaactca

SEQ ID NO: 782 - DNA, 2339 bp, HOMO SAPIENS
acgcggtgccgcggggcgggagtagaggcggagggaggggacacgggctcattgcggtgtgcgccctgcactctgtccctcactcgccgccgacgacctgtctcgccgagcgcacgccttgccgccgccccgcagaaatgcttcggttacccacagtctttcgccagatgagaccggtgtccagggtactggctcctcatctcactcgggcttatgccaaagatgtaaaatttggtgcagatgcccgagccttaatgcttcaaggtgtagaccttttagccgatgctgtggccgttacaatggggccaaagggaagaacagtgattattgagcagagttggggaagtcccaaagtaacaaaagatggtgtgactgttgcaaagtcaattgacttaaaagataaatacaaaaacattggagctaaacttgttcaagatgttgccaataacacaaatgaagaagctggggatggcactaccactgctactgtactggcacgctctatagccaaggaaggcttcgagaagattagcaaaggtgctaatccagtggaaatcaggagaggtgtgatgttagctgttgatgctgtaattgctgaacttaaaaagcagtctaaacctgtgaccacccctgaagaaattgcacaggttgctacgatttctgcaaacggagacaaagaaattggcaatatcatctctgatgcaatgaaaaaagttggaagaaagggtgtcatcacagtaaaggatggaaaaacactgaatgatgaattagaaattattgaaggcatgaagtttgatcgaggctatatttctccatactttattaatacatcaaaaggtcagaaatgtgaattccaggatgcctatgttctgttgagtgaaaagaaaatttctagtatccagtccattgtacctgctcttgaaattgccaatgctcaccgtaagcctttggtcataatcgctgaagatgttgatggagaagctctaagtacactcgtcttgaataggctaaaggttggtcttcaggttgtggcagtcaaggctccagggtttggtgacaatagaaagaaccagcttaaagatatggctattgctactggtggtgcagtgtttggagaagagggattgaccctgaatcttgaagacgttcagcctcatgacttaggaaaagttggagaggtcattgtgaccaaagacgatgccatgctcttaaaaggaaaaggtgacaaggctcaaattgaaaaacgtattcaagaaatcattgagcagttagatgtcacaactagtgaatatgaaaaggaaaaactgaatgaacggcttgcaaaactttcagatggagtggctgtgctgaaggttggtgggacaagtgatgttgaagtgaatgaaaagaaagacagagttacagatgcccttaatgctacaagagctgctgttgaagaaggcattgttttgggagggggttgtgccctccttcgatgcattccagccttggactcattgactccagctaatgaagatcaaaaaattggtatagaaattattaaaagaacactcaaaattccagcaatgaccattgctaagaatgcaggtgttgaaggatctttgatagttgagaaaattatgcaaagttcctcagaagttggttatgatgctatggctggagattttgtgaatatggtggaaaaaggaatcattgacccaacaaaggttgtgagaactgctttattggatgctgctggtgtggcctctctgttaactacagcagaagttgtagtcacagaaattcctaaagaagagaaggaccctggaatgggtgcaatgggtggaatgggaggtggtatgggaggtggcatgttctaactcctagactagtgctttacctttattaatgaactgtgacaggaagcccaaggcagtgttcctcaccaataacttcagagaagtcagttggagaaaatgaagaaaaaggctggctgaaaatcactataaccatcagttactggtttcagttgacaaaatatataatggtttactgctgtcattgtccatgcctacagataatttattttgtatttttgaataaaaaacatttgtacattcctgatactgggtacaagagccatgtaccagtgtactgctttcaacttaaatcactgaggcatttttactactattctgttaaaatcaggattttagtgcttgccaccaccagatgagaagttaagcagcctttctgtggagagtgagaataattgtgtacaaagtagagaagtatccaattatgtgacaacctttgtgtaataaaaatttgtttaaagttaaaaaaaaaaaaaaaaaaaa

SEQ ID NO: 783 - DNA, 4868 bp, HOMO SAPIENS
agttagcgcctgctgggtgtctgctcgggtggtctgggaactacaattcccggcgggctgtgagatgccttggctgtagttagtaaggagccggatgattgcctcagcaggtgtgaagcgtgtgctttagtttcgtgggaggcctggcatccccgagagggaggggaaaggtaaccactcctttgtggaggtcgccagggtcattgtcgtggatttgcacagtcggctgggcggtgcaatggcggaaagaaaaggaacagccaaagtggactttttgaagaagattgagaaagaaatccaacagaaatgggatactgagagagtgtttgaggtcaatgcatctaatttagagaaacagaccagcaagggcaagtattttgtaaccttcccatatccatatatgaatggacgccttcatttgggacacacgttttctttatccaaatgtgagtttgctgtagggtaccagcgattgaaaggaaaatgttgtctgtttccctttggcctgcactgtactggaatgcctattaaggcatgtgctgataagttgaaaagagaaatagagctgtatggttgcccccctgattttccagatgaagaagaggaagaggaagaaaccagtgttaaaacagaagatataataattaaggataaagctaaaggaaaaaagagtaaagctgctgctaaagctggatcttctaaataccagtggggcattatgaaatcccttggcctgtctgatgaagagatagtaaaattttctgaagcagaacattggcttgattatttcccgccactggctattcaggatttaaaaagaatgggtttgaaggtagactggcgtcgttccttcatcaccactgatgttaatccttactatgattcatttgtcagatggcaatttttaacattaagagaaagaaacaaaattaaatttgggaagcggtatacaatttactctccgaaagatggacagccttgcatggatcatgatagacaaactggagagggtgttggacctcaggaatatactttactcaaattgaaggtgcttgagccatacccatctaaattaagtggcctgaaaggtaaaaatattttcttggtggctgctactctcagacctgagaccatgtttgggcagacaaattgttgggttcgtcctgatatgaagtacattggatttgagacggtgaatggtgatatattcatctgtacccaaaaagcagccaggaatatgtcataccagggctttaccaaagacaatggcgtggtgcctgttgttaaggaattaatgggggaggaaattcttggtgcatcactttctgcacctttaacatcatacaaggtgatctatgttctcccaatgctaactattaaggaggataaaggcactggtgtggttacaagtgttccttccgactcccctgatgatattgctgccctcagagacttgaagaaaaagcaagccttacgagcaaaatatggaattagagatgacatggtcttgccatttgagccggtgccagtcattgaaatcccaggttttggaaatctttctgctgtaaccatttgtgatgagttgaaaattcagagccagaatgaccgggaaaaacttgcagaagcaaaggagaagatatatctaaaaggattttatgagggtatcatgttggtggatggatttaaaggacagaaggttcaagatgtaaagaagactattcagaaaaagatgattgacgctggagatgcacttatttacatggaaccagagaaacaagtgatgtccaggtcgtcagatgaatgtgttgtggctctgtgtgaccagtggtacttggattatggagaagagaattggaagaaacagacatctcagtgcttgaagaacctggaaacattctgtgaggagaccaggaggaattttgaagccaccttaggttggctacaagaacatgcttgctcaagaacttatggtctaggcactcacctgccttgggatgagcagtggctgattgaatcactttctgactccactatttacatggcattttacacagttgcacacctattgcaggggggtaacttgcatggacaggcagagtctccgctgggcattagaccgcaacagatgaccaaggaagtttgggattatgttttcttcaaggaggctccatttcctaagactcagattgcaaaggaaaaattagatcagttaaagcaggagtttgaattctggtatcctgttgatcttcgcgtctctggcaaggatcttgttccaaatcatctttcatattacctttataatcatgtggctatgtggccggaacaaagtgacaaatggcctacagctgtgagagcaaatggacatctcctcctgaactctgagaagatgtcaaaatccacaggcaacttcctcactttgacccaagctattgacaaattttcagcagatggaatgcgtttggctctggctgatgctggtgacactgtagaagatgccaactttgtggaagccatggcagatgcaggtattctccgtctgtacacctgggtagagtgggtgaaagaaatggttgccaactgggacagcctaagaagtggtcctgccagcactttcaatgatagagtttttgccagtgaattgaatgcaggaattataaaaacagatcaaaactatgaaaagatgatgtttaaagaagctttgaaaacagggttttttgagtttcaggccgcaaaagataagtaccgtgaattggctgtggaagggatgcacagagaacttgtgttccggtttattgaagttcagacacttctcctcgctccattctgtccacatttgtgtgagcacatctggacactcctgggaaagcctgactcaattatgaatgcttcatggcctgtggcaggtcctgttaatgaagttttaatacactcctcacagtatcttatggaagtaacacatgaccttagactacgactcaagaactatatgatgccagctaaagggaagaagactgacaaacaacccctgcagaagccctcacattgcaccatctatgtggcaaagaactatccaccttggcaacataccaccctgtctgttctacgtaaacactttgaggccaataacggaaaactgcctgacaacaaagtcattgctagtgaactaggcagtatgccagaactgaagaaatacatgaagaaagtcatgccatttgttgccatgattaaggaaaatctggagaagatggggcctcgtattctggatttgcaattagaatttgatgaaaaggctgtgcttatggagaatatagtctatctgactaattcgcttgagctagaacacatagaagtcaagtttgcctccgaagcagaagataaaatcagggaagactgctgtcctgggaaaccacttaatgtttttagaatagaacctggtgtgtccgtttctctggtgaatccccagccatccaatggccacttctcaaccaaaattgaaatcaggcaaggagataactgtgattccataatcaggcgtttaatgaaaatgaatcgaggaattaaagacctttccaaagtgaaactgatgagatttgatgatccactgttggggcctcgacgagttcctgtcctgggaaaggagtacaccgagaagacccccatttctgagcatgctgttttcaatgtggacctcatgagcaagaaaattcatctgactgagaatgggataagggtggatattggcgatacaataatctatctggttcattaaactcatgcacattggagatttatcctggtttcttaggaatactactactctgattgtgtctactgattggctatcagaaccttaggctggacctaaatagattgatttcatttctaaccatccaattctgcatgtattcataattctatcaagtcatctttgattcctggacctaataaattttttttccctttctttgggtgtccaagagaaatggtttttgccaaactctttttaaaaaacaaattgttgctatttcctagaagtttctggtttttaagatgaacataaaagtgtcagtatgcttcttttatgaggtgtactttatactttgatgaaggctaaggtgtacctaacagctttttatagtatattcatttatggagttagctgtatttttttttaaaaaagaaaagtagtaaattagcagcttttttttttaaatgaagagaacttcatgatgatttaaaagaactaatgagaatattttgacttgacttcaattactaagtattttgtataaagaacaaataggtcctgcattttataagactttttaaagctttaattattcaactaagaaccaataatggcttcttcaaggctaatatcaatagtttataagcagtatatttcacctacactaaatatgggcattttaaaagaagattccccccttcccccccagaaatctgcatttactaaatttgtcttaagtccaattgtgtttaaaggtcatgctggtcgggtgtggtggctcacacctataatcccagcactttgggaggccaaggtgggcagtcacctgaggtcaggagtttgagaccagcctgaccaacatggtgaaaccccgtctctactaaaaatacaaaaattagcttggcatggtggcgggtacctgtaatcccagctgcttgggagtgtgaggcaggagaatcgcttgaacctgggagaccgaggttgcagtgagctgaaaccgtgccattgcactccagcttaggcaacaagagtgaaactctgtctcaatcaatccatcaatcaatcaataaaatagaggtcatgctgactattacagatttaaaaaaaaaaaaaaaaaaaa

SEQ ID NO: 784 - DNA, 3004 bp, HOMO SAPIENS
cccagcgcctgccgccgacgccgccgcctcctcccgccgcgcggaccgtggagcggggtcgcagccgcctgcccgccctgcggtgggccaggatgtcgggcttcctggaggagctgctcggcgagaagctggtgacgggcggcggcgaggaggtggacgtgcactcgctgggcgcccgcggcatctcgctgctgggtctctacttcggctgcagcctcagcgccccctgcgcgcagctcagcgccagcctggccgccttctacgggcgcctgcggggggacgcggcggccgggccggggccgggagcgggggccggggcggcggcggagcccgagccgcggcggcgcctggagatcgtcttcgtgtcctcggaccaggaccagcggcagtggcaggacttcgtgcgggacatgccgtggctggcgctgccctacaaggagaagcacaggaagctcaaactttggaacaaataccgaatttccaacattccatcactaatattcctcgacgccaccactgggaaggttgtgtgcaggaacgggctgctggtgatccgagatgacccagaaggtctggagttcccctggggaccgaaacccttcagggaagtcattgcagggcccttgcttagaaacaatgggcagtctctggagagcagcagcctggaggggtctcacgtgggcgtctatttctccgcacattggtgtccgccctgccgaagcctcacccgggtcctggtggaatcctaccggaagatcaaggaggcaggccagaacttcgagatcatcttcgttagtgcagacaggtcggaggagtccttcaaacagtacttcagtgagatgccctggctcgccgtcccctacacggatgaggcccggcggtcgcgcctcaaccggctgtacggaatccaaggcatccccacgctcatcatgctggacccgcagggcgaggtgatcacgcggcaggggcgggtggaggtgctgaacgacgaggactgccgggagttcccctggcaccccaagcccgtgctggagctctccgactccaacgccgcgcagcttaacgagggcccctgcctcgtcctttttgtagattctgaggatgacggagagtccgaggcggccaagcagctgattcagccgatagctgagaaaatcattgccaagtacaaagccaaagaggaggaggcaccccttctgttcttcgtagccggggaggatgacatgactgactccctgcgagattacaccaacctgcctgaggctgcccctttgctcaccatcctggacatgtcagcccgggccaagtacgtgatggacgtggaggagatcacccccgccatcgtggaggcctttgtgaatgacttcctagcagagaagctcaaaccggagcccatctagcgtggctccggcctcctgagacgttatttaaaactcagccttctcctcctccccctccttccttccgcccttggacttacccagcgtgccccgaatcccaccacccaagtgtccagcctctctgtggtgccttgtttctgcagtaaactcctcagccagcaccctggggtgtggaatcagcagcggcagagtccaccgtgtttggagactctgtttgggagcacgggatggccgggggcccggccagagcggggctgcatggctttcgcaaagtcactagcttttggtgaaggatctgccagggtgtcctgggcagagtgagcgtggagggccggtgggtcccgctcgggctctgactctgacgtcggcacacacggccccggacggccagaggggaaccgccgggtgacacctgcgtggaggctgagctgagaaagggcctccgcttagagctgcgggtgaggacgtccttttctaagcaacacagtcttcctcggtctgagagaaaagcagcccactcttgtgttctcaggcaggggatctccaaatgcaaaaggaagcttgtagaggttttttgggtgagaagaaaaatgtagctaaggtaatggttcatatcatacaaacagctcccacgatcctgaaattctgttaacgaatccttctctttggacatcttcccaagaaacttagccctgagtcctaggaggagcacctctgcaccagcacggacctctcgctccacccagctctgtgcccaaggcccctgatctctgctgaggtgcccacacccacgttcgatcacccctgccattcccttttattttcttttttttgagatggagtcttgctctgtcgcccaggctggagtgcagtggcaccatcttggctcacttcaacctccgcccccaaggttcaagtgattctcctgcctcagcctcccgagtagctgggattacaggcacccgccaccgtacctggctaatttttgtatttttagtagagatggggtttcaccatgttggccaggctggtctcgaactcctgacctcaggtgatccacccgcctcggcctcccaaagtgctgggattacaggcgtgagccgccgtgcccggcccccttttcttttcaaagcagaactacaaagatgagaaattaccagaagcctcgccttttcctaagcaccagcggaaggagctgtgccccgggatggagtgagggtggagggcgcgtcagccacgggtgggccttgtgtcgccttgtatcggcccaggtaggttgttggcctcttacttgggctgacctgacccccgaaagagaaacagacaactctgttctcaggattggggatggacggcttcggccaagcgttttagcctcattcactcaggccccactcagcactctgccagccaagaccattgatttggaaaatccggtccccacccgctaatgagctgttgacactgttgttccttgctgaattggattgttgacttgtagttcagaggcgtacaactagttggcgattagacttgttatgtgatgttaccagcctgaaatgcgatcaccccgtaggaaataaagcaggcatctctggacctca

SEQ ID NO: 785 - DNA, 1543 bp, HOMO SAPIENS
cgccggttgaaagcgcgtgtctgcgtcgggttctgttggagtgcgttcggtgcgccgtgggtccgcgctgcttccacccaacttcctgttagtttctctcctgtcacaatggcatgatctcggctcactgcgacctctgcttcctgggttcaaggattctcctgcctcagcctcccaagtagctgggattacagtttccatcattatcttctatggagttcttcattcccacatctgtggaccttaaaatcctaccgttgagtgcctgccttggatcagcagtcagttcgttaccttggttctcagacgatgcttgcaacaacgccatgcgattcgcccactcttgggttacattagttatacactctggaggtgacttgacctgtcattgtgaacaattattgctcttggacgacccaggacataggccagccagtacgtaccccagtgtgttggagaatcgcgctcggcttcttcctctgtgctgagtcatgaaagttgccggagcaggtgcagttacacaacctccaggtatgatcctgtttaaggactggatttaggataactacttagaggttaaaagtcacaagggtgtatggatgaggctggagtgatctgggaccaaagacatctaggcttgctgtcaaggcttctgatcaacatgagatgaccgccgtgtggtaaactgatgaaccctgaccctgatcaacatgagatgaccgccgtgtggtaaactgatgaaccccgaccctgatgaacatgaccgccgtgtggtaaactgatgaaccccgaccctgatgaacgtgagatgaccgccgtgtggtaaactgatgaaccccgaccctgatgaacgtgagatgaccgccgtgtggtaaactgatgaaccccgaccctgatcaacgtgagatgaccgccgtgtggtaaactgatgaaccccgaccctgatgaacatgagatgaccgccgtgtggtaaactgatgaaccccgaccctgatcaacatgagatgaccgccgtgtggtaaactgatgaaccccgaccctgatcaacatgagatgactgccgtgtggtaaactgatgaaccctgacccattaggctttggctacagaatgtggaaataagttgtgttactacatgtgtgtaatcctagggtgcaggacaccggccgggaggttccatagagtgatgggttctgcaggtaactcatcctctagtcctctgtaagctcctagaaggaagaaattatgtcctttagactaataaaattcctccaaaccaaatacagcacctactgtgaagacacaaagatacttttagaatagtaaaaactttatccattgagaaattccttaatgaaacagtatccaagaagtcatttgccagcagatttcttagaggtgcgataaagaagaggacattgccagtcgtcacagcagctgcaatagctcctctctattgttaaacagtgggatatcttgtgcaggttttcagttgacaatcaattttaaagattagtttcggtccccatcaatcaattatttatt

SEQ ID NO: 786 - DNA, 1206 bp, HOMO SAPIENS
ggaaggggacgcgaaccgtcctggtcccatccgagccgccgtagcgcgagtgccgcgggagttcggcagcccaggtcgccaaggcaacgggctccgctgcgggttgcgggctgcgggcgctaggctgccccggggaggcgctgcggaccggcggcccaggcacggagaggcggcgagaccgcagaattcccgtactgattagtcaacagtggaaaatctgaagagatgcaagcaggaaaaagaaattaaaccaggcctgaggagcgatgcgacaggcatgatggaggtcgagtcctcctactcggacttcatctcctgtgaccggacaggccgtcggaatgcggtccctgacatccagggagactcagaggctgtgagcgtgaggaagctggctggagacatgggcgagctggcactcgagggggcagaaggacaggtggagggaagcgccccagacaaggaagctggcaaccagccccagagcagcgatgggaccacctcgtcttgaatctgaccttgtccaagaaggctggacgagagaccttctgtcccctcccagagggggaaccctggcactggcccagcagcctcttctctgagctccatgtcccagataaaccaggccagactgagaaggctccccagaggcctctgtggcctccactccgggaaagccctctgcccacacccacaggcttcacattcccaccaccttcgcaccgtgcccaggtacactttcaagacactgtaaccacaagatgttatttattgagctggcgccgggacttgggcggggcctgccctacagtgagcagcccacacaggaacgctcctctcgcgagcggcccgggcagggaccctgtcccaacaccaacacctcctctccagcccaatcttctgggtccagacctgcttgtcccttttttagaaaacacttttaaactttttaaaaattttaaaccttttttcagcagatatggagagagctgacaatcaattcacattttttaagccattttagctaaactgtcattgtgcatctctgaggttccctcatggagctccacagatccatttttagggaagggattttggctcaaaacgatctgaccacctctgccctgtccaccaggataagtgacacctaggacccaggaaataaatgccgatgatttgtgtgaaaaaaaaaaaaaaaaaaaaaaaaaa

SEQ ID NO: 787 - DNA, 781 bp, HOMO SAPIENS
ctcgcaggggctggtgtcactggtcattcctgcacaggacagtccaccatggcctcagatcaccagacccaggcgggcaagccacagtccctcaaccccaagatcatcatctttgagcaggaaaactttcaaggccactcgcatgagctcaatgggccctgccccaacctgaaggaaactggcgtggagaaggcaggttctgtcctagtgcaggctggaccctgggtgggctatgaacaggccaactgcaagggcgagcagtttgtgtttgagaagggtgagtacccccgctgggactcatggaccagcagccgaaggacggactccctcagctccctgaggcccatcaaagtggacagccaagagcacaagatcatcctctatgaaaaccccaacttcaccgggaagaagatggaaatcatagatgacgatgtacccagcttccacgcccatggctaccaggagaaggtgtcatctgtgcgggtgcagagtggcacgtgggttggctaccagtaccccggctaccgtgggctgcagtacctgctggagaagggagactacaaggacagcagcgactttggggcccctcacccccaggtgcagtccgtgcgccgtatccgcgacatgcagtggcaccaacgtggtgccttccacccctccaactagtgccctccccaccatgcctccttcccaggacccaggtctgctgcccaggaaccctccagacctcccagagagtgaataaagtgtgacttgcaacttgaaaaaaaaaaaaaaaaaa

SEQ ID NO: 788 - DNA, 6308 bp, HOMO SAPIENS
gctcctcgcctggccgtgatatcaatggcgcaggcttcacttctgctgtggcggtgactgaggcctttctggtgacctcagcccaacacaggccgtctccggagcttcccggtagtggccccggattcccacggtctttgtcattggctgtcagctagcaggcctggccgctcccgtgcggagagaccatctcttcagggcaatgtccaggccgagcagcgtctccccgcggcagccggctcctggcggtggcggaggcggcggcccctcgccttgtggccctgggggcggcggccgggccaaggggctgaaggacattcgcattgatgaggaggtgaagatcgcagtcaatatcgcgctggagcgcttccgatacggggaccagagagaaatggaatttccttcttctttgaccagtactgaaagagcctttattcatcgactcagtcagtctcttggtttggtctctaaaagtaaaggaaagggagcaaatagatacctaactgtgaagaagaaagatggatcagaaacagctcatgcaatgatgacctgtaatttgactcataatacaaaacatgctgttaggagcctaattcaaagatttcctgtcaccaataaagagcgtacagaacttctgcctaaaacagaaagaggaaatgtgtttgcagttgaagctgaaaaccgggaaatgagcaagacaagtgggcgactcaacaatggcatacctcagattccagtgaaaagaggagaatccgaatttgattcttttaggcagtctttaccagtgtttgagaaacaggaagaaattgttaaaataattaaggaaaataaagtagttttgattgtaggagaaactgggtctggaaagaccacacagattcctcagttccttttagatgattgctttaaaaatggtatcccctgccgtatattttgtactcaaccaagacgattggcagctatcgctgtggctgaaagagttgccgcagagagacgggaaaggattggtcaaacaattggttatcagatccgattagaaagcagggtttctccaaagacacttctgacattttgtactaatggggtattgcttcgtacattgatggcaggagatagtacgttgtcgactgtgacacatgttatcgtggatgaagtgcatgaaagggatcgatttagtgattttttacttacaaagttaagagatttgttgcaaaagcacccaactttgaaactaattctttctagtgctgccttggatgtaaatctctttataagatattttggaagttgtccagtgatatatatacagggaagaccatttgaagtaaaagaaatgtttctggaagatattttaagaacaactggatatacaaacaaagaaatgttaaaatataaaaaggaaaaacagcaagaagagaaacaacaaaccacacttacagaatggtactcagctcaagaaaatagtttcaagcctgaatctcagaggcagagaactgttctaaatgtgactgatgagtatgacttactggatgatggtggtgatgctgtcttcagtcagctgactgaaaaagatgtgaattgccttgaaccatggttaataaaggaaatggatgcttgcctttctgatatatggctacataaagatattgatgcctttgctcaggtctttcatctcattttaactgaaaatgttagtgttgattacagacatagtgaaaccagtgcaacagctctgatggttgctgcaggacgtggctttgcaagtcaagtagaacagttaatcagtatgggagccaatgtccatagtaaagcatcaaatggctggatggcattggattgggctaaacactttgggcagactgaaattgtggatcttctagaatcttacagtgctacactggaatttggaaatctagatgaaagttctctggttcaaacaaatggaagtgacctcagtgctgaagacagagagctcctgaaagcttatcatcatagtttcgatgatgaaaaagtagacttggatttgatcatgcatcttctatacaatatctgccatagttgtgatgctggtgcagtactaatttttctgcctggatatgacgaaattgttggactgagagatcgcatcctgtttgatgacaagcggtttgctgacagtacacatagataccaagtctttatgcttcattcaaatatgcaaacatccgatcaaaagaaagtattaaaaaacccacctgcaggtgttcgaaaaataattctttccaccaatattgctgaaaccagcatcacagtcaatgatgttgtctttgttattgattctggtaaggtgaaagagaaatcctttgatgctctgaattttgttacaatgttaaaaatggtatggatttccaaagctagtgccatacagcggaaaggcagggcagggcgatgtagacctggaatttgttttcgtctgttcagtagactccgattccagaatatgttggaatttcagactccggaacttttgagaatgccattacaggaactttgcttacataccaagctgttagccccagttaattgtcccattgctgattttcttatgaaagctcctgaacctccaccagctttaattgtaagaaatgctgtacaaatgcttaagacaatagatgcaatggatacatgggaagatctgactgaacttgggtatcatttggctgacttgccagtagaaccacatcttggtaaaatggtcttgtgtgctgttgttttaaagtgtctggaccccatccttacaattgcttgcacactagcttatcgagatccttttgtactacctactcaggcctctcaaaaacgtgcagctatgctttgtaggaaacgttttactgcaggagctttcagtgaccatatggcacttctcagagcattccaggcctggcaaaaagcacgaagtgatgggtgggagcgagccttttgtgaaaagaattttctttcacaggctactatggaaataatcataggcatgagaacacagttgcttggtcaacttagagcatcaggttttgttagagcacgaggtggtggtgacattcgggacgttaacacaaactctgagaattgggctgtcgttaaagctgcattggtggcaggcatgtatcctaatttagtccacgtggacagagagaatctagtgttgacagggccaaaggagaaaaaagtacgatttcatcctgcttcagttctcagtcagcctcaatataaaaagattcctccagccaatggtcaagctgcagcaattaaggcactgcccacagattggcttatttatgatgaaatgaccagagcccatagaatagctaatattagatgttgttcagcagtgacgcctgtcactatattggtattctgtggaccagctagattggcaagtaatgctcttcaggaaccttcatcctttagagtggatggcattcccaatgacagtagtgatagtgaaatggaggacaaaactacagctaatttggcagccttgaaacttgatgagtggctccatttcacactggagccagaggcagctagtttattgctgcagctcagacagaagtggcatagcttatttttacgccgaatgagagctccatctaaaccttggtctcaagttgatgaagctaccataagagcaattatagctgttttaagcactgaagaacagtctgcaggtttacaacaaccatctgggattggccaaaggccaaggcctatgtcttcagaagagcttcctttggcctcatcttggaggtcaaataatagtaggaaaagttcagcagatactgaattttctgatgagtgtactactgcagaaagagtactgatgaaatctccatctccagcattacacccacctcagaagtacaaagatagaggaattttacatcctaaacgaggtactgaggaccgatcagatcagtcttctctgaaatctacagacagcagtagttacccaagtccttgtgctagtccttctcctccatcctcaggaaagggctcaaaatctccttcgccaagaccaaacatgcctgttcgatacttcataatgaagagtagcaatttgagaaaccttgaaatttctcaacagaagggtatctggtctacaactcctagtaatgaacggaagctaaatcgagccttttgggaaagcagcatagtttacttggtattttctgttcaaggatctggacatttccagggattttctaggatgtcttctgagattggaagggaaaagagtcaggactggggctctgctggactaggaggagtatttaaggtggagtggatacgaaaagaaagccttccctttcaatttgcacaccatttactcaatccatggaatgacaacaagaaagtgcagataagcagggatgggcaggaactagaacctctggttggtgaacagttgctccagttatgggaacgtcttcccttgggagaaaaaaacacaactgattgacactcagaactcttagctgtggaagaacatcatgcctatttataaccactgaatgcactgactttcaaaaactgaggtggggtgtgtgttacgaatgggctttttaacacttttagagtgttgctttagaactaccatcttcatatacaggagaaaggaagcatttaaatttttatagtgattatagagaatgattatatgatgtttgtaatgaataaaatagtagtttcattatttggcacaatagcagtttattttaaacaaacaatttgaagttaaacatttcatttttaaaaacactgaattacagttcttattgatgactttttaatgcagagtaagttgtttaagaaaggcctgaatatatcagaacatctgagcaccattttagaagagtcaactcttaagattatcattagaaaacaaatacgtcaacacctatgaaaagaagcggggaaaacaacaacaaggacaacaacaaaaaaccagtgaaattctacaagtgtcccttttaaaaatagtgtgtgctaactaagggctattcattctgccatttttaacttgagacacatttaagaataaagttggatgttctttttctgtgattatgaaatgcaataaaatctgaataaagggcaaagtttcttcctgatcagattagattaagtgcttagttttattcctaattctgccccttttaacctgatgtgtaccttactctttcctccctctcttcctcccttcctcctctccccgctcctttcctgcatttctccctccctccttccctcgtcacatctcttatatgagcacagtaattatgacctttttgttttggctacaacttgattgaaacaagttcaaaatttaaacaagttcatacaagtttttaaaaattctcaactggtagcttgcttgctgtgcgtcttccaaactaaagcctgcaagcgccacaattctaagtgccgccttccattttttttcagtatgttttcactggcttatgttttcagatatgattttcctttttcgcatatatggtttaataaatgggggataattttttttttgtaaatccgtgcttgtgccaagtctcatatttctttgccatctcagaattatctttttaccaccactgtttataaaatttccttagagactttttgaagggaaaatagagcaacagggaaaaatgaaagaaatgtcttggttactgagctctaaatagacaggtttgatggcacttctcatgatacattttagttattcttataaaagcaaacaggcaaacatgagtgtaaattaaagacaaaaagaaaactctggttttatatttgagaacacgtgaaaaatcatgggtcaacataaaatcttgagaaccttctactttctctgggaaagcattatatagtggtgcattagtttagaaagtcagctatgattttgcctatagttctagttattagctttggggttttcttgtactttaagacatacctgtaaattgaacctatttgaattatattccactgtatgtgtattatggctcttttcctattagagcaacttgtgtttccctgataatgtgtacattttttaggcatgtacttaatagttcacaatgttctaaatttggaaggacttaaaaaaaaaacttgtttaaatttccatctgttttgtaatatctagctctatatgtaaatgatgggtttgttggtatttaaaatgaatacaacttgaatgtaattaaagtgctgttttttggaagcgataaactttaaatatacttattaaaatgaaattctattaagtt

SEQ ID NO: 789 - DNA, 1603 bp, HOMO SAPIENS
gcaccgccggaagtttctgccgcggctttgcggggacgggggagtggtagtgggggctgcagctgccggacccaggcactgacccttgacctccggtggctcccccatctctcaggcgcgatggctacgggcgcggatgtacgggacattctagaactcgggggtccagaaggggatgcagcctctgggaccatcagcaagaaggacattatcaacccggacaagaaaaaatccaagaagtcctctgagacactgactttcaagaggcccgagggcatgcaccgggaagtctatgccttgctctactctgacaagaaggatgcacccccactgctacccagtgacactggccagggataccgtacagtgaaggccaagttgggctccaagaaggtgcggccttggaagtggatgccattcaccaacccggcccgcaaggacggagcaatgttcttccactggcgacgtgcagcggaggagggcaaggactacccctttgccaggttcaataagactgtgcaggtgcctgtgtactcggagcaggagtaccagctttatctccacgatgatgcttggactaaggcagaaactgaccacctctttgacctcagccgccgctttgacctgcgttttgttgttatccatgaccggtatgaccaccagcagttcaagaagcgttctgtggaagacctgaaggagcggtactaccacatctgtgctaagcttgccaacgtgcgggctgtgccaggcacagaccttaagataccagtatttgatgctgggcacgaacgacggcggaaggaacagcttgagcgtctctacaaccggaccccagagcaggtggcagaggaggagtacctgctacaggagctgcgcaagattgaggcccggaagaaggagcgggagaaacgcagccaggacctgcagaagctgatcacagcggcagacaccactgcagagcagcggcgcacggaacgcaaggcccccaaaaagaagctaccccagaaaaaggaggctgagaagccggctgttcctgagactgcaggcatcaagtttccagacttcaagtctgcaggtgtcacgctgcggagccaacggatgaagctgccaagctctgtgggacagaagaagatcaaggccctggaacagatgctgctggagcttggtgtggagctgagcccgacacctacggaggagctggtgcacatgttcaatgagctgcgaagcgacctggtgctgctctacgagctcaagcaggcctgtgccaactgcgagtatgagctgcagatgctgcggcaccgtcatgaggcactggcccgggctggtgtgctagggggccctgccacaccagcatcaggcccaggcccggcctctgctgagccggcagtgactgaacccggacttggtcctgaccccaaggacaccatcattgatgtggtgggcgcacccctcacgcccaattcgagaaagcgacgggagtcggcctccagctcatcttccgtgaagaaagccaagaagccgtgagaggccccacggggtgtgggcgacgctgttatgtaaatagagctgctgagttggaccaggcaaaaaaaaaaaaaaaaaa

SEQ ID NO: 790 - DNA, 2750 bp, HOMO SAPIENS
agctatcccggcgggccgcgcgcgcggccgcgtttgaatggccctgagtgggactcggcccagaagccgagggactctctaggctgccgggcgctggtcgtcagcgccgaggctgggctgaggcgccgcggtaccatgaggcgccggtacttaagagattatggcatcagaaacccacaatgttaaaaaacggaacttttgtaataagattgaggatcatttcattgatcttcctagaaaaaagatctctaatttcactaataagaacatgaaggaggttaagaaatctccaaaacagttggctgcttacataaatagaacagttggacaaactgtgaaaagcccagataaacttcgtaaagtgatctatcgcagaaagaaagttcatcatccctttccaaatccttgttacagaaaaaaacagtcccctggaagtgggggctgtgacatggcaaataaagaaaatgaactggcttgtgcaggccacctgcctgaaaaattacaccatgatagtcgaacatatttggttaactccagtgattctggttcttcacagacagaaagcccatcatcaaaatatagtgggtttttttctgaggtttctcaggaccatgaaacaatggcccaagttttgttcagcaggaatatgagattgaatgtagctttaactttctggagaaagagaagtataagtgaacttgtagcttatttgttgaggatagaagatcttggcgttgtggtagattgccttcctgtgctcaccaattgtttacaggaagaaaaacaatatatctcacttggctgctgtgttgacttgttgcctctagtaaagtcactacttaaaagcaaatttgaagaatatgttatagttggtttaaactggcttcaagcagtcattaaaaggtggtggtcagaactatcatccaaaacagaaattataaatgatggaaatattcaaattttaaaacaacaattaagtggattatgggaacaggaaaaccatcttactttggttccaggatatactggtaatatagctaaggatgtagatgcttatttattacagttacattgagagatttcatctactaaagagcatttggtttttcaaaacatccctgaactgtataatttacaaaaaaaaaaagtctcgtctgagaactgtgaactgtggaagaaatcaaaactattttttcttttaaaaagccacgtaatgaaaccactaatgaaatcccagcaatctgcttcacattgaagtggaaaaatatccaaaaggagcagcttcaatttcattgaggtgaaagtgcactatgaagattgttcacctttgctgcatttgggagttatatggttatttggtaacattaagaactactggattttaatgcaatcctgcataaaaatataatttatactatgtgaaaaaataagacaggacttaccactaggaaccaccaagaccaatcatcattaacttttttaagattgtgttttattaaaaaaaaaaaacacttaaatgtgtgcagctattttcttatgttgaaaagactgaaagtttaaaacatgaaaaaaatcaatattaaacattttttgttcacactgagatactgtgtatgtaaaatgccttaattattaataagccaatgtgttatgataccaatatctgttttaaaaaactaaaaccaaccatgcttctggcatgataaaatcatggaattaaatcaggggtttacattcttgtagagtgttcttgaaacactctctgcaccatttttaaaacttgagaatagttttagtatctctgatattttttgccagaatcatcatgtcatgtatgaatgtgttatccctatctaaggaaaaaggtgaatatgtttttgtatgaatgtttaactggaaatgtccatggacttggctaatttatatttactttttattgtacatagatttctaatatttttcattcctgtatcatttaaacttccttcatttgagtaaattcactaaatatttctattttttgcttttttaaattctgattttatatgaattctaattctttttcactacatatgttttaaagagttacatacagtgatttagaatggtttacagttaatgctgatcttgtattttaaattccaacactttgtgtcactacctcctctaatggttagtatgatatgctagcagactgtatgaggtctttttttaaaataccacttttagtgtcagtgaaccaaattctggaatgtcttaacagctctaaatcttacttgtcttgaaaatgattggggtttaataccactgctggtggttcacacatcatcccatccttaatatgcctgacaggcatctgagcaaaggtttttagtaattgaatttctctgcagtagtccttcaagcacttgaatgtaaacctttagcatttattcgtttaatgactactgatacgaatctcaagcagatttcttgctcttaaaagttatgtttcactgagttctggttttgtgtagctatattttatatagctagatattcctcacagtgaacatgaattgtaataattggttatttccttaagtctttagattataataatttcagattattgcacgtctgtgatttgagaggtgagttatttaagaggccagttttcaggacatgggaatttgaattgtaaacctgttatctctgtgaaacttttaacatgataaaatataacctttctttgtgcttaaaaaaaaaaa

SEQ ID NO: 791 - DNA, 15534 bp, HOMO SAPIENS
ccagccgtgtgtgatgagtggccacaccttgcctcctcttcccgtcccaggcaccaacagcacagagcaggccagtgtacccagagccatggcagccacgctgggagccggcacgccccccaggccccaggccaggagcatagctggggtgtatgtggaggcctcgggccaggcccagagtgtctacgccgccatggagcagggcctcctgcctgctgggctcgggcaggctctgctagaggcccaggcagccactgggggcctggtggacctcgcccggggccagctgctccctgtgtccaaggccctgcagcagggtctggtggggctggagctgaaggagaagctgctggccgctgagcgtgccactacgggctatcctgacccctacggcggtgagaagctggccctctttcaggccatcgggaaggaggttgtggacagggccctggggcagagctggctggaggtccaactggccactgggggcctggtggaccccgcccagggagtgctcgtggcccctgagccagcctgccaccagggcctcctggaccgggagacatggcacaagctgtcagagcttgagcctggcacaggtgacctgcgcttcctcaaccccaacacgctggagcggctgacataccaccagctgctggaaaggtgtgtgcgtgcccccgggtcggggctagccttgctgcccctcaagatcaccttccgctccatgggcggggcggtgagtgcagctgagctgctggaggtgggcatcctggacgagcaggctgtgcagggtctgcgggagggcaggctggccgcagtggacgtgagtgcacgtgccgaggtgcggcgctacctggagggtaccggcagcgtggccggggttgtcctgctgcccgaaggccacaagaagagctttttccaggctgccaccgagcacctgctcccaatgggcaccgcgctgccactcctagaggcccaggctgccacccacaccctggtggaccccatcacaggccagcggctgtgggtagacgaggcagtcagggcgggcctggtcagcccagagctccatgagcagctcctggtggctgagcaggccgtgacagggcaccacgaccccttcagtggctcccaaatcccccttttccaggccatgaagaaggggctagtggacaggccactagcactgcggctcttggatgcccagctggccacaggcgggctggtctgtccagcacgcaggctccggctgcccctggaggccgccctgcgctgcggctgcctggatgaagacactcagcggcagctctcgcaggctggcagcttctcagacggcacgcacggcggcctgcgctatgaacagctgctggccctctgtgtcaccgacccagagaccgggcttgccttcctgccactctcagggggaccccggggaggggagccccagggacccccattcatcaagtacagcactcggcaggccctgagcacggccacagccaccgtctctgtggggaagttccggggccggcccgtgtccctctgggagctgctcttctctgaggccatctcctcagagcagagggcgatgctggcccagcagtaccaggaagggaccctctccgtggagaagctggccgctgagctgagcgccacccttgagcaggctgcagccactgccagggtcaccttttctgggctgagggacaccgtgacaccaggagagctgctgaaagccgagatcatcgaccaggacctgtacgagcggttggagcatggacaggccacagccaaggatgtgggcagcctggcctcggcgcagaggtacctgcagggtacgggctgcattgctggcctgctgctccctggctcccaggaacgcctgagcatctatgaggcccgatgcaaggggctcctccggcccggcactgccctcatccttctggaggcacaagctgccacaggcttcatcatcgacccaaaagcaaacaaggggcactccgttgaggaggcactgagggctgctgtcattgggcctgatgtgttcgcgaagctgctgtcggctgagcgcgctgtcactggctacactgacccctacaccgggcagcagatctccctcttccaggccatgcagaagggcctcatcgtccgggagcacggcatccgcctgctggaggcccagatcgccacgggcggcgtcatcgaccccgtgcacagccaccgcgtgcccgtggacgtggcctaccggcgcggctacttcgatcagatgctgaacttgatcctgttggacccttctgacgacaccaagggcttcttcgaccccaacacgcacgagaacctcacgtacctgcagcttctggagcgctgtgtgcgtgaccccgagacgggcctgtacctcctgccactcagcagcacgcagtccccgctggtggacagtgccacccagcaggccttccagaacctgctgctctccgtgaagtatggacggtttcaggggcagagggtctccgcgtgggagctgatcaactctgagtacttcagcgagggccgcaggaggcagctgctgcgtcgctaccggcagcgcgaggtcacgctggggcaggtggcaaagctgctggaggcggagacgcagagacaggcggacatcatgctgcccgcactgcggagccgggtcaccgtccaccagctcctggaggccggtatcattgaccagcagctgttggaccaagtgctggccgggacaatcagcccggaggccctcctactcatggacggcgtccgcaggtacctgtgcggcctgggagctgtgggcggtgtgcggctgctgccctctggccagcggctcagcctctaccaggccatgaggcagaagctgctggggcccagggtggccctggccctgctggaggcccaggcggccaccggaaccatcatggaccctcacagcccagagagcctctcggtggatgaggccgtgcgcaggggtgtggtggggccggagctgtatggcaggctgaagcgggctgagggtgccattgctggcttcagagaccccttctctgggaagcaggtgtctgtgttccaggccatgaagaaaggtctcatcccttgggagcaagctgcccgcctcctggaggctcaagtggccacaggagggatcattgaccccaccagccaccaccacctccccatgccagtggccattcagcgtggctatgttgaccaggagatggagacagccttgtccagctcctccgagaccttccccacaccggacggccaggggcgcacgagctatgcccagctcctggaggagtgccccagggatgagacttctggccttcacctcctgcccctgccagaaagtgctcctgccctccccaccgaggagcaggtccagaggagcctgcaggccgtgccgggggccaaggatggcacatccctctgggacctgctcagctcctgccacttcaccgaggagcaacggaggggcctgctggaggacgtgcaggaggggaggaccactgtgccacagctgctagcctctgtgcagaggtgggtacaggagaccaagcttctggcccaggcccgcgtcatggtgcccggcccacggggtgaggtacccgctgtctggctgctggatgctggcatcatcacccaggagacccttgaggccctggctcagggcacgcagtcgcccgcccaggtcgccgagcagccggcggtgaaggcctgcctgtggggcacaggctgcgtggccggtgtgctgctacagccctctggggccaaggccagcatcgcccaggccgtgagggatggcctcctgcccacaggcctgggccagaggctgctggaagcccaggtggcatctggcttccttgttgaccccctgaacaaccagagactgtcagtggaggacgcggttaaggtcggcctggtgggcagggagctgagtgagcagctcgggcaggccgagagggcggcggccgggtacccagatccctactctagggcctccctctctctgtggcaggccatggagaaggggctcgtgccacagaacgagggcttgcccctcctgcaggtgcagctggccacagggggtgtggtggaccctgtccacggggtgcacctgccccaggcggcagcctgcagactcggccttctggacacacagacgagccaggtgctgactgcagttgacaaggacaacaagttcttctttgaccccagtgcgcgggaccaggtgacctaccagcagctcagggagcgctgcgtgtgcgactccgagaccggattgttgctgttgccactgccttcagacacagtgcttgaggtggacgaccacaccgcggtggctctgagggccatgaaggtgcccgtcagcacagggaggtttaaggggtgtagcgtgtcactctgggacctgctgctctccgaatacgttggcgctgacaagcggcgggagctggtggcactctgtcggtctgggagggctgcggccctgcggcaggtggtcagcgcagtcaccgccctggtcgaggctgcagagaggcagcccctgcaggccaccttcagagggctccggaagcaggtgtcagccagggacctgttcagggcgcagctgatcagcaggaagacgctggacgagctgagccaggggacaacgactgtgaaggaggtggcggagatggacagcgtgaagcggtccctggagggaggcaacttcattgccggggtccttatccagggcacccaggagaggatgagcatcccagaggccctgaggaggcacatcctgcggcctggcacagccctggtgctgctggaggcacaggcagctaccggcttcatcatcgaccccgcggagaaccggaagctgaccgtggaggaggcgttcaaagcaggaatgttcgggaaagaaacctacgtgaagctgctgtcggccgagcgcgccgtcaccggctacaccgacccctataccgggcagcagatctccctcttccaggccatgcagaaggacctcatcgtccgggagcacggcatccgcctgctggaggcccagatcgccacgggcggcatcatcgaccccgtgcacagccaccgcgtgcccgtggacgtggcctaccgctgcggctacttcgacgaggagatgaaccgcatcctggcggaccccagcgacgacaccaagggcttcttcgaccccaacacgcacgagaacctcacgtacctgcagcttctggagcgctgtgtggaggaccccgagacgggcctgtacctgctacaaatcataaagaaaggagaaaactacgtgtacatcaatgaggccacgagacacgtgttgcaatccagaactgcaaaaatgcgcgtggggaggtttgctgaccaggtggtctctttctgggacctgctgtcctctccatacttcacagaggacaggaagcgggagctcatccaggagtatggagcccagagtgggggcctggagaaattgctggaaatcatcaccacgacaattgaagaaacagagacgcaaaaccaaggcatcaaagtggcggccatcagaggggaggtgacagctgcagacctgttcaactccagggtcatcgatcagaagaccctgcacacacttcgtgtggggaggactgggggacaggcactcagcacgctggagtgtgtgaagccctatctggaaggcagcgactgcattgcgggggtcacggtgccctccaccagggaggtcatgagcctccatgaggccagcaggaaggagctcatccctgcagcatttgcgacttggctgctggaggcgcaggccgccaccgggttcctcctggacccctgcacccgccagaagctctctgtggatgaggctgtggatgtgggcctggtgaacgaggagctgcgggagaggctcctgaaggctgaaagagctgccacgggctacagggatccggccacaggagacacgatcccgctgttccaggccatgcagaagcagctcatcgagaaggcggaggcactgaggctgctggaggtgcaggtggccacggggggtgtcatcgacccacagcaccaccaccggctcccactggaaacagcctacagacggggctgtctgcacaaggacatctatgcgctcatttccgaccagaagcacatgaggaaacggtttgtggacccgaacacgcaagagaaggtctcgtaccgagagctgcaggagaggtgccgcccacaagaggacacgggctgggtgctgttcccagtgaacaaggctgcacgggactccgagcacatcgatgacgagacgagaagggccctggaggcagagcaagtggaaatcacagtgggaaggttcagaggccagaaaccaacactgtgggcactactgaattccgaatacgtgacagaggagaagaagctccagctggtgaggatgtatagaacacacaccagacgggcactgcagacggtagcgcagctcatcttagagttgatcgagaagcaggaaaccagcaacaaacacctgtggttccaaggaattagacgacagatcacagcttctgaactcctcagctcagccataatcacggaggaaatgctccaggacctggaaacgggacggagcacgacgcaagagctcatggaggacgaccgcgtcaagcgctacctggagggcaccagctgcatcgcgggcgtcctggtgcccgccaaggaccagcccggccgccaggagaagatgagcatctaccaggccatgtggaagggcgtgctgcggcccggcacggccctggtgctgctggaggcgcaggcggccaccggcttcgtcatcgaccccgtgcgcaacctgaggctgtcggtggaggagcccgtgcccgcgggcgtggtgggcagcgagatccaggagaagctgctgtcggccgagcgcgccgtcaccggctacaccgacccctacaccgggcagcagatctccctcttccaggccatgcagaaggacctcatcgtccgggagcacggcatccgcctgctggaggcccagatcgccacgggcggcgtcatcgaccccgtgcacagccaccgcgtgcccgtggacgtggcctaccggcgcggctacttcgacgaggagatgaaccgtgtcctggccgaccccagcgacgacaccaagggtttcttcgaccccaacacgcacgagaacctcacgtacgtgcagctgctgcgccgctgcgtgcccgacccggacaccgggctctacatgctgcagctggcaggccggggctccgccgtgcaccagctgagcgaggagctgcgctgtgccctgcgcgacgcccgcgtgacgccaggctcgggcgccctccagggccagagcgtctccgtctgggagctcctcttctaccgcgaggtgtccgaggaccggcgccaggacctgctgagcagataccgggcgggcacgctgaccgtggaggagctgggcgccaccctcacctcgctgctggcccaggcccaggcccaggcccgggccgaggccgaggccgggagcccgcgcccagacccccgggaggccctgcgtgcggccaccatggaggtcaaggtgggccgcctccgggggcgcgcggtgcccgtgtgggacgtgctggcgtccggctacgtgagcagggccgcccgggaggagctgctggccgagtttggctcggggaccctggacttgcccgcgctgacccgccggctgaccgccatcatcgaggaggccgaggaagcccccggggcccggccgcagctccaggacgccaggcgcggcccgcgggagccagggccagccgggcgaggggacggcgactcggggcgctcccagcgagagggccagggggagggcgagacccaggaggccgccgccgccgccgccgccgcccgccgccaggagcagaccctgcgtgatgccaccatggaggtgcagcgcgggcagttccaggggcggccggtctccgtgtgggacgtcctcttctcctcgtacctgagcgaggcccgccgagacgagctcctggcccagcacgcggccggcgccctgggcctgcccgacctcgtcgccgtcctcacccgggtcatcgaggagacggaggagcggctcagcaaggtgtccttccgcggcctgaggcgccaggtgtccgcctccgagctgcacacgtccgggatcctgggccccgagaccctgcgggacctggcccagggcactaagacgctgcaggaggtgacggagatggactcggtcaagcgctacctggagggcaccagctgcatcgcgggcgtcctggtgcccgccaaggaccagcccggccgccaggagaagatgagcatctaccaggccatgtggaagggcgtgctgcggcccggcacggccctggtgctgctggaggcgcaggcggccaccggcttcgtcatcgaccccgtgcgcaacctgaggctgtcggtggaggaggccgtggccgcgggcgtggtgggcggcgagatccaggagaagctgctgtcggccgagcgcgccgtcaccggctacaccgacccctacaccgggcagcagatctccctcttccaggccatgcagaaggacctcatcgtccgggagcacggcatccgcctgctggaggcccagatcgccacgggcggcgtcatcgaccccgtgcacagccaccgcgtgcccgtggacgtggcctaccggcgcggctacttcgacgaggagatgaaccgtgtcctggccgaccccagcgacgacaccaagggtttcttcgaccccaacacgcacgagaacctcacgtacgtgcagctgctgcgccgctgcgtgcccgacccggacaccgggctctacatgctgcagctggcaggccggggctccgccgtgcaccagctgagcgaggagctgcgctgtgccctgcgcgacgcccgcgtgacgccaggctcgggcgccctccagggccagagcgtctccgtctgggagctcctcttctaccgcgaggtgtccgaggaccggcgccaggacctgctgagcagataccgggcgggcacgctgaccgtggaggagctgggcgccaccctcacctcgctgctggcccaggcccaggcccaggcccgggccgaggccgaggccgggagcccgcgcccagacccccgggaggccctgcgtgcggccaccatggaggtcaaggtgggccgcctccgggggcgcgcggtgcccgtgtgggacgtgctggcgtccggctacgtgagcggggccgcccgggaggagctgctggccgagtttggctcggggaccctggacttgcccgcgctgacccgccggctgaccgccatcatcgaggaggccgaggaggcccccggggcccggccgcagctccaggacgcctggcgcggcccgcgggagccagggccagccgggcgaggggacggcgactcggggcgctcccagcgagagggccagggggagggcgagacccaggaggccgccgccgccgccgccgccgcccgccgccaggagcagaccctgcgtgatgccaccatggaggtgcagcgcgggcagttccaggggcggccggtctccgtgtgggacgtcctcttctcctcgtacctgagcgaggcccgccgagacgagctcctggcccagcacgcggccggcgccctgggcctgcccgacctcgtcgccgtcctcacccgggtcatcgaggagacggaggagcggctcagcaaggtgtccttccgcggcctgaggcgccaggtgtccgcctccgagctgcacacgtccgggatcctgggccccgagaccctgcgggacctggcccagggcactaagacgctgcaggaggtgacggagatggactcggtcaagcgctacctggagggcaccagctgcatcgcgggcgtcctggtgcccgccaaggaccagcccggccgccaggagaagatgagcatctaccaggccatgtggaagggcgtgctgcggcccggcacggccctggtgctgctggaggcgcaggcggccaccggcttcgtcatcgaccccgtgcgcaacctgaggctgtcggtggaggaggccgtggccgcgggcgtggtgggcggcgagatccaggagaagctgctgtcggccgagcgcgccgtcaccggctacaccgacccctacaccgggcagcagatctccctcttccaggccatgcagaaggacctcatcgtccgggagcacggcatccgcctgctggaggcccagatcgccacgggcggcgtcatcgaccccgtgcacagccaccgcgtgcccgtggacgtggcctaccggcgcggctacttcgacgaggagatgaaccgtgtcctggccgaccccagcgacgacaccaagggtttcttcgaccccaacacgcacgagaacctcacgtacgtgcagctgctgcgccgctgcgtgcccgacccggacaccgggctctacatgctgcagctggcaggccggggctccgccgtgcaccagctgagcgaggagctgcgctgtgccctgcgcgacgcccgcgtgacgccaggctcgggcgccctccagggccagagcgtctccgtctgggagctcctcttctaccgcgaggtgtccgaggaccggcgccaggacctgctgagcagataccgggcgggcacgctgaccgtggaggagctgggcgccaccctcacctcgctgctggcccaggcccaggcccaggcccgggccgaggccgaggccgggagcccgcgcccagacccccgggaggccctgcgtgcggccaccatggaggtcaaggtgggccgcctccgggggcgcgcggtgcccgtgtgggacgtgctggcgtccggctacgtgagcggggccgcccgggaggagctgctggccgagtttggctcggggaccctggacttgcccgcgctgacccgccggctgaccgccatcatcgaggaggccgaggaggcccccggggcccggccgcagctccaggacgcctggcgcggcccgcgggagccagggccagccgggcgaggggacggcgactcggggcgctcccagcgagagggccagggggagggcgagacccaggaggccgccgccgccgccgccgccgcccgccgccaggagcagaccctgcgtgatgccaccatggaggtgcagcgcgggcagttccaggggcggccggtctccgtgtgggacgtcctcttctcctcgtacctgagcgaggcccgccgagacgagctcctggcccagcacgcggccggcgccctgggcctgcccgacctcgtcgccgtcctcacccgggtcatcgaggagacggaggagcggctcagcaaggtgtccttccgcggcctgaggcgccaggtgtccgcctccgagctgcacacgtccgggatcctgggccccgagaccctgcgggacctggcccagggcactaagacgctgcaggaggtgacggagatggactcggtcaagcgctacctggagggcaccagctgcatcgcgggcgtcctggtgcccgccaaggaccagcccggccgccaggagaagatgagcatctaccaggccatgtggaagggcgtgctgcggcccggcacggccctggtgctgctggaggcgcaggcggccaccggcttcgtcatcgaccccgtgcgcaacctgaggctgtcggtggaggaggccgtggccgcgggcgtggtgggcggcgagatccaggagaagctgctgtcggccgagcgcgccgtcaccggctacaccgacccctacaccgggcagcagatctccctcttccaggccatgcagaaggacctcatcgtccgggagcacggcatccgcctgctggaggcccagatcgccacgggcggcgtcatcgaccccgtgcacagccaccgcgtgcccgtggacgtggcctaccggcgcggctacttcgacgaggagatgaaccgtgtcctggccgaccccagcgacgacaccaagggcttcttcgaccccaacacgcacgagaacctcacgtacgtgcagctgctgcgccgctgcgtgcccgacccggacaccgggctctacatgctgcagctggcaggccggggctccgccgtgcaccagctgagcgaggagctgcgctgtgccctgcgcgacgcccgcgtgacgccaggctcgggcgccctccagggccagagcgtctccgtctgggagctcctcttctaccgcgaggtgtccgaggaccggcgccaggacctgctgagcagataccgggcgagcacgctgaccgtggaggagctgggcgccaccctcacctcgctgctggcccaggcccaggcccaggcccgggccgaggccgaggccgggagcccgcgcccagacccccgggaggccctgcgtgcggccaccatggaggtcaaggtgggccgcctccgggggcgcgcggtgcccgtgtgggacgtgctggcgtccggctacgtgagcagggccgcccgggaggagctgctggccgagtttggctcggggaccctggacttgcccgcgctgacccgccggctgaccgccatcatcgaggaggccgaggaggcccccggggcccggccgcagctccaggacgcctggcgcggcccgcgggagccagggccagccgggcgaggggacggcgactcggggcgctcccagcgagagggccagggggagggcgagacccaggaggccgccgccgccaccgccgccgcccgccgccaggagcagaccctgcgtgatgccaccatggaggtgcagcgcgggcagttccaggggcggccggtctccgtgtgggacgtcctcttctcctcgtacctgagcgaggcccgccgagacgagctcctggcccagcacgcggccggcgccctgggcctgcccgacctcgtcgccgtcctcacccgggtcatcgaggagacggaggagcggctcagcaaggtgtccttccgcggcctgaggcgccaggtgtccgcctccgagctgcacacgtccgggatcctgggccccgagaccctgcgggacctggcccagggcactaagacgctgcaggaggtgacggagatggactcggtcaagcgctacctggagggcaccagctgcatcgcgggcgtcctggtgcccgccaaggaccagcccggccgccaggagaagatgagcatctaccaggccatgtggaagggcgtgctgcggcccggcacggccctggtgctgctggaggcgcaggcggccaccggcttcgtcatcgaccccgtgcgcaacctgaggctgtcggtggaggaggccgtggccgcgggcgtggtgggcggcgagatccaggagaagctgctgtcggccgagcgcgccgtcaccggctacaccgacccctacaccgggcagcagatctccctcttccaggccatgcagaaggacctcatcgtccgggagcacggcatccgcctgctggaggcccagatcgccacgggcggcgtcatcgaccccgtgcacagccaccgcgtgcccgtggacgtggcctaccggcgcggctacttcgacgaggagatgaaccgtgtcctggccgaccccagcgacgacaccaagggcttcttcgaccccaacacgcacgagaacctcacgtacgtgcagctgctgcgccgctgcgtgcccgacccggacaccgggctctacatgctgcagctggcaggccggggctccgccgtgcaccagctgagcgaggagctgcgctgtgccctgcgcgacgcccgcgtgacgccaggctcgggcgccctccagggccagagcgtctccgtctgggagctcctcttctaccgcgaggtgtccgaggaccggcgccaggacctgctgagcagataccgggcgggcacgctgaccgtggaggagctgggcgccaccctcacctcgctgctggcccaggcccaggcccaggcccgggccgaggccgaggccgggagcccgcgcccagacccccgggaggccctgcgtgcggccaccatggaggtcaaggtgggccgcctccgggggcgcgcggtgcccgtgtgggacgtgctggcgtccggctacgtgagcggggccgcccgggaggagctgctggccgagtttggctcggggaccctggacttgcccgcgctgacccgccggctgaccgccatcatcgaggaggccgaggaggcccccggggcccggccgcagctccaggacgcctggcgcggcccgcgggagccagggccagccgggcgaggggacggcgactcggggcgctcccagcgagagggccagggggagggcgagacccaggaggccgccgccgccgccgccgccgcccgccgccaggagcagaccctgcgtgatgccaccatggaggtgcagcgcgggcagttccaggggcggccggtctccgtgtgggacgtcctcttctcctcgtacctgagcgaggcccgccgagacgagctcctggcccagcacgcggccggcgccctgggcctgcccgacctcgtcgccgtcctcacccgggtcatcgaggagacggaggagcggctcagcaaggtgtccttccgcggcctgaggcgccaggtgtccgcctccgagctgcacacgtccgggatcctgggccccgagaccctgcgggacctggcccagggcactaagacgctgcaggaggtgacggagatggactcggtcaagcgctacctggagggcaccagctgcatcgcgggcgtcctggtgcccgccaaggaccagcccggccgccaggagaagatgagcatctaccaggccatgtggaagggcgtgctgcggcccggcacggccctggtgctgctggaggcgcaggcggccaccggcttcgtcatcgaccccgtgcgcaacctgaggctgtcggtggaggaggccgtggccgcgggcgtggtgggcggcgagatccaggagaagctgctgtcggccgagcgcgccgtcaccggctacaccgacccctacaccgggcagcagatctccctcttccaggccatgcagaaggacctcatcgtccgggagcacggcatccgcctgctggaggcccagatcgccacgggcggcgtcatcgaccccgtgcacagccaccgcgtgcccgtggacgtggcctaccggcgcggctacttcgacgaggagatgaaccgcgtcctggccgaccccagcgacgacaccaagggcttcttcgaccccaacacgcacgagaacctcacgtacctgcagcttctgcagagggccaccctggaccctgagacggggctcctatttctttctctctctctacagtgactgggcttcctccgtgcagttttctgcaactctggagaagttgaggcatacttgtgtgtctgggttgtttttttttttttttgtcattctttaattttgttgttttacccattcgttatctgtggaaaacgttttaagttgtcatgtgacagaaacttttcctttgtccatcgaggtgtttcataagttttttggtgtgttttctgggtcgtctatgtgtcatatggttttacttttctcccggaatt

SEQ ID NO: 792 - DNA, 345 bp, HOMO SAPIENS
gcggcccgggaatctacgtcacccgaaaagcgactataaacgccggcgcctccgtccccagccgcggctcgggaatccacccgaagagtggctataaacgtccgcgcctccattgcgctctcctcttcacttaggacactggtcctcccacgcctgacaccgacgtcgccaggaccgcggggttgggggaacttggctgtcccacgtctttcaaataaagctgttttgtctaaaaaaaaaaaaaaaaaaaaaaaaaaaaaaaaaaaaaaaaaaaaaaaaaaaaaaaaaaaaaaaaaaaaaaaaaaaaaaaaaaaaaaaaaaaaaaaaaaaaaaaaaaaaaaaaaa

SEQ ID NO: 793 - DNA, 391 bp, HOMO SAPIENS
gtagaacgcacaagtgtctgttatagaaatacttgagagtcctatatgcactgttatccacaaccatttaagcacttatccactaatccctaataagtacccctaataagtacatttctaaaccagttattcaagctacatcctcccaagattggactttgtttctactttggtagggacataaataaacggaaacaactgacctaactttttactaaagagataataaagggaataaaattaagattacatttggattttaacttgtgttcttattcctactgccagcaaaaatatgtgaagtgtttttatcattataaatgaatatactattcattgtgcagattttgacatgttcataaataagttagtacccaatgtttgcttgata

SEQ ID NO: 794 - DNA, 5121 bp, HOMO SAPIENS
acaaaggcgcccgcccgccgcccgccgcccgcgcccgcgccgccgccatgaagccggggccgccgcaccgtgccggggccgcccacggggccggcgccggggccggggccgcggccgggcccggggcccgcgggctgctcctgccaccgctgctgctgctgctgctggcggggcgcgccgcgggggcccagcgctggcgcagtgagaacttcgagagacccgtggacctggagggctctggggatgatgactcctttcccgatgatgaactggatgacctctactcggggtcgggctcgggctacttcgagcaggagtcgggcattgagacagccatgcgcttcagcccagatgtagccctggcggtgtccaccacacctgcggtgctgcccaccacgaacatccagcctgtgggcacaccatttgaagagctcccctctgagcgccccaccctggagccagccaccagccccctggtggtgacagaagtcccggaagagcccagccagagagccaccaccgtctccactaccatggctaccactgctgccacaagcacaggggacccgactgtggccacagtgcctgccacagtggccaccgccacccccagcacccctgcagcacccccttttacggccaccactgctgttataaggaccactggcgtacggaggcttctgcctctcccactgaccacagtggctacggcacgggccactacccccgaggcgccctccccgcccaccacggcggctgtcttggacaccgaggccccaacacccaggctggtcagcacagctacctcccggccaagagcccttcccaggccggccaccacccaggagcctgacatccctgagaggagcaccctgcccctggggaccactgcccctggacccacagaggtggctcagaccccaactccagagaccttcctgaccacaatccgggatgagccagaggttccggtgagtggggggcccagtggagacttcgagctgccagaagaagagaccacacaaccagacacagccaatgaggtggtagctgtgggaggggctgcggccaaggcatcatctccacctgggacactgcccaagggtgcccgcccgggccctggcctcctggacaatgccatcgactcgggcagctcagctgctcagctgcctcagaagagtatcctggagcggaaggaggtgctcgtagctgtgattgtgggcggggtggtgggcgccctctttgctgccttcttggtcacactgctcatctatcgtatgaagaaaaaggatgagggcagctacacgctggaggaacccaagcaggcgagcgtcacataccagaagcctgacaagcaggaggagttctatgcctagtggagccacagtgcctccctgcagcctcaacaccaccctgctgtccagtccccagcctggccccaccagcccaagcctgggactgggcctggaacctggccccagttcttctctgccctctctcccaaggtctgcccaggctgccagcctcacacagatcttccccgaggaagaggggctgctgccatctgccccagactgtgcccttacgagctcatctcttgttcccctcatccctgccaccagtctggggcttcaggacctcatgtcagatggatgggaggaagaaagctcctgattggctggtggtggaagaaagggtggggcttgagatgagcctgagccctgacttggcacccacagtgctcactgagatctcctttttggggcagagaggcactcaggctggtttccaggacaaacatttggtaaacacagcccttgaaatcatctagacactgcaacctcttgctcgtatcccagggcctctctctagctgggtgagagggtgtcccttgtcaccagcctgttttgtcctggtctctctggggttgttgaatctctcctcttgcctgccaagtacacatgtacccagacttcatttctttctgcatcttcccccaagaaacagcttcctgagggtgctggggcagccactggtgaggaggggctgctctgatgtccctcctatgaggggactctgcacagacaccattgcccacactatcaccatattttcactcagtcacacacaagacaaaagcatgcaatgacaaaaccatacgcaatcctgaccgcccagccaatcaagacatatcacagaacacacgcgtccttccaagaatgtttatcctcatgcatcacttacacacccccagacacgtactgcaatgcaagtcactagtcatggtcacatgacagtgacagtgtggcctcctcctaccccaaatacacccacactctggcaccacacacattgtctccagctttcaggcttactggggagggtggaatcgagccagaacaatcagcccatattgggtccccctaagttgccccgtcatactcagtcccatgccatggtgcccacaccaaccatgcagccgccaaccccagccagtgtcagacacaatcccatgtggatgcacagtctcactccacatgacctgctctcaatgctggagggaaacaggcaggcccttgcctttctcggaaaaagtgtggggccacagcccttttagggcattgcatgcaggtgggcctggcttcacccctacctgcttcctccccaccgcagctggcagagggggaggtttggggccagacccccactagctgggagcctgggggctcctctaaggctgaggaaggaaatttggccccaggttgttggggggtcttgggtctcccaggacggaaggcccagggcagggagggggcatgtggttgggctcctttatctccctgtgtccccttcctgctttgagctagggggctgactctgcctcccaggacacaagtctccaaagtgcctgtgagggcgggccctccgcaccctctgccctctgcctggcaggccaacctcagcccacctgcccagaggccctccctgtggacaccccctcacctatttggccaaacaattctggctgcagcttcaggggccatggctggaagcagcccctgcagatccctcaggccccgaggtcagggtttgagggatgagaccaggtgatagtgggggaggggttacttcctttgttacctagcaagtagggctatttccatcggtattttaaatgtggggtcacagatcttttggggagggtgtgcttggcagggggcctcttggagccaaagggatgtggtgtgagttgcgattggctggcactcacacccccacccctcacccacatcccagattcaagtcaggaaggcaggttttatttcagggcccttttcaagatgccctggcagcagatttctgcaggatgaggggtagcggtgtgtaggcagtgagggggaggttccaggggctgtcccacagcctgtcttttccaggctgggctccatcttccagtcccaaaaccctccttcacagggcccagaggcttgtgaggaagccaggtggacccagccttagaagagtgggcatggggggcccctgatatctggagggggcgggttggcctcagtcatctttggagcagaagggctgggtcctggggccacagaccacaaggctcagcctccctaccctgctccctggggtgctgctgtcttggagagcacagctctggtgagacggcctgggcaggccgaggctgagaaaccagggaggatagaggagaaaagggcttgggcccccagccccagaagatgctggaccccaggtgggagacccaacagtgggtgcagtttctcagtagggctggagccaatggtgggggtggccccggcaggcctggctcctcacatcccaggggttggcttctgatttggggcttgggctccaggcactggcttctcttctctgtgtccttagcatttgagagaagaggccaggggccttgttcatggatccctggacccaaggcagatgtccaggctttatcctcctgaggatgaggagtctgaccagcccaaatctgccctggccggcctgaccggggcaaggcagtccaagagagttcagtgaggaccagctaggctctcccaggtgcaatgtgggtgcagggccctcatgtccccctacccctgcctgtgatggagtgttctgaggggctttggcatttgctggaagcacagggagttccaaatgagagggagcttctgtggcttgagagcctctggggccttggctgccagagcacgaggcaggccaggacctggagagcccagaccctgtctccaggaggccaggaggccagatgggggccttgcctgaaagactggtccccttgatcgctggaggcatgtgggtggcaaccagggctgggcagggcttagggtgtgtgggccaaacccccctggggttggcaaagccgcctgtcaggcctcctggtgggggcccctggacacagggagcagaccctctgcctcatggggtaggagtggctgcctcctgtgttctctggatttcttctcccaacaactacaaccctggacttgcctccccaggcctcttgcctgtaaatagaagcccgcaaactgtacagatttacagaggcatcgagactgggccctgggagttgccatctgagagccgatggccccagcatcccccaggtgcctgcctggcaccacagtgaccctggcctcagcgtggcaaatgcatgtaaatatttttcgtaggcagcgtggctccagagagccccctgaagacagtgtccctccctcctgtgagtcctttctcctgtacagaacctgcctggggtgggtgggggtctgccattccctcccccaggccttccctgccccttctctcccctgtaacctgtttattaaccatacctgtcctgagttcatggccaaaaccttaaataagaaaaacaaaagaaaaagacagtggaaaaaagagaccaaggcgcctgccccactgcgggtactctcctgttccagccttgtgaaggaactggttttgtttttgtttttttttttttttttttttttttgtttgtttgtttttttaacacttcctgtgctgtgcccatttataagaggaaataaaattaagctgaaatga

SEQ ID NO: 795 - DNA, 378 bp, HOMO SAPIENS
tgacatctgcatcaaactccaaagattgcatgagagattacaaggaacaatccaatgtctcctactcctgcccactccaccttcttagcctggctgaaggacgtctggcatatgagagcatgctgcaaatttaagtaactccttgtttcccaaataccaagcattaatcctggtatttgccatgtctagaaactactgctactactatttatgtttcttcaagtaaactttctttttctacctgaatacatgcactgaaaaaggaaagatgctgccaggtgtagtggctcacgcctgtaatcccagcactttgggaggccaaggtgggcggatcacttgaggtcaggagttcagcttggaattaccagcttggccgac

SEQ ID NO: 796 - DNA, 3924 bp, HOMO SAPIENS
gagcgggtagcgcgcgcgagggcgttgggcgccgccgcgaggcggggaagcgcggggccgcggcggtgcgggttctagggcggcggccgtcgccgtcgcagcagcgccccgagcggggagggccgaggaggcccgacgagctggggatggagagtaccgggcccctcactgcctcagagcgcgtgtgcggctctgggcgcgcacagtgacggtgacggcacccctggcccggcagcgccgaggccgcttcgccagacagccagcggccggcggcaggccgggccatgagcggcaggggccgggccgggcctcgctgaccctggctccgcgcggcagcttccccagtttccgctccggtctctcggcatgagagtccgcccgggcccggggctgcggctgccccagacccgccgcacgctggcgcgctccgggcccgcggagccgcggtgctgatacctgcgccgcactgcgccgcccgcccgtccgctgtgtgccccgggggcgcggccatggaggtggtgggtgacttcgagtacagcaagagggatctcgtgggacacggggccttcgccgtggtcttccgggggcggcaccgccagaaaactgattgggaggtagctattaaaagtattaataaaaagaacttgtcaaaatcacaaatactgcttggaaaggaaattaaaatcttaaaggaacttcagcatgaaaatattgtagcactctatgatgttcaggaattacccaactctgtctttttggtgatggagtattgcaatggtggagacctcgcagattatttgcaagcgaaagggactctcagtgaagacacgatcagagtgtttctgcatcagattgctgctgccatgcgaatcctgcacagcaaaggaatcatccacagagatctcaaaccacagaacatcttgctgtcctatgccaatcgcagaaaatcaagtgtcagtggtattcgcatcaaaatagcggattttggttttgctcgttacctacatagtaacatgatggctgcaacactgtgtggatccccgatgtacatggctcctgaggttattatgtctcaacattatgatgctaaggctgacttgtggagcataggaacagtgatataccaatgcctagttggaaaaccaccttttcaggccaatagtcctcaagacttaaggatgttttatgaaaaaaacaggagcttaatgcctagtattcccagagaaacatcaccttatttggctaatctccttttgggtttgcttcagagaaaccaaaaagatagaatggactttgaagcattttttagccatccttttcttgagcaaggtccagtaaaaaaatcttgcccagttccagtgcccatgtattctggttctgtctctggaagctcctgtggcagctctccatcttgtcgttttgcttctccaccatcccttccagatatgcagcatattcaggaagaaaacttatcttccccaccattgggtcctcccaactatctacaagtttccaaagattctgccagtactagtagcaagaactcttcttgtgacacggatgactttgttttggtgccacacaacatctcgtcagaccactcatgtgatatgccagtggggactgctggcagacgtgcttcaaatgaattcttggtgtgtggagggcagtgtcagcctactgtgtcacctcacagcgaaacagcaccaattccagttcctactcaaataaggaattatcagcgcatagagcagaatcttacatctactgccagctcaggcacaaatgtacatggttctccaagatctgcagtggtacgaaggtccaacaccagccccatgggcttcctccggccgggatcatgctccccagtaccagcagacacagcacagacagttggacgaaggctctccactgggtcttctaggccttactcaccttcccctttggttggtaccattcctgagcaattcagtcagtgctgctgtgggcatcctcagggccatgactccaggagtagaaactcctcaggttctccagtgccacaagctcagtccccacagtctctcttatcgggtgctagactgcagagcgcccccaccctcactgacatctatcagaacaagcagaagctcagaaaacagcactctgaccccgtgtgcccatcccatactggggctgggtacagctactcgcctcagcccagtcggcctggcagccttggaacttctcccaccaagcacttggggtcctctccacggagttctgactggttctttaaaactcctttgccaacaatcattggctctcctactaagaccacagctcctttcaaaatccctaaaactcaagcatcttccaacctgttagccttggttactcgtcatgggcctgctgaagaacagtcgaaagatgggaatgagccacgggaatgtgcccattgcctcttagtgcaaggaagtgagaggcagcgggccgagcagcagagcaaggcagtgtttggcagatctgtcagtaccgggaagttatcagatcaacaaggaaagactcctatatgtcgacatcagggcagcacagacagtttaaatacagaacgaccaatggatatagctccggcaggagcctgtggtggtgttctggcacctcctgcaggtacagcagcaagttccaaggctgtcctcttcactgtagggtctcctccacacagtgcggcagcccccacttgtacccacatgttccttcgaacaagaacaacctcagtggggcccagcaactccgggggctctctttgtgccatgagtggccgcgtgtgcgtggggtccccgcctggcccaggcttcggctcttcccctccaggagcagaggcagctcccagcctgagatacgtgccttacggtgcttcaccccccagcctagaggggctcatcacctttgaagcccctgaactgccggaggagacgctgatggagcgggaacacacagacaccttacgccatctgaatgtgatgctgatgttcactgagtgtgtgctggacctgacagccatgaggggaggaaaccctgagctgtgcacatctgctgtgtccttgtaccagatccaggagagtgtggtggtggaccagatcagtcagctgagcaaagactgggggcgggtggagcagctggtgttgtacatgaaagcagcacagctgcttgcggcttctctgcatcttgccaaagcccagatcaagtccgggaaactgagcccatccacagctgtgaaacaagttgtcaagaatctgaacgaacgatataaattctgcatcaccatgtgcaagaaacttacagaaaagctgaatcgattcttctctgacaaacagaggtttattgatgaaatcaacagtgtgactgcagagaaactcatctataattgtgctgtagaaatggttcagtctgcagccctggatgagatgtttcagcagaccgaagatattgtttatcgctatcataaggcagcccttcttttggaaggcctaagtaggattctacaggaccctgcagatattgaaaatgtgcataaatataaatgtagtattgagagaagactgtcggcgctctgccatagcaccgcaaccgtgtgagcagcaggctcatcccgtggaccggtggtgggaacgtgaggaagaggggaaggaaggaagagcttttccatttggtgctccaatgtctcctgctggacccatctgcctagtggaaggcagcaaaatttcaagaaacaggtgaggttgagcagcttggtgcaaccccatggggcctggagttggagctcaacagcaatggatttcagagaccaccctgaaactcccagtaaaaaagacttgggagacatgttaataaactcaagcatttgatcgacccaaaaaaaaaaaaaaaaaaaaaaaaaaa

SEQ ID NO: 797 - DNA, 1854 bp, HOMO SAPIENS
atgtcatcattaccaacttcagatgggtttaaccatcccgcccgttcttcaggacagagtcctgatgttggtaatcctatgagtcttgctcgctctgtctctgcttcagtctgccctatcaagcccagtgactcagatcgcattgaacctaaagctgtgaaggctttgaaggcttcagctgaattccagctaaactctgaaaagaaagaacatctttctttacaagatctttctgatcatgcttcctcagcagaccatgctccaacagaccagagtccagctatgcctatgcagaattcatccgaagaaataactgttgcaggtaatctggagaaatctgctgaaagaagcacccagggcctcaaatttcatctccatacaagacaggaagctagtttatctgtcacatctactaggatgcatgaaccacagatgtttctaggtgaaaaggattggcatccagaaaatcagaacctgagtcaagtgagtgaccctcagcagcacgaagaaccagggaatgaacagtatgaggttgcacaacaaaaagcttcacatgaccaagaatatctttgtaacataggggaccttgagcttcctgaagaaaggcaacagaatcaacacaaaattgttgatttggaagctacgatgaaaggaaatgggctcccacagaatgtggatcctccaagtgcgaagaaaagtattccatcttcagaatgcagtggctgctcaaattcagaaacatttatggaaatcgatacagctcaacagtccctagttactttgcttaattcaacaggcaggcagaatgccaatgtcaagaacattggtgcattggatctcactttagataatcccttgatggaagtagaaacatcaaaatgtaacccttcatctgaaattttgaatgattccatttccactcaggatttacagcccccagaaactaatgttgaaatacctggaacaaataaagaatatggccattactcctctccaagtctctgtggcagttgtcagccttctgtggagtcagcagaagaatcttgcccgtctataacggcagccttgaaagaacttcatgaacttttggttgttagcagtaaaccagcttcagaaaatacatctgaagaagtaatctgtcaatcagaaaccatagctgagggccaaaccagtattaaagacctttctgaaagatggacccaaaatgagcatcttacccagaatgaacagtgtccacaagtctcctttcatcaggccatatctgtatcagtggagacagaaaaattaacaggtacttcatctgacactggaagagaagctgtagaaaatgtaaacttcaggagtctaggtgatggcctgtcaaccgataaggaaggtgtccccaaatctagggaatccataaataagaaccgttctgtcactgtaacctcagctaaaacatccaatcagttacactgcaccttaggtgtagaaatttcacccaaacttttagcaggtgaggaggatgcactcaatcagacttctgagcaaactaagtctttgtcatccaatttcatattggttaaagacttaggtcagggcatacagaattcagtaacagacaggcctgaaaccagagaaaatgtctgtcctgatgcttcgaggccattacttgaatatgaaccacctaccagccatccatcatcaagtcctgccattcttccaccattgatttttcctgccacagatattgaccgcattctccgtgctggctttactttgcaggaagctcttggagctttgcatcgagttggtgggaatgcagaccttgcacttcttgttttgctcgcaaaaaacatcgtagttcctacatga

SEQ ID NO: 798 - DNA, 3714 bp, HOMO SAPIENS
cggacgcgtgggttggattttttccgtggatctatcaattcacaattcgaatttggaagaaagaaggaaaacatgacgtctccagccaaattcaaaaaggataaggagatcatagcagagtacgatactcaggtcaaagagatccgtgctcagctcacagagcagatgaaatgcctggaccagcagtgtgagcttcgggtgcaactgttgcaggacctccaggacttcttccgaaagaaggcagagattgagatggactactcccgcaacctggagaagctggcagaacgcttcctggccaagacacgcagcaccaaggaccagcaattcaagaaggatcagaatgttctctctccagtcaactgctggaatctcctcttaaaccaggtgaagcgggaaagcagggaccataccaccctgagtgacatctacctgaataatatcattcctcgatttgtacaagtcagcgaggactcaggaagactctttaaaaagagtaaagaagtcggccagcagctccaagatgatttgatgaaggtcctgaacgagctctactcggtgatgaagacatatcacatgtacaatgccgacagcatcagtgctcagagcaaactaaaggaggcggagaagcaggaggagaagcaaattggtaaatcggtaaagcaggaggaccggcagaccccacgctcccctgactccacggccaacgttcgcattgaggagaaacatgtccggaggagctcagtgaagaagattgagaagatgaaggagaagcgtcaagccaagtacacggagaataagctgaaggccatcaaagcccggaatgagtacttgctggctttggaggcaaccaatgcatctgtcttcaagtactacatccatgacctatctgaccttattgatcagtgttgtgacttaggctaccatgcaagtctgaaccgggctctacgcaccttcctctctgctgagttaaacctggaacagtcgaagcatgagggtctggatgccatcgagaatgcagtagaaaacctggatgccaccagtgacaagcagcgcctcatggagatgtacaacaacgtcttctgcccccctatgaagtttgagtttcagccccacatgggggatatggcttcccagctctgtgcccagcagcctgtccagagtgagctggtacagagatgccaacaactgcagtctcgcttatccactctaaagattgaaaacgaagaggtaaagaagacaatggaggccaccctgcaaaccatccaggacattgtgactgtcgaggactttgatgtgtctgactgcttccagtacagcaactccatggagtccgtcaagtccacggtctctgaaaccttcatgagcaagcccagcattgctaagaggagagccaaccagcaagagacagagcagttttatttcacaaaaatgaaagagtacctggagggcaggaacctcatcaccaagttacaagccaagcatgaccttctgcagaaaaccctgggagaaagtcagcggacagattgcagtctagccaggcgcagctcaactgtgaggaaacaggactccagccaggcaattcctctggtggtggaaagctgtatccggtttatcagcagacacggactacagcatgaaggaattttccgggtgtcaggatcccaggtggaagtgaatgacatcaaaaatgcctttgagagaggagaggaccccctggctggggaccagaacgaccatgacatggattccatagctggtgtcctgaagctttacttccgggggctggaacaccctctcttccccaaggacatctttcatgacctgatggcctgcgtcacaatggacaacctgcaggagagagctctgcacatccggaaagtcctcctagtcctgcccaaaaccactctgattatcatgagatacctctttgccttcctcaatcatttatcacagttcagtgaagagaacatgatggacccctacaacctcgccatctgcttcgggccctcgctaatgtcagtgccagagggccacgaccaggtgtcctgccaagcccacgtgaatgagctgatcaaaaccatcatcatccagcatgagaacatcttcccaagccccagggagctggagggccctgtctacagcagaggaggaagcatggaggattactgtgatagccctcatggagagactacctcggttgaagactcaacccaggatgtgaccgcagagcaccacacgagcgatgacgaatgtgagcccatcgaggccattgccaagtttgactacgtgggccggacagcccgagagctgtcctttaagaagggagcatccctgctgctttaccagcgggcttccgacgactggtgggaaggccggcacaatggcatcgacggactcatcccccatcagtacatcgtggtccaagacaccgaggacggtgtcgtggagaggtccagccccaagtctgagattgaggtcatttctgagccacctgaagaaaaggtgacagccagagcgggggccagctgtcccagtgggggtcatgtagccgatatttatcttgcaaacatcaacaagtaagctctgcttttcattttctgctcccctgaatgacttgcaacacccagcctcaccctctggcctaacccccatctccattcctgtgctgcacgtagggctcccagctcccccagcctaacagtttgcatgtggtcattgctgctgcaaggcggacagggctgaggatgctgctacaagcctcggggcaggtccaggtctccagctagctgccctcgtgctgtggaagggtgctttactgtgtgttcccgcagtgtctgtccacccagacctttgtggcagtcttacagctaaaactttgaccaaagctttggtcactttatgcaacctggttttgtactgtttctcagaggtgccttcttttttccaatccatactcaaataatagtctttgatgtctgtcttccttgacccgtgttcgtgcaaagattcagagtctgtgtgtggcttctactaggctgatgttacaccaggtgggtttattgagatatcatgtgtctgttcctccccctgtcctgcattcactcctgtggaggaaaggaggccacgatgtccctaaggaaagctttgtcctgagctcttcattcattggctaacccctagctcccttttcttctgccctttcacaccaggagaaataattttccattttgttcctattgctttggccttttgtattattctacccccttagtccctttgcagatccccactcctgctcagcaggctcttacctctgacccccagctttcattgtggctgttagcaacatcctggggtttaaactccacccacgcccgatctggctgtctagagggattctacgcctgcgtgctgccgcctccccaagaggcattcaggttattggagaactaatctcatctcaaggggccagacaccaagtcccaaagcctacagacctctttccgccaggccctgaaacctggccccgtgccagcaggatgacaagccccagggcgctcctgatgaatatggattggagatgatgtacagtttttattcccctctggcttttgaggaatgaaatgatttgcactttgaaaacctgttaaccgtagcctctggacactgagactggaaggagaataaaggatgcttgttgtttttaaacta

SEQ ID NO: 799 - DNA, 3491 bp, HOMO SAPIENS
gctgggctcctcccctggagctgcggccgggagggcgggcggccggggagacggggtggcggctgcagcccgggtagggccaggagacccggtccacgtttgcaaacgcagccgaacgcccaggccgacccgtgccgcccgagcgccgcgctgcgtccgcgccactcttctcgccgccccgatggcgttccggggctggaggcccccgccgccaccgctgctcctgctgctgctctgggtgaccgggcaggcagcgcccgtggcgggcctgggctccgacgcggagctgcagatcgagcggcgcttcgtgcccgacgagtgcccgcgcaccgtgcgcagcggcgacttcgtgcgctaccactacgtggggacgttccccgacggccagaagttcgactccagctatgacagagactccactttcaatgtgtttgtgggaaaaggacagctgatcacagggatggaccaggctcttgttgggatgtgcgtaaacgagagacgtttcgtgaagattcccccaaagcttgcctacggaaatgaaggagtttctggtgtgatcccccccaattcagtgcttcattttgatgtacttctgatggatatttggaattctgaagaccaggttcagattcacacctatttcaagcccccgagttgccctcggaccatccaggtgtctgattttgtgaggtaccactacaacgggacgttcctggacggaactctgtttgattcgagtcacaatcgcatgaaaacatatgacacgtatgtgggaattggctggctgattcctggaatggataaagggctgctggggatgtgtgtgggtgagaagcgcatcatcaccattcctccttttctggcctatggagaggatggagatgggaaagacattcccggtcaggcatctctggtgtttgatgttgcattattggacctccataaccccaaggacagcatttccattgagaacaaggtagtacctgaaaactgtgagcggataagtcaaagtggggactttctcaggtatcattacaatggcacgcttctggatggcaccctctttgattccagctactctcggaaccgcacgtttgacacgtacattgggcagggctacgtgattcctgggatggatgaaggtctacttggtgtttgcattggagaaaagcgaaggattgtggtcccgcctcacctggggtatggagaggaaggaagagggaatatccccggctcggctgtgctggtgtttgacatccatgtgatcgacttccacaacccttcggactccatcagcatcacctcccactacaaaccccctgactgctcagtgctgagtaagaagggagattacctcaaatatcactacaatgcctcacttctggatgggaccctgctggactccacgtggaatttaggcaaaacttacaatattgttctgggatctgggcaagttgtgttggggatggacatgggtctcagagagatgtgcgttggcgagaaacggacagtgatcattccgcctcacctgggctatggggaagctggcgtggatggagaagtgcccggcagtgccgtattagtgtttgacattgagctgctggagctggtggctggccttcctgaggggtacatgttcatatggaatggtgaggtgtcacccaacctctttgaagaaattgacaaggatggcaacggagaagtcctcctggaagagttctcagagtacattcacgcccaggtggcatctggcaaagggaaactcgctcctggctttgatgctgagctgattgtgaagaatatgttcaccaaccaggaccggaatggagatgggaaggtcacagccgaggaatttaaactcaaagaccaggaagccaaacacgatgaactctaaacctggcatgaaccagatggtgccagggagtacgtgacaccaagccacctgtgtggcaagacgtgcagtgagggtgcaagggtctctcagaagttgcatcattagccagtagtaggtgggtcacatagtacctggtgtacacatcggggtgggttgatatatggggtgagaagtttgggctgatcgccagtgatagtaaacaaaatctgtgcagagggccttagcatgggatgtgtccagtattgaaaaggctgcactgccaaccatgatttgtgagccttctgggaaattttgttattaaaggaatatatagtgtcagacggaagttataatcatcttggaggaaccataagaaaaggtgtccagggtatctatataaagagggttaaatttttttttaacttgctggttaaaacattttagaaatattctagagatgggcaggagagtcaaagggcttgcttgccccagcagagttcccagcagacagccatggctcttcccagcagcctgtgcaaattctgatgatggccccacccccgcacacgcacacgcacatcatgcttttccagctcatcacaccccgccccactatgggcctaccattaatagtgtataacttggaggttaaaagagccttttggacagaaaactgggccaggaaaaggcatctcagaccacaaatagagaatttgattcctcatttgccacataagtcatctgcttagcttttcctttcctttttttttttttttttttttctggaggcagagtctccctttgtcgccaggctggagtgcagtggtgccatctcggctcactgcagcactgtctcggctcactgcagcctccgcctcccgtattcaagcgattctcctgtctcagcctcctgagtagctgggactacaggtgtgcaccaccacgcccggctaatttttgtatttttagtagagacggggtttcactgtgttggccaggatggtctcaatctcgacctcgtgatccgcccaccttggcctcccaaagtgttgggattacaggcgtgactcaccatgcccagccacttagttttttcttattcccacctttctatcccatagaacactcttttttatcttccctgaaccatattgatgagataaatagggctgggggctgggccccgctggtcactcaacagagtatttcccttggccgagatggaagttttgtcccaatagatgagctgctgagcatcaacaaggtgacatttttctgctgcccatttgtgtcctggagacggtggtaccctgaaggcagaggccagctgccgcaagacagcaatgacagtccacctgccgacctgattcctgcatcatggaataaccacatggctaccttctatcctctgttcccaaatggtggtggcacttatcctgaagtcgtcaatgatttccctttgaaactactttattttactaatttaaactattttgtactgatgtagccctgaggtagttcatgaaaatgctgtgcactcattccatggaataaatgttggaaagctgatcttttctgatataaaatgttgaatgatattaaaaaaaaaaaaaaaaaa

SEQ ID NO: 800 - DNA, 1623 bp, HOMO SAPIENS
acttccgggatctgtcagccgctccctctgggcttccgtcctccgcccgcgcccgacggagcctgttcgcgtcgactgcccagagtccgcgaatcctccgctccgagcccgtccggactcccccgatcccagctttctctcctttgaaaacactaagaataatgtcactgcatcagtttttactagagccaatcacctgtcatgcctggaacagggatcgtactcagattgccctcagtcccaataatcacgaagtgcacatctataagaagaacgggagccagtgggtgaaagctcatgaactcaaggagcacaacggacacatcacaggtattgactgggctcccaagagcgaccgcattgtcacttgtggggcagaccgcaatgcctatgtctggagtcagaaagatggtgtttggaagccaaccctggtgatcctgagaattaatcgcgcagctacttttgtgaagtggtcccccctagagaacaaatttgctgtgggaagtggagcacgactcatttctgtttgttactttgagtctgaaaatgactggtgggtgagcaagcacattaaaaagccgattcgctccacagtcctcagcttggattggcatcccaacaacgttttgctggcagcaggatcatgtgacttcaaatgcagagtgttttctgcctacattaaagaagtggatgaaaagccagccagcacgccctggggcagcaagatgccttttgggcagctgatgtcagagtttggtggcagtggcactggtggctgggtccacggggtaagcttctctgccagtgggagccgcctggcctgggtcagccacgacagcaccgtgtctgttgctgatgcctcaaaaagtgtgcaggtctcgactctgaagacagagttcctgccgctcctaagtgtgtcatttgtctcagagaacagcgtcgtggctgctggccatgactgctgcccaatgctctttaactacgatgaccgcggctgcctgaccttcgtctccaagttagatattccaaaacagagcatccaacgcaacatgtctgccatggaacgcttccgcaacatggacaagagagccacaactgaggaccgcaacacggccttggagacgctgcaccagaatagcatcactcaagtctctatttatgaggtggacaagcaagattgtcgcaaattttgcactactggcatcgatggagccatgacaatttgggatttcaagaccctcgagtcttccatccagggcctccggataatgtgaagctgagtgagcctccgccatccagcatgacaaactgtggccgaccgcagctgtgccgtggcacgatggcgaggaagccagccccaaggaaacactgaaaacacatatcacgccaatgccgtgtggttttgtttgaatataaaattggtgaaagtgttggtttttttaaggcagtaatttttttgtttgtttttttgcgatttcattccattcttgaccaaagcttctctttaagtagtttattatggaaaattgtcacactaacttaaaagacagggtgagggagatatgtaaattgtccactagaaaattaaataaaagaactgaatgtggaaaaaaaaaaaaaaaa

SEQ ID NO: 801 - DNA, 2953 bp, HOMO SAPIENS
atatagagacgtttccgcctcctgcttgaaactaacccctctttttctccaaaggagtgcttgtggagatcggatcttttctccagcaattgggggaaagaaggctttttctctgaattcgcttagtgtaaccagcggcgtatattttttaggcgccttttcgaaaacctagtagttaatattcatttgtttaaatcttattttatttttaagctcaaactgcttaagaataccttaattccttaaagtgaaataattttttgcaaaggggtttcctcgatttggagctttttttttcttccaccgtcatttctaactcttaaaaccaactcagttccatcatggtgatgttcaagaagatcaagtcttttgaggtggtctttaacgaccctgaaaaggtgtacggcagtggcgagaaggtggctggccgggtgatagtggaggtgtgtgaagttactcgtgtcaaagccgttaggatcctggcttgcggagtggctaaagtgctttggatgcagggatcccagcagtgcaaacagacttcggagtacctgcgctatgaagacacgcttcttctggaagaccagccaacaggtgagaatgagatggtgatcatgagacctggaaacaaatatgagtacaagttcggctttgagcttcctcaggggcctctgggaacatccttcaaaggaaaatatgggtgtgtagactactgggtgaaggcttttcttgaccgcccgagccagccaactcaagagacaaagaaaaactttgaagtagtggatctggtggatgtcaatacccctgatttaatggcacctgtgtctgctaaaaaagaaaagaaagtttcctgcatgttcattcctgatgggcgggtgtctgtctctgctcgaattgacagaaaaggattctgtgaaggtgatgagatttccatccatgctgactttgagaatacatgttcccgaattgtggtccccaaagctgccattgtggcccgccacacttaccttgccaatggccagaccaaggtgctgactcagaagttgtcatcagtcagaggcaatcatattatctcagggacatgcgcatcatggcgtggcaagagccttcgggttcagaagatcaggccttctatcctgggctgcaacatccttcgagttgaatattccttactgatctatgttagcgttcctggatccaagaaggtcatccttgacctgcccctggtaattggcagcagatcaggtctaagcagcagaacatccagcatggccagccgaaccagctctgagatgagttgggtagatctgaacatccctgataccccagaagctcctccctgctatatggatgtcattcctgaagatcaccgattggagagcccaaccactcctctgctagatgacatggatggctctcaagacagccctatctttatgtatgcccctgagttcaagttcatgccaccaccgacttatactgaggtggatccctgcatcctcaacaacaatgtgcagtgagcatgtggaagaaaagaagcagctttacctacttgtttctttttgtctctcttcctggacactcactttttcagagactcaacagtctctgcaatggagtgtgggtccaccttagcctctgacttcctaatgtaggaggtggtcagcaggcaatctcctgggccttaaaggatgcggactcatcctcagccagcgcccatgttgtgatacaggggtgtttgttggatgggtttaaaaataactagaaaaactcaggcccatccattttctcagatctccttgaaaattgaggccttttcgatagtttcgggtcaggtaaaaatggcctcctggcgtaagcttttcaaggttttttggaggctttttgtaaattgtgataggaactttggaccttgaacttatgtatcatgtggagaagagccaatttaacaaactaggaagatgaaaagggaaattgtggccaaaactttgggaaaaggaggttcttaaaatcagtgtttcccctttgtgcacttgtagaaaaaaaagaaaaaccttctagagctgatttgatggacaatggagagagctttccctgtgattataaaaaaggaagctagctgctctacggtcatctttgcttaagagtatactttaacctggcttttaaagcagtagtaactgccccaccaaaggtcttaaaagccatttttggagcctattgcactgtgttctcctactgcaaatattttcatatgggaggatggttttctcttcatgtaagtccttggaattgattctaaggtgatgttcttagcactttaattcctgtcaaattttttgttctccccttctgccatcttaaatgtaagctgaaactggtctactgtgtctctagggttaagccaaaagacaaaaaaaattttactacttttgagattgccccaatgtacagaattatataattctaacgcttaaatcatgtgaaagggttgctgctgtcagccttgcccactgtgacttcaaacccaaggaggaactcttgatcaagatgccgaaccctgtgttcagaacctccaaatactgccatgagaaactagagggcaggtcttcataaaagccctttgaacccccttcctgccctgtgttaggagatagggatattggcccctcactgcagctgccagcacttggtcagtcactctcagccatagcactttgttcactgtcctgtgtcagagcactgagctccacccttttctgagagttattacagccagaaagtgtgggctgaagatggttggtttcatgtttttgtattatgtatctttttgtatggtaaagactatattttgtacttaaccagatatatttttaccccagatggggatattctttgtaaaaaatgaaaataaagtttttttaatggaaaaaaaaaaaaaaaaaaaaaaaaaaaa

SEQ ID NO: 802 - DNA, 8065 bp, HOMO SAPIENS
ggactcatgaagtggcagctaagccctgtccagtggccacccgtcagccaagggccagagaccaggaaaggaagaaaggcagcttcacttcctctttgaggatggagtcgcacagccgcgctggaaagagcagaaaatctgcaaaatttcggtccatctccaggtccctgatgctctgtaatgctaagaccagtgatgatggctctagccctgatgagaaatatcctgatccctttgagatttccttggcccagggcaaggagggaattttccactcatctgtgcagctggcagacacatcggaggctgggcccagcagtgttcctgatctagcactggcctcggaggctgctcaactccaagcagctgggaatgatcgaggcaagacctgtaggaggatattcttcatgaaggaatcttccacagcttcctctcgagaaaagcctggaaaactagaagcacaaagtagtaacttcctgtttcctaaagcctgccaccaaagggcacgcagcaactcaaccagtgttaatccctattgcacaagagaaattgattttccaatgaccaagaaatctgcagcgcccacggacaggcagccttactctctctgcagtaacaggaagtccctctctcaacaattggactgtccagcaggaaaggctgcgggaacttcgagaccaacacggtccctgagcacagctcagctcgtgcagccatctgggggcctccaggcttcagtcatctccaacatcgtgctgatgaagggccaggctaagggtctgggcttcagcatcgttgggggaaaagacagcatttatggccccattgggatttacgtcaaaaccatttttgcagggggagcagcagcagccgatggaaggctacaggaaggtgatgaaattctggagctcaatggtgaatcaatggctggactaacacatcaggatgctttgcagaagttcaagcaagccaaaaaggggctcctcaccctcaccgtgagaacccgcctgacggcgcctccttccctgtgcagccacctgtctcccccactgtgccgctccctgagctccagcacttgtatcaccaaggacagcagctccttcgccttggaaagcccctcggctcccatcagcaccgccaagcccaattacagaatcatggtggaggtttctctgcagaaagaggccggcgtgggcctgggcatcggcctgtgcagcgttccctacttccaatgcatctctggcattttcgtccacacgctgtcaccaggatccgtggcgcacctggacggacgtctccggtgtggggacgagattgtggaaatcagtgattcccctgtgcactgcctgacgctcaatgaagtctacacgatcctgagtcactgtgatcccggtccagtccccatcattgttagccgacatccagacccacaggtctctgaacagcaactcaaagaagctgtggcccaggctgtggaaaacaccaagtttggaaaggagaggcatcagtggagtctggaaggtgtcaaaaggctggaaagcagttggcacgggcggcccaccttggagaaggaacgagagaagaactcagcacccccgcatcgcagggctcagaaggtcatgatccgctccagcagtgacagcagctacatgtctgggtccccagggggaagtcctgggagtggcagtgctgagaagccgtcctctgacgtggacatcagcacacacagccccagcttgcctctggcacgggagccagtggtgctttctatagcatcctccaggctgccccaggagagcccacccctcccagagagccgggacagccacccgccgctgagactgaagaaatcctttgagattttggtgagaaagcctatgtcctccaagcccaagcctccacccagaaaatactttaaaagtgacagtgaccctcagaagagtctggaagagagagagaactcctcatgctcttctgggcacaccccacccacctgtggccaggaagcgagagagctgctgccactgctgctaccacaggaagacacagcagggagaagccctagtgcctctgccggctgcccaggacctggtatcggcccacagaccaagtcctccacagagggcgagccagggtggagaagagccagcccagtgacccaaacatccccgataaaacacccactgcttaagaggcaggctcggatggactatagctttgataccacagccgaagacccttgggttaggatttctgactgcatcaaaaacttatttagccccatcatgagtgagaaccatggccacatgcctctacagcccaatgccagcctgaatgaagaagaagggacacagggccacccagatgggaccccaccaaagctggacaccgccaatggcactcccaaagtttacaagtcagcagacagcagcactgtgaagaaaggtcctcctgtggctcccaagccagcctggtttcgccaaagcttgaaaggtttgaggaatcgtgcttcagacccaagagggctccctgatcctgccttgtccacccagccagcacctgcttccagggagcacctaggatcacacatccgggcctcctcctcctcctcctccatcaggcagagaatcagctcctttgaaacctttggctcctctcaactgcctgacaaaggagcccagagactgagcctccagccctcctctggggaggcagcaaaacctcttgggaagcatgaggaaggacggttttctggactcttggggcgaggggctgcacccactcttgtgccccagcagcctgagcaagtactgtcctcggggtcccctgcagcctccgaggccagagacccaggtgtgtctgagtcccctcccccagggcggcagcccaatcagaaaactctcccccctggcccggacccgctcctaaggctgctgtcaacacaggctgaggaatctcaaggcccagtgctcaagatgcctagccagcgagcacggagcttccccctgaccaggtcccagtcctgtgagacgaagctacttgacgaaaagaccagcaaactctattctatcagcagccaagtgtcatcggctgtcatgaaatccttgctgtgccttccatcttctatctcctgtgcccagactccctgcatccccaaggaaggggcatctccaacatcatcatccaacgaagactcagctgcaaatggttctgctgaaacatctgccttggacacagggttctcgctcaacctttcagagctgagagaatatacagagggtctcacggaagccaaggaagacgatgatggggaccacagttcccttcagtctggtcagtccgttatctccctgctgagctcagaagaattaaaaaaactcatcgaggaggtgaaggttctggatgaagcaacattaaagcaattagacggcatccatgtcaccatcttacacaaggaggaaggtgctggtcttgggttcagcttggcaggaggagcagatctagaaaacaaggtgattacggttcacagagtgtttccaaatgggctggcctcccaggaagggactattcagaagggcaatgaggttctttccatcaacggcaagtctctcaaggggaccacgcaccatgatgccttggccatcctccgccaagctcgagagcccaggcaagctgtgattgtcacaaggaagctgactccagaggccatgcccgacctcaactcctccactgactctgcagcctcagcctctgcagccagtgatgtttctgtagaatctacagcagaggccacagtctgcacggtgacactggagaagatgtcggcagggctgggcttcagcctggaaggagggaagggctccctacacggagacaagcctctcaccattaacaggattttcaaaggagcagcctcagaacaaagtgagacagtccagcctggagatgaaatcttgcagctgggtggcactgccatgcagggcctcacacggtttgaagcctggaacatcatcaaggcactgcctgatggacctgtcacgattgtcatcaggagaaaaagcctccagtccaaggaaaccacagctgctggagactcctaggcaggacatgctgaagccaaagccaataacacacagctaacacacagctcccataaccgctgattctcagggtctctgctgccgccccacccagatgggggaaagcacaggtgggcttcccagtggctgctgcccaggcccagaccttctaggacgccacccagcaaaaggttgttcctaaaataagggcagagtcacacgggggcagctgatacaaattgcagactgtgtaaaaagagagcttaatgataatattgtggtgccacaaataaaatggatttattagaatttcatatgacattcatgcctggcttcgcaaaatgtttcaagtactgtaactgtgtcatgattcacccccaaacagtgacatttatttttctcatgaatctgcaatgtgggcagagattggaatgggcagctcatctctgtcccacttggcatcagctggcgtcatgcaaagtcatgcaaaggctgggaccacgtgagatcattcactcatacatctggccgttgatgttggctgggaactcacctggggctgctggcctgaatgcttataggtggcctctccttgtggcctgggcctcctcacaacatggtgtctggattcccaggatgagcatcccaggatcgcaagagccatgtagaagctgcatcttgtttatacctttgccttggaagttgcatggcatcacctccaccatactccatcagttagagctgacacaaacctgcctgggtttaaggggagaggaaatattgctggggtcatttatgaaaaatacagtttgtcacatgaaacatttgcaaaattgtttttggttggattggagaagtaatcctagggaagggtggtggagccagtaaacagaggagtacaggtgaagcaccaagctcaaagcgtggacaggtgtgccgacagaaggaaccagcgtgtatatgagggtatcaaataaaattgctactacttacctaccacatgccaagcactgtgctcagggctaaacgggcattgcctttagtgatcacagcagcttctacggtgtatggttctgtgccaatgtattgataagagggcacacactgtgtacagtaaatggcttatccagctggtgagtgatgcggcagattgagttttcttctgtgattcggtggagactatcagcccaagatgctttaagtgcacaacattacagggaatgcctgagtgcctggccaaagggatatttggtttggccatctctggatgcctgattgccaagctcaggaccaggcaatgtgactttgcatcagcaacaaccagcatcccttgaccaggcctgggccagagtattggtctcctctcagcccctgatcctgtgaagtaaggatgtgggggaagacctggcaaggacacagatgaaacacaaacaatagtaattctcaggccatcatcagtggagccatgttaatgtaatctgatggcttctccagggtccacaggaagtgaagaatctgtttcccagcagtggactcaaaacccatctgggctcctaaccttcctgtaaacccctttagtggcttcattagagcaggcgttcagctcactgttctattcatctcaaggaataatgggcttagagcagtttctgtcctgctggttaacttgtttggcctattccattctggattttgtcaagcagtagacaagcaattagacaagaacttggaggcaccatttgtatccactttttagacttaatagaaacattgaagatgaacataatctaccaacgaaagacgtgattcaattcaacactcccttcccatgacccaggctgggcaaggaggccacgtgatgtggagggcacattccttgcctgcacaaactcaccatctgtgcacgcagtggccttccctaaaatcagggaattgttttaagtcttatcaagcagccaagggatgaaagagaaggtgggttttcatcaagactggaaggtggggacagggatgagcatggagctggccgtgggcctggggtaccaagagactccttgagagaccaggcaaagcaagtgattgggacagaggttatctgtcccaggttatctgggcatagatgcaggtgagcccatggccctcccagtacctcctgtctctggcctgttttagaaggttctctcctccccaaggagacacaacaactcctagggccactgaagatataactattgcccaggtttctggtctctaggctggggaagtcctctgggtaggaatcagcaagaagatcctaaaacaaaagctcatccatttgcgttccatgatgctgggatttacacttgaggcttagctttgctctgccaacttcttcagagctgacacaggatgaaggcaatgccatcctcaaacactgcaggcatcacagctaacaattgtgaagtcgtcttaactcaccataaaaaggaatccactcccaggcagccctacttctttgctttgcccagcattttactgattcatacattatctcacttgtgccaacactcaagaagcaggctacactgacactggtattcctgcctccatattttctttaaaagacaaatcaaagcagatatattaagtgactgttcaagagcacacttggcccaagtggcagagcttggactggatgcatgttttccagctcctcatccagggctctgaccagtttaacctgatgcagtcacgtggaggagcagtgcaggcacagtatgtcccataggcccagtgagatgcattcttggttggctggccttccacttggctacacagggatgtacaaggcgatcccatcttgataagaccaccacctcagagtatggagctcagagagggcaggcatgaagtttccttggctggtgcacctagaattggctgaactcatgagaagttgatatagaacagtgcttgccacagagcggggactcggtaagcacttaatgaatgaatgaattctaagtcaatccaagagtctgatgatttcttgaaaagggtgttagctaaaggatcttaggcatgactgtagaatttgtagttgcaatagaacagagaaagaggaagctttctgtctccttaacactgagctgtcatgttttaaagcttgctcacatcttggcacatttaagagacagtcaccccaggactcaaaaatagggaagtaacagtaacgcaggggaaacgttttctgtttggaggagcaaaggctgagaacactgtgaaaacattttgcgcgcacaatagtaacctgggtaaatgcagcgtgaagggattttagtcacacgtggtctttcttacaaggaaggtggtgggggtgcagatgaggttgctagagaatgttagaggatccctctctggattggagatagggaaagaaagttgcacggctgctgaggccccttctaggtggcaaggctgtgctccctggttctgatgatgtgcctgggtggacatggcccctgtgagtttgtacagtcttgcagcaggatctagaggggggatttccagccagggctgctagacggaggcctactcttccatctttcctgatggcaggatggcctggccagggcctggaagacagagacctcctgcctccgcctcagtaagacgacaaggaaaggcaaatgcccaagggaaagaaaaggaaggctcttctccccagagttccccatgcagacatgagtgcgtgctcagttcagaatcacttctgagaactcatccctaatgctgcagatttgggctggaacagattcacactgtctggtttcaccgaggacatgaaactccaccttgcggggataaagagagaaaaacaaattcatcaaatggaagacacattgaaagtgtttttccttaatgcttatcctgtttttaaaccattatttccaagttgacaccttttttaaggaaaaataaatattttgcggcattaaagccatata

SEQ ID NO: 803 - DNA, 3108 bp, HOMO SAPIENS; identical to SEQ ID NO: 444

SEQ ID NO: 804 - DNA, 454 bp, HOMO SAPIENS
  misc_feature (103)..(103): n is a, c, g, or t
aagagtaagtcctattatcagttggagaaagcagaatggagtccagccagctaacaatggaaataacatgggatctggtgcagtaatgggaaacggagaaggnaaaaaataaatcccaggcacttaaataagaagtgaaccctgggttatttggcaaaaacaagagaaaatgatagtgtagggtgatagaataaatgtttattacatttcacagtattttcgtaaagtgatttgcagtggacgtgagtctgaaaagtgggagcaaattctaaaacctctgtccttgggactaaaggaaggtaatgtcacagtagttactgaagaggatctaattgagtgtgcataattatatttctgaacaccatatctgaattttacataggagtttcactttggtgatttcagctagtgattttcagtctgtcctgcagaggtggactgggtagctggggga

SEQ ID NO: 805 - DNA, 6329 bp, HOMO SAPIENS
cgcgtccatttgaacgtctcgcacgccttcctgccattagcactcgagcccgctgctgttgcccgttcttcctccagaataggggagggagagggaatgagaagctgctgcggcccaagagtcactgtgaaggaccccgccgctgccctcgggcctcctcggcccctgcgcctccggggagcagccggggctcgccgcgcctgacgcgtcccgagttatacagaaataatgttgatatttggaacccatgtcgaacttctatgaagaaaggacaacgatgattgcagcaagggatttgcaggaatttgttccttttggtcgagaccactgcaagcaccaccctaatgctttgaaccttcaacttcgccagctgcagccagcttctgaattatggtcttctgatggtgctgctggcttggtgggatcccttcaggaggttacaatccacgagaaacagaaggaaagctggcagttaaggaaaggagtaagtgaaattggagaagatgtggactatgatgaggaactctatgttgctggaaatatggtgatatggagcaaaggaagtaaaagccaggcattggcagtttataaagcatttacagttgacagtcctgttcagcaggcattgtggtgtgacttcattatatcacaggataagtctgaaaaggcctacagtagcaatgaagtagaaaaatgcatatgtatattgcaaagctcatgtattaacatgcatagcatagaaggaaaggattacatagcttcattaccatttcaggttgcaaatgtttggcccactaaatatggattgctgtttgaacgaagcgcttcttcacatgaagtacctccaggttcacccagagaacctttacctactatgttcagcatgctgcacccactagatgaaataactccacttgtttgtaaatctggaagtctttttggttcatcacgggtgcaatatgttgtagatcatgcaatgaaaattgttttcctcaatactgacccctctattgtaatgacttatgatgctgttcaaaatgtgcattctgtgtggactctccggagagtcaaatcagaggaagagaatgttgttttaaagttctctgaacaggggggaaccccacagaatgtggccactagcagctccctcacagcacatctcagaagcctctccaaaggagattcccctgtgacttcacctttccagaattactcctccattcacagccagagtcgctcaacctcatcacccagtctacattctcgctcaccttctatttccaacatggcagctctaagtcgtgctcattctcctgcgttaggagtgcactctttttcaggggtgcaaaggttcaacatttcaagccataatcagtctccaaagagacatagtatttctcattctccaaatagtaattctaatggctcctttcttgcaccagaaacggagccaattgttcctgaactgtgtattgaccatttgtggacagaaacgattactaatataagagagaaaaattcacaagcctcaaaagtgtttattacatctgacctatgtgggcaaaagttcctgtgctttttagtagagtcccagctccagttacgctgtgtaaagtttcaagagagtaatgataaaacccagctcatctttggttcagtgaccaacataccagcaaaggatgcagcaccagtggagaaaatagacaccatgctggtcttggaaggcagtggaaacctggtgctatacacaggagtggttcgggtgggaaaggtttttattcctggactgccagctccctctctgacgatgtccaacacaatgcctcggcccagtactccactagatggcgttagtactccaaagcctcttagtaaactccttggatcattggacgaggttgttctgttgtccccagttccagaactgagggattcttcaaaacttcatgattctctctataatgaggattgtactttccaacagcttggaacttacattcattctatcagagatcctgtccataacagagtcaccctggaactgagtaatggctccatggttaggatcactattcctgaaattgccacctctgagttagtacaaacgtgtttgcaagcaattaagtttatcctgccaaaagaaatagcagttcagatgcttgtcaagtggtacaatgtccacagtgctccaggaggacccagttatcactcagagtggaatttatttgtgacttgtctcatgaacatgatgggttataacacagaccgcttagcatggactagaaattttgactttgaaggatcactttctcctgtcattgcgcccaaaaaagcaaggccttccgagactggatctgatgatgactgggaatatttactaaattcagactaccaccagaatgttgagtctcatcttttgaacagatctttatgtctgagtccttcagaagcttcacagatgaaggatgaggatttttcacagaatctcagtctggattcttctacacttctctttactcacatacctgcaatttttttcgttcttcaccttgtgtatgaggagcttaagttgaatactctaatgggagaaggaatttgttcacttgttgaacttctcgttcagttggcaagggacttaaaattggggccttatgtagatcattactatagagactacccaacgcttgtcagaactactggacaagtgtgcacaattgatccaggtcaaacaggatttatgcatcatccatcattttttacgtctgagccaccaagtatttatcagtgggtgagttcttgtctgaagggtgaaggaatgccaccttatccttacctccctggaatctgtgaaagaagcagacttgtagtcttgagtattgcactgtacatacttggtgatgagagcttggtttctgatgaatcctcacagtatttaaccagaataactatagccccccagaagttgcaagtagaacaagaggaaaacaggtttagtttcaggcattctacatctgtttctagtctagctgaaagattggttgtctggatgactaatgtaggattcactttaagagatttggaaactcttccctttggaattgctcttcccatcagagatgcaatttatcactgtcgtgagcagcctgcctcagactggccagaagctgtctgtctcttgattggacgtcaggatctttccaagcaggcctgcgaaggaaacttacccaaagggaagtctgtgctctcatcagatgttccttcaggaacagaaactgaggaggaagatgacggcatgaatgacatgaatcacgaggtcatgtcattaatatggagtgaagatttaagggtgcaggatgtgcgaaggcttcttcagagtgcgcatcctgtccgtgtcaacgtagtgcagtacccagagctcagtgaccacgagttcatcgaggaaaaggaaaacagattgctccaattgtgtcagcgaactatggctcttcctgtaggacgaggaatgtttaccttgttttcgtaccatcctgttccaacagagccattgcctattcctaaattgaatctgactgggcgtgcccctcctcggaacacaacagtagaccttaatagtggaaacatcgatgtgcctcccaacatgacaagctgggccagctttcataatggtgtggctgctggcctgaagatagctcctgcctcccagatcgactcagcttggattgtttacaataagcccaagcatgctgagttggccaatgagtatgctggctttctcatggctctgggtttgaatgggcaccttaccaagctggcgactctcaatatccatgactacttgaccaagggccatgaaatgacaagcattggactgctacttggtgtttctgctgcaaaactaggcaccatggatatgtctattactcggcttcttagcattcacattcctgctctcttacccccaacgtccacagagctggatgttcctcacaatgtccaagtggctgcagtggttggcattggccttgtatatcaagggacagctcacagacatactgcagaagtcctgttggctgagataggacggcctcctggtcctgaaatggaatactgcactgacagagagtcatactccttagctgctggcttggccctgggcatggtctgcttggggcatggcagcaatttgataggtatgtctgatctcaatgtgcctgagcagctctatcagtacatggttggaggacataggcgctttcaaacaggaatgcatagggagaaacataaatcaccaagttatcaaatcaaagaaggagataccataaatgtggatgtgacttgtccaggtgctactctagctttggctatgatctacttaaaaaccaataacagatctattgcagattggctccgagcccctgacaccatgtatttgttggactttgtgaagccagaatttctcttgcttaggacacttgctcgatgcctgattttgtgggatgatattttaccaaattccaagtgggttgacagcaatgttcctcaaattataagagaaaatagtatctctctcagtgaaatcgaattgccgtgctcagaggatttgaatttggaaactttgtcccaagcacatgtctacataattgcaggagcctgcttgtctctgggttttcgatttgctggctcagaaaacttatcagcatttaactgtttgcataaatttgccaaagattttatgacttatttgtccgcacctaatgcttctgttacaggtcctcataacctagaaacttgtctgagcgtggtgctgctgtctctcgccatggtcatggctggctcaggaaacctaaaggttttgcagctttgtcgcttcttacacatgaaaacgggtggtgaaatgaactatggttttcacttagcccaccacatggcccttggacttctatttttgggaggaggaaggtactctttgagcacatcaaattcttccattgccgctcttctctgtgccctttatccgcacttcccagctcacagcactgacaaccggtatcatctccaggctctccggcacctctatgtgctggccgcggagcccaggcttctagtgcctgtggatgtggacacaaacacgccctgctatgccctcttagaagttacctacaagggcactcagtggtatgaacaaaccaaagaagaattgatggctcctacccttcttccagaactccatcttttaaagcagattaaagtaaaaggcccaagatactgggaactgctcatagatttaagcaaaggaacacaacacttgaagtccatcctttccaaggatggggttttatatgttaaactccgggcgggtcagctctcctacaaagaagatccaatgggatggcaaagtttgttggctcagactgttgctaacaggaactctgaagcccgggctttcaagccagaaacaatctcagcattcacttctgatccagcacttctgtcatttgctgaatatttctgcaagccaactgtgaacatgggtcagaaacaggaaattctggatctcttttcttcagtactctatgaatgtgttacccaggagaccccagagatgttgcctgcatacatagcaatggatcaggctataagaagacttgggagaagagaaatgtctgagacttctgaactttggcagataaagttggtgttagagtttttcagctcccgaagccatcaggagcggctgcagaaccaccctaagcgggggctctttatgaactcggaattcctccctgttgtgaagtgcaccattgataataccctggaccagtggctacaagtcgggggtgatatgtgtgtgcacgcctacctcagcgggcagcccttggaggaatcacagctgagcatgctggcctgcttcctcgtctaccactctgtgccagctccacagcacctgccacctataggactagaagggagcacaagctttgctgaactgctcttcaaatttaagcagctaaaaatgccagtgcgagctttgctgagattggctcctttgcttcttggaaatccacagccaatggtgatgtgaccgtgtctggcggtgaacctaccctgaaacgtgacttctgcacaacaaacgtgaccaaacatcaaagctaaagcaatgtttataaagttttatggtataactagggggaaatgagctgcacaaacctcaatgtattttaaatctgttgctgtcatcattaacggtatatgacatataaaagcaagttaaaatttacttttgtaaataaagtttttggtttgtttccaaaaaaaaaaaaaaaaaaaaa

SEQ ID NO: 806 - DNA, 11326 bp, HOMO SAPIENS
gggggggggcggcggccgaacgatgtgcgagaactgcgcagacctggtggaggtgttaaatgaaatatcagatgtagaaggtggtgatggactgcagctcagaaaggaacatactctcaaaatatttacttatatcaattcctggacacagaggcaatgtctatgctgcttcaaggaatataagcatttggagatttttaatcaagtagtgtgtgcacttattaacttagtgattgcccaagttcaagtgctccgggaccagctttgtaaacattgtactaccattaacatagattccacgtggcaagatgagagtaatcaagcagaagaaccactgaatatagatagagagtgtaatgaaggaagtacagaaagacaaaaatcaatagaaaaaaaatcaaactctacaagaatttgtaatctgactgaggaggaatcttcaaagagttctgatccttttagtttatggagtacagatgagaaggaaaaactcttactatgtgtggcaaaaatttttcaaattcagtttcccttatatactgcttacaagcataatactcaccctactattgaggatatatcaactcaagaaagtaacatattaggggcattctgtgatatgaatgatgtagaagtaccattgcatttgcttcgttatgtatgtttgttttgtgggaaaaatggcctttctctcatgaaggattgctttgaatatggaactcctgaaactttgccatttcttatagcacatgcgtttattacagttgtgtctaatattagaatatggctacatattcccgctgtcatgcagcacattataccttttaggacctatgttattaggtatttatgcaagctctcggatcaggagttacgacagagtgcagctcgtaacatggctgacttaatgtggagcacagtcaaagaaccattggatacaacattatgctttgataaagaaagcctagatcttgcatttaagtactttatgtcacctactttgactatgaggttggctggattgagtcagataacaaatcaactccataccttcaatgatgtgtgcaataatgaatcattagtatcggacacagaaacgtccattgcaaaagaacttgcagactggcttattagcaacaatgtggtggagcatatatttggaccaaatttacatattgagattatcaaacagtgccaagtgattttgaattttttggcagcagaagggcgactgagtactcaacatattgactgtatttgggctgcagcacagttgaaacattgtagtcggtatatacatgacttatttccttcactcatcaagaatttggatcccgtaccacttagacatctacttaatctggtctcagctcttgagccaagtgttcatactgaacagacactgtacttggcatccatgttaattaaagcactgtggaataacgcactagcagctaaggctcagttatctaaacagagttcttttgcatctttattaaatactaatattcccattggaaataagaaagaggaagaagagcttagaagaacagctccatcaccttggtcacctgcagctagtcctcaaagcagtgataatagcgatacacatcaaagtggaggtagtgacattgaaatggatgagcaacttattaatagaaccaaacatgtgcaacaacgactttcagacacagaggaatccatgcagggaagttctgacgaaactgccaacagtggtgaagatggaagcagtggtcctggtagcagtagtgggcatagtgatggatctagcaatgaggttaattctagccacgcaagccagtcagctgggagccctggcagtgaggtacagtcagaagacattgcagatattgaagccctcaaagaggaagatgaagacgatgatcatggtcataatcctcccaaaagcagttgtggtacagatcttcggaatagaaagttagagagtcaagcaggcatttgcctgggggactcccaaggcatgtcagaaagaaatgggacaagcagcggaacaggaaaggacctggtttttaacactgaatcattgccatcagtagataatcgaatgcgaatgctggatgcttgttcacactctgaagacccagaacatgatatttcaggggaaatgaatgctactcatatagcacaagggtctcaggagtcttgtatcacacgaactggggacttccttggggagactattgggaatgaattatttaattgtcgacaatttattggtccacagcatcaccaccaccaccaccaccatcaccaccaccacgatgggcatatggttgatgatatgctaagtgcagatgatgtcagttgtagtagctcccaggttagtgcaaaatcagaaaaaaatatggctgattttgatggtgaagaatctggatgtgaagaggagctagttcagattaattcacatgcggaactgacatctcacctccaacaacatcttcccaatttagcttccatttaccatgaacatcttagtcaaggacctgtagttcataaacatcaattcaacagtaatgctgttacagacattaatttggataatgtttgcaagaaaggaaatactttgttgtgggatatagtccaagatgaagatgcagttaatctttctgaaggattaataaatgaagcagagaaacttctttgttcgttagtatgttggtttacagatagacaaattcgaatgagattcattgaaggttgccttgaaaacttgggaaacaacagatcagtagtaatttcacttcgtcttcttccaaaactatttggtacttttcagcagtttgggagcagttacgatacacactggataacaatgtgggcagaaaaagaactgaacatgatgaagcttttctttgataatttggtatactacattcaaactgtgagagaaggaagacaaaaacatgcactgtacagccatagtgctgaagttcaagttcgtcttcaattcttgacttgtgtattttcaactctgggatcacctgatcatttcaggttaagtttagagcaagttgacatcttatggcattgtttagtagaagattctgaatgttatgatgatgcactccattggtttttaaatcaagttcgaagtaaagatcaacatgctatgggtatggaaacctacaaacatcttttcctggagaagatgccccagctaaaacctgaaacaattagcatgactggcttaaacctgtttcagcatctctgtaacttggctcgattggctaccagtgcctatgatggttgttcaaattctgagctgtgtggtatggaccaattttggggcattgctttaagagcacaatctggtgatgtcagtcgagcagctatccagtatattaactcctattatattaatggtaaaacaggtttggagaaggagcaagaatttattagtaagtgcatggagagtcttatgatagcttctagcagtcttgaacaggaatcacactcaagtctcatggttatagaaagaggactccttatgctgaagacacatctggaagcgtttaggagaaggtttgcatatcatctgagacagtggcaaattgaaggcactggtattagtagtcatttgaaagcactgagtgacaaacagtctctgccgctaagggttgtatgccagccagctggacttcctgacaagatgactattgaaatgtatcctagtgaccaggtagcagatcttagggctgaagtaactcattggtatgaaaatttacagaaagaacaaataaatcaacaagctcagcttcaggagtttggtcaaagcaaccgaaaaggagagtttcctggaggcctcatgggacctgtcaggatgatttcatctggacacgagttaacaacagattatgatgaaaaagcacttcatgagcttggttttaaggatatgcagatggtatttgtatctttgggtgcaccaaggagagagcggaaaggggaaggtgttcagctgccagcatcttgcctcccaccccctcagaaggacaacattccaatgcttttgcttttacaagagcctcatttaactactctttttgatttattagagatgcttgcatcatttaaaccaccctcaggaaaagtggcagtggatgatagtgagagcttacgatgtgaagaacttcatcttcatgcagaaaatctgtctaggcgggtctgggagctactgatgcttcttcctacatgtcctaatatgttgatggcattccagaatatctcagatgagcagagtaatgatggatttaattggaaagaacttctcaaaattaagagcgcccacaagctattgtatgctctggaaattattgaagcactgggaaaacctaatagaagaataaggagggagtctacgggaagttacagtgatctttatccagattcagatgattcaagtgaagatcaagtggaaaatagtaaaaattcctggagttgcaagtttgttgctgctggagggcttcaacagttattagaaatttttaattctggaattctagagcctaaagagcaggaatcatggactgtgtggcagctagactgtcttgcttgcttgctgaagttaatatgccagtttgcagtagatccatccgatttggatttagcttatcatgatgtctttgcctggtctggtatagcggaaagccataggaaaagaacctggcctggcaaatcaaggaaggctgctggtgatcatgctaagggtcttcatataccacgattaacagaggtatttcttgttcttgtccaaggaaccagtttgattcagcgacttatgtctgttgcttatacgtatgataatctggctcctagagttttaaaagctcagtctgatcacaggtctagacatgaagtttcacattattcaatgtggctcttggtgagttgggctcattgctgttctttagtgaaatctagccttgctgatagcgatcatttacaagattggctaaagaaattgactctccttattcctgagactgcagttcgtcatgaatcatgcagtggtctctataagttatccctgtcagggctggatggaggagactcaatcaatcgttcttttctgctattggctgcctcaacattattgaaatttcttcctgatgctcaagcactcaaacctattaggatagatgattatgaggaagaaccaatattaaaaccaggatgtaaagagtatttttggttgttatgcaaattagttgacaacatacatataaaggacgctagtcagacaacgctcctcgacttagatgccttggcaagacatttggctgactgtattcgaagtagggagatccttgatcatcaggatggtaatgtagaagatgatgggcttacaggactcctaaggcttgcaacaagtgttgttaaacacaaaccaccctttaaattttcaagggaaggacaggaatttttgagagatatcttcaatctcctgtttttgttgccaagtctaaaggaccgacaacagccaaagtgcaaatcacattcttcaagagctgccgcttacgatttgttagtagagatggtaaaggggtctgttgagaactacaggctaatacacaactgggttatggcacaacacatgcagtcccatgcaccttataaatgggattactggcctcatgaagatgtccgtgctgaatgtagatttgttggccttactaaccttggagctacttgttacttagcttctactattcagcaactttatatgatacctgaggcaagacaggctgtcttcactgccaagtattcagaggatatgaagcacaagaccactcttctggagcttcagaaaatgtttacatatttaatggagagtgaatgcaaagcatataatcctagacctttctgtaaaacatacaccatggataagcagcctctgaatactggggaacagaaagatatgacagagttttttactgatctaattaccaaaatcgaagaaatgtctcccgaactgaaaaataccgtcaaaagtttatttggaggtgtaattacaaacaatgttgtatccttggattgtgaacatgttagtcaaactgctgaagagttttatactgtgaggtgccaagtggctgatatgaagaacatttatgaatctcttgatgaagttactataaaagacactttggaaggtgataacatgtatacttgttctcattgtgggaagaaagtacgagctgaaaaaagggcatgttttaagaaattgcctcgcattttgagtttcaatactatgagatacacatttaatatggtcacgatgatgaaagagaaagtgaatacacacttttccttcccattacgtttggacatgacgccctatacagaagattttcttatgggaaagagtgagaggaaagaaggttttaaagaagtcagtgatcattcaaaagactcagagagctatgaatatgacttgataggagtgactgttcacacaggaacggcagatggtggacactattatagctttatcagagatatagtaaatccccatgcttataaaaacaataaatggtatctttttaatgatgctgaggtaaaaccttttgattctgctcaacttgcatctgaatgttttggtggagagatgacgaccaagacctatgattctgttacagataaatttatggacttctcttttgaaaagacacacagtgcatatatgctgttttacaaacgcatggaaccagaggaagaaaatggcagagaatacaaatttgatgtttcgtcagagttactagagtggatttggcatgataacatgcagtttcttcaagacaaaaacatttttgaacatacatattttggatttatgtggcaattgtgtagttgtattcccagtacattaccagatcctaaagctgtgtccttaatgacagcaaagttaagcacttcctttgtcctagagacatttattcattctaaagaaaagcccacgatgcttcagtggattgaactgttgacgaaacagtttaataatagtcaggcagcttgtgagtggtttttagatcgtatggctgatgacgactggtggccaatgcagatactaattaagtgccctaatcaaattgtgagacagatgtttcagcgtttgtgtatccatgtgattcagaggctgagacctgtgcatgctcatctctatttgcagccaggaatggaagatgggtcagatgatatggatacctcagtagaagatattggtggtcgttcatgtgtcactcgctttgtgagaaccctgttattaattatggaacatggtgtaaaacctcacagtaaacatcttacagagtattttgccttcctttacgaatttgcaaaaatgggtgaagaagagagccaatttttgctttcattgcaagctatatctacaatggtacatttttacatgggaacaaaaggacctgaaaatcctcaagttgaagtgttatcagaggaagaaggggaagaagaagaggaggaagaagatatcctctctctggcagaagaaaaatacaggccagctgcccttgaaaagatgatagctttagttgctcttttggttgaacagtctcgatcagaaaggcatttgacattatcacagactgacatggcagcattaacaggaggaaagggatttcccttcttgtttcaacatattcgtgatggcatcaatataagacaaacttgtaatctgattttcagcctgtgtcgatacaataatcgacttgcagaacatattgtatctatgcttttcacatcaatagcaaagttgactcctgaggcagccaatcctttctttaagttgttgactatgctaatggagtttgctggtggacctccaggaatgcctccctttgcatcttatattctgcagaggatatgggaggtgattgaatacaatccttctcagtgtctagattggttggcagtgcagacaccccgaaataaactggcacacagctgggtcttacagaatatggaaaactgggtcgagcggtttcttttggctcacaattatcctagagtgaggacttctgcagcttatcttctggtgtcccttataccaagcaattcattccgtcagatgttccggtcaacaaggtctttgcacatcccaacccgtgaccttccactcagtccagacacaacagtagtcctacatcaggtctacaacgtgctccttggtttgctctcaagagccaaactttatgttgatgctgctgttcatggcactacaaagctagtgccctattttagctttatgacttactgtttaatttccaaaactgagaagctgatgttttccacatatttcatggatttgtggaaccttttccagcctaaactttctgagccagcaatagctacaaatcacaataaacaggctttgctttcattttggtacaatgtctgtgctgactgtccagagaatatccgccttattgttcagaacccagtggtaaccaagaacattgccttcaattacatccttgctgaccatgatgatcaggatgtggtgctttttaaccgtgggatgctgccagcgtactatggcattctgaggctctgctgtgagcagtctcctgcattcacacgacaactggcttctcaccagaacatccagtgggcctttaagaatcttacaccacatgccagccaataccctggagcagtagaagaactgtttaacctgatgcagctgtttatagctcagaggccagatatgagagaagaagaattagaagatattaaacagttcaagaaaacaaccataagttgttacttacgttgcttagatggccgctcctgctggactactttaataagtgccttcagaatactattagaatctgatgaagacagacttcttgttgtatttaatcgaggattgattctaatgacagagtctttcaacactttgcacatgatgtatcacgaagctacagcttgccatgtgactggagatttagtagaacttctgtcaatatttctttcggttttgaagtctacacgcccttatcttcagagaaaagatgtgaaacaagcattaatccagtggcaggagcgaattgaatttgcccataaactgttaactcttcttaattcctatagtcctccagaacttagaaatgcctgtatagatgtcctcaaggaacttgtacttttgagtccccatgattttcttcatactctggttccctttctacaacacaaccattgtacttaccatcacagtaatataccaatgtctcttggaccttatttcccttgtcgagaaaatatcaagctaataggagggaaaagcaatattcggcctccgcgccctgaactcaatatgtgcctcttgcccacaatggtggaaaccagtaagggcaaagatgacgtttatgatcgtatgctgctagactacttcttttcttatcatcagttcatccatctattatgccgagttgcaatcaactgtgaaaaatttactgaaacattagttaagctgagtgtcctagttgcctatgaaggtttgccacttcatcttgcactgttccccaaactttggactgagctatgccagactcagtctgctatgtcaaaaaactgcatcaagcttttgtgtgaagatcctgttttcgcagaatatattaaatgtatcctaatggatgaaagaacttttttaaacaacaacattgtctacacgttcatgacacatttccttctaaaggttcaaagtcaagtgttttctgaagcaaactgtgccaatttgatcagcactcttattacaaacttgataagccagtatcagaacctacagtctgatttctccaaccgagttgaaatttccaaagcaagtgcttctttaaatggggacctgagggcactcgctttgctcctgtcagtacacactcccaaacagttaaacccagctctaattccaactctgcaagagcttttaagcaaatgcaggacttgtctgcaacagagaaactcactccaagagcaagaagccaaagaaagaaaaactaaagatgatgaaggagcaactcccattaaaaggcggcgtgttagcagtgatgaggagcacactgtagacagctgcatcagtgacatgaaaacagaaaccagggaggtcctgaccccaacgagcacttctgacaatgagaccagagactcctcaattattgatccaggaactgagcaagatcttccttcccctgaaaatagttctgttaaagaataccgaatggaagttccatcttcgttttcagaagacatgtcaaatatcaggtcacagcatgcagaagaacagtccaacaatggtagatatgacgattgtaaagaatttaaagacctccactgttccaaggattctaccctagctgaggaagaatctgagttcccttctacttctatctctgcagttctgtctgacttagctgacttgagaagctgtgatggccaagctttgccctcccaggaccctgaggttgctttatctctcagttgtggccattccagaggactctttagtcatatgcagcaacatgacattttagataccctgtgtaggaccattgaatctacaatccatgtcgtcacaaggatatctggcaaaggaaaccaagctgcttcttgacattaggtgtagcatgtctacttttaagtccctcacccccaacccccatgctgtttgtataagttttgcttatttgtttttgtgcttcagtttgtccagtgctctctgcttgaatggcaagatagatttataggcttaattcttggtcaggcagaactccagatgaaaaaaacttgcatcttcagtatacttcctaaagggcaatcagataatggatatgttttatgtaattaagagttcactttagtggctttcatttaatatggctgtctgggaagaacagggttgcctagccctgtacaatgtaatttaaacttacagcatttttactgtgtatgatatggtgtcctctgtgccagttttgtaccttatagaggcagattgcctccgatcgctgtggttcttattatcaaaattaagtttacttgtatacggaacaaccacaagaaatttgattctgtaaagaatcctctttagctgtggcctggcagtatataaatggtgctttatttaacagaatacctgtggaggaaataaagcacacttgatgtaaaaataattgttttatttttattgacatgactgattgattgattgctattctgtgcacttaattaaactgattgtgatgacttttcatttgtttaaaaaaaaaaaaaaaaa

SEQ ID NO: 807 - DNA, 3421 bp, HOMO SAPIENS
gaaacacaggctggaagcaagacctgacctgagggagttcttcagccttaacctaaggtctcatactcggagcactatgacatcgccccagctagagtggactctgcagacccttctggagcagctgaacgaggatgaattaaagagtttcaaatcccttttatgggcttttcccctcgaagacgtgctacagaagaccccatggtctgaggtggaagaggctgatggcaagaaactggcagaaattctggtcaacacctcctcagaaaattggataaggaatgcgactgtgaacatcttggaagagatgaatctcacggaattgtgtaagatggcaaaggctgagatgatggaggacggacaggtgcaagaaatagataatcctgagctgggagatgcagaagaagactcggagttagcaaagccaggtgaaaaggaaggatggagaaattcaatggagaaacagtctttggtctggaagaacaccttttggcaaggagacattgacaatttccatgacgacgtcactctgagaaaccaacggttcattccattcttgaatcccagaacacccaggaagctaacaccttacacggtggtgctgcacggccccgcaggcgtggggaaaaccacgctggccaaaaagtgtatgctggactggacagactgcaacctcagcccgacgctcagatacgcgttctacctcagctgcaaggagctcagccgcatgggcccctgcagttttgcagagctgatctccaaagactggcctgaattgcaggatgacattccaagcatcctagcccaagcacagagaatcctgttcgtggtcgatggccttgatgagctgaaagtcccacctggggcgctgatccaggacatctgcggggactgggagaagaagaagccggtgcccgtcctcctggggagtttgctgaagaggaagatgttacccagggcagccttgctggtcaccacgcggcccagggcactgagggacctccagctcctggcgcagcagccgatctacgtaagggtggagggcttcctggaggaggacaggagggcctatttcctgagacactttggagacgaggaccaagccatgcgtgcctttgagctaatgaggagcaacgcggccctgttccagctgggctcggcccccgcggtgtgctggattgtgtgcacgactctgaagctgcagatggagaagggggaggacccggtccccacctgcctcacccgcacggggctgttcctgcgtttcctctgcagccggttcccgcagggcgcacagctgcggggcgcgctgcggacgctgagcctcctggccgcgcagggcctgtgggcgcagatgtccgtgttccaccgagaggacctggaaaggctcggggtgcaggagtccgacctccgtctgttcctggacggagacatcctccgccaggacagagtctccaaaggctgctactccttcatccacctcagcttccagcagtttctcactgccctgttctacgccctggagaaggaggagggggaggacagggacggccacgcctgggacatcggggacgtacagaagctgctttccggagaagaaagactcaagaaccccgacctgattcaagtaggacacttcttattcggcctcgctaacgagaagagagccaaggagttggaggccacttttggctgccggatgtcaccggacatcaaacaggaattgctgcaatgcaaagcacatcttcatgcaaataagcccttatccgtgaccgacctgaaggaggtcttgggctgcctgtatgagtctcaggaggaggagctggcgaaggtggtggtggccccgttcaaggaaatttctattcacctgacaaatacttctgaagtgatgcattgttccttcagcctgaagcattgtcaagacttgcagaaactctcactgcaggtagcaaagggggtgttcctggagaattacatggattttgaactggacattgaatttgaaaggtgcacttacctaaccattccgaactgggctcggcaggatcttcgctctcttcgcctctggacagatttctgctctctcttcagctcaaacagcaacctcaagtttctggaagtgaaacaaagcttcctgagtgactcttctgtgcggattctttgtgaccacgtaacccgtagcacctgtcatctgcagaaagtggagattaaaaacgtcacccctgacaccgcgtaccgggacttctgtcttgctttcattgggaagaagaccctcacgcacctgaccctggcagggcacatcgagtgggaacgcacgatgatgctgatgctgtgtgacctgctcagaaatcataaatgcaacctgcagtacctgaggttgggaggtcactgtgccaccccggagcagtgggctgaattcttctatgtcctcaaagccaaccagtccctgaagcacctgcgtctctcagccaatgtgctcctggatgagggtgccatgttgctgtacaagaccatgacacgcccaaaacacttcctgcagatgttgtcgttggaaaactgtcgtcttacagaagccagttgcaaggaccttgctgctgtcttggttgtcagcaagaagctgacacacctgtgcttggccaagaaccccattggggatacaggggtgaagtttctgtgtgagggcttgagttaccctgattgtaaactgcagaccttggtgttacagcaatgcagcataaccaagcttggctgtagatatctctcagaggcgctccaagaagcctgcagcctcacaaacctggacttgagtatcaaccagatagctcgtggattgtggattctctgtcaggcattagagaatccaaactgtaacctaaaacacctacgcctctggagctgctccctcatgcctttctattgtcagcatcttggatctgctctcctcagcaatcagaagcttgaaactctggacctgggccagaatcatttgtggaagagtggcataattaagctctttggggttctaagacaaagaactggatccttgaagatactcaggttgaagacctatgaaactaatttggaaatcaagaagctgttggaggaagtgaaagaaaagaatcccaagctgactattgattgcaatgcttccggggcaacggcacctccgtgctgtgactttttttgctgagcagcctgggatcgctctacgaattacacaggaagcgggattcgggtctctaagatgtcttatgaatgcaggtcagagggtcacatgttaacactagagtctgtcgagaggtaggatttgacactggttttctcactatttttgggagattctgcacgagtcacgcacccccttcacatgacgctatgtactttctcacagggataataaagttagagcactctcgttgca

SEQ ID NO: 808 - DNA, 511 bp, HOMO SAPIENS
  misc_feature (41)..(41): n is a, c, g, or t
ttcttagggccttattattcaccgataacctgtttccttgntactttgctttggtgtaagcagagttctttctgtaggttttttcaaatgaaaacattgcaagaatatcaaagagagcagtgtttgcgttagtgattataaactgcagcatggtgctgacattgataactgaaagtcaactaatgagaatttgagacttctgaagtacacttagttgctagtgtctcccttttggtgtcactggaaagtttagaaagcatggttttgtttttgctcaggtttctctttctgtgatgcagagactctcagctgttcctcctctatgtctacattatgtctgaaggaaagaatttaacaaaacttgaaatactgctgtttttctacaatgtttgtaaatatttatcttgctgcttttctaggtttgtcttctggatttaaaatttggggcggctggggtggaattgcatggtttgggaatgggtaattgagctgctgctcattatggtatgta

SEQ ID NO: 809 - DNA, 5056 bp, HOMO SAPIENS
agaacacatctgctttcctgtgtgagggtgaggcttgggccgggttccccgggaggctcatctccattgcgcagcgctacggcgacccgcaactccgaggctcggctggatgttgagagttgagggagcagccgtttcgggtgggcccaggcgaggagctgacaggaatcggcgtgggtcccgctctggactacatttcccagagggcctggtggcctgccacttttctcgcaggaattcgaacgtttcgtcactcctggcgggacccttagatctgggaggaaacctctctgaggtctggtcagattccaaccctggacagcagtgaacacaacctttcccctgagccactggaattggacagaatgccccattctcctctgatctccattcctcatgtgtggtgtcacccagaagaggaggaaagaatgcatgatgaacttctacaagcagtatccaaggggccggtgatgttcagggatgtttccatagacttctctcaagaggaatgggaatgcctggacgctgatcagatgaatttatacaaagaagtgatgttggagaatttcagcaacctggtttcagtgggactttccaattctaagccagctgtgatctccttattggaacaaggaaaagagccctggatggttgatagagagctgactagaggcctgtgttcagatctggaatcaatgtgtgagaccaaaatattatctctaaagaagagacatttcagtcaagtaataattacccgtgaagacatgtctacttttattcagcccacatttcttattccacctcaaaaaactatgagtgaagagaaaccatgggaatgtaagatatgtggaaagacctttaatcaaaactcacaatttatccaacatcagagaattcattttggtgaaaaacactatgaatctaaggagtatgggaagtcctttagtcgtggctcactcgttactcgacatcagaggattcacactggtaaaaaaccctatgaatgtaaggaatgtggcaaggcttttagttgtagttcatatttttctcaacatcagaggattcacactggtgagaaaccctatgaatgtaaggaatgtggaaaagcctttaagtattgctcaaaccttaatgatcatcagagaattcacactggtgagaaaccctatgaatgtaaagtatgtggaaaagcctttactaaaagttcacaactttttctacatctgagaattcatactggtgagaaaccttatgaatgtaaagaatgtgggaaagcctttactcaacactcaaggcttattcagcatcagagaatgcatactggtgagaaaccttatgaatgtaagcagtgtgggaaggcctttaatagtgcctcaacacttactaaccatcacagaattcatgctggtgagaagctctatgaatgtgaagaatgtagaaaggcctttattcagagctcagaacttattcaacatcagagaatccatacagatgaaaaaccatatgaatgtaatgaatgtgggaaggcctttaataaaggctcaaatcttactcgacatcagagaattcacactggtgagaaaccctatgactgtaaggaatgtggaaaggcttttggtagtcgctctgacctcattcgccatgagggaattcatactggttgaatgacagtaaagtaagaccattttgttaacctttataataatttttttaaaacaggtaaggagaacaaattaggatacatattatcaaaggttctcctatgtattcgtttttaaacgatacgataacaaagtaccaagtaccaaaaccttggtggcttaaaacaagagaaatttattctctcatagtttagagcctggaaatctaaactcaagggtgctgatcgttttggttccttctgaggactctgaggatctgttctatgcctttttcctaacctctgttaacagctggcagtccttggcattccatggcttttacatacaccattccaatctctgcctccatcttcacattgcattctcgctgtgtatctctgtgtatgtcttttatttggacaccagtcaggttagattggggttacctggtgacctcatcttaacttgattatatctgccaagaccctgtttccaagtaaggtcacatttaccggtaccaggggttaggacttcagcatatctttttaggggatacagttcaacccataataccctgttagaatgattttgtctaatatatttgtaatttccttttatacataagttgttagtcaaatttattttattttattttattttgagacagagtctcgctctgttgcccaggctggagtgcagtggtgtgatctcagctcactgcaacctccagctcctgagttcaagcgattcttgtgcctcagcctctcaagtagttgggattacaggcatgcgccaccatgcccggctaattttttttttttttttttttgtatttttagtagcgacggggtttcaccatgttggccaggctggtcttgaactcctgacttcaagtgatctgcccgcctcagcctcccaaagtgctgggattacagacgtgagccaccgtgatggccaaaacagactttataccaacaaaaattaaaaaggacaaagaaggtcatttataatgataaaggataaattcaacaagaagataaaacaatcctaaatatgtatgcacccaacactgcaacacccagatccataacacagatactactagacctaagaaaagagatagacagcaatacaacaatagcaggggacttcaccactccattgacagcactagacagatcactgggacagaaatcaacaaagaaactctggacttaaattggactctacaccaaatggacccaacagacatctgaagaacattctacccaacaaccacagaatatatactcttctcttctgtgcatggaacattctcaaaaataggtcatatactggaccacaaagcaagtatcaataaattttaaaaaaacaaaatcatatctaacatcttctctgaccatagtggaataaaactagatatcaataccaagaggaactctcaaaacagatacatggaatttaaacagcttgctcctgaatgatttttggatcaatgatgaaactaaggtggaaatttaaaattttttgaaataaatgaaaatagagacaaaacacatgaaaacatctgagatacagcaaaagcagtgctaagagaggattttatagcattaaatgcctacaccaaaaagatagaaaaatctcaaatgaatagcctaacgtcacatctcaaggaactaggaaaaaacaaaacaaactcaacccaaagctggcagaagaaaagcaataacaaatatcagagcaggcaaaaatgagactgagaacaaaggaatgcaaaagatcaataaaagaaaaagttggttctttgcaaagataaaactgacagaccactagctagattaaccaagaaaaaaagaagattcaaataaatacaatcagaaatgataaggtgatattataactgataacacagacatataaaatatcagcagaaactatatgcacatattagaaaacctagaggaagtggataaattcctagaaacacataaccttccaagattgaaccagggagaaataggaatcctcaacagactactgagtattgaaattgaatcagtaatagaaaaaaatcttgcaaaaacaaaaagcccaggaccagacagattcacagctgaattctactagacatgcaaggaagaactagtaacagcactattgaaactattccaaaaattataggagggaatcctccctaactcattctacaaagccagtatcatcctgatactgaagccaggcaaggataaaacacacaaaaaaactacaagccaatatccctgatgaaaatagacacaaaaatcttcagcaaaatactagcaaaccaaatcaaacagtacataaaaaagatagtaacagcacagtcaagtggattttattcctggggtgtaaggatggctcaacatatgcaactcaatacatgattcatcacatacacagaattaaaaataagccaggcactcacacctgtaatcccagcactttgcaaggccaaggcgggcagatcacatgatgtcaagagtttgagaccagtctggctgacatggcgaaaccctgtctctactaaaaatagaaaaattggctgggcatggtggcaggcactgtagtcccagctacttgggaggctgaggcaggagaattacttgaacctgagaagcggaggttgcagtgagctgagatagtgccattgcactccagcctgggcaacagagcaaattgcttgaatgtgggaggtggaggttgcagtgagccgagattatgccattgcactccagccgggggagcaacaaagccagactccatctcaaaaaaaaaccaaaaaaaatcctatttagtacaaggtacattatttaggtaatgagtccattaaaagccaacactttccccactacactatatgtgtatgtaacacaactgcccttgtaacttcctaaacctataattaagaaacaataaaaggcaaattaagaatgcttttttaaaaggtgggggcattatgctaataagttactgtggatttcagagtgcagagtagaaagatcacaagaatttagtgtggtaggtgggaacagaaaatgggtgtataaattttattgacgtgggagtactggatattgtagagacagatatcatcagggcaaggagattaaagatttttgcattgacggtttgacactatattgtggtaataacactgtatgtgttgggagatagaacaggaaacatcttccctggaatatgtatactattaaatgttttatcaaacttttgatcaaacaagacagcacaatttataatttcatttctatttctatgttatgagaaactgatcatttattcaaatgtttaacaggcatgttcatgttactataaactcttctgtttcaccatcaaaaaaaaaaaaaaaaaaaaaaaaa

SEQ ID NO: 810 - DNA, 3054 bp, HOMO SAPIENS
agagagctaggtgcagagcttcaggctgaggcgctgctgagagggcctcgccccgcctctgccgccagctgcaccccactcctggaccaccccctgctgagaaggacagggagccaaggccggcagagccaaggctcagtcatgagaacacaaattgaagtgatcccttgcaaaatctgtggggacaagtcgtctgggatccactacggggttatcacctgtgaggggtgcaagggcttcttccgccggagccagcgctgtaacgcggcctactcctgcacccgtcagcagaactgccccatcgaccgcaccagccgaaaccgatgccagcactgccgcctgcagaaatgcctggcgctgggcatgtcccgagatgctgtcaagttcggccgcatgtccaagaagcagagggacagcctgcatgcagaagtgcagaaacagctgcagcagcggcaacagcagcaacaggaaccagtggtcaagacccctccagcaggggcccaaggagcagataccctcacctacaccttggggctcccagacgggcagctgcccctgggctcctcgcctgacctgcctgaggcttctgcctgtccccctggcctcctgaaagcctcaggctctgggccctcatattccaacaacttggccaaggcagggctcaatggggcctcatgccaccttgaatacagccctgagcggggcaaggctgagggcagagagagcttctatagcacaggcagccagctgacccctgaccgatgtggacttcgttttgaggaacacaggcatcctgggcttggggaactgggacagggcccagacagctacggcagccccagtttccgcagcacaccggaggcaccctatgcctccctgacagagatagagcacctggtgcagagcgtctgcaagtcctacagggagacatgccagctgcggctggaggacctgctgcggcagcgctccaacatcttctcccgggaggaagtgactggctaccagaggaagtccatgtgggagatgtgggaacggtgtgcccaccacctcaccgaggccattcagtacgtggtggagttcgccaagaggctctcaggctttatggagctctgccagaatgaccagattgtgcttctcaaagcaggagcaatggaagtggtgctggttaggatgtgccgggcctacaatgctgacaaccgcacggtcttttttgaaggcaaatacggtggcatggagctgttccgagccttgggctgcagcgagctcatcagctccatctttgacttctcccactccctaagtgccttgcacttttccgaggatgagattgccctctacacagcccttgttctcatcaatgcccatcggccagggctccaagagaaaaggaaagtagaacagctgcagtacaatctggagctggcctttcatcatcatctctgcaagactcatcgccaaagcatcctggcaaagctgccacccaaggggaagcttcggagcctgtgtagccagcatgtggaaaggctgcagatcttccagcacctccaccccatcgtggtccaagccgctttccctccactctacaaggagctcttcagcactgaaaccgagtcacctgtggggctgtccaagtgacctggaagagggactccttgcctctccctatggcctgctggcccacctccctggaccccgttccaccctcacccttttcctttcccatgaaccctggagggtggtccccaccagctctttggaagtgagcagatgctgcggctggctttctgtcagcaggccggcctggcagtgggacaatcgccagagggtggggctggcagaacaccatctccagcctcagctttgacctgtctcatttcccatattccttcacacccagcttctggaaggcatggggtggctgggatttaaggacttctgggggaccaagacatcctcaagaaaacaggggcatccagggctccctggatgaatagaatgcaattcattcagaagctcagaagctaagaataagcctttgaaatacctcattgcatttccctttgggcttcggcttggggagatggatcaagctcagagactggcagtgagagcccagaaggacctgtataaaatgaatctggagctttacattttctgcctctgccttcctcccagctcagcaaggaagtatttgggcaccctaccctttacctggggtctaaccaaaaatggatgggatgaggatgagaggctggagataattgttttatgggatttgggtgtgggactagggtacaatgaaggccaagagcatctcagacatagagttaaaactcaaacctcttatgtgcactttaaagatagactttaggggctggcacaaatctgatcagagacacatatccatacacaggtgaaacacatacagactcaacagcaatcatgcagttccagagacacatgaacctgacacaatctctcttatccttgaggccacagcttggaggagcctagaggcctcaggggaaagtcccaatcctgagggaccctcccaaacatttccatggtgctccagtccactgatcttgggtctggggtgatccaaataccaccccagctccagctgtcttctaccactagaagacccaagagaagcagaagtcgctcgcactggtcagtcggaaggcaagatcagatcctggaggactttcctggcctgcccgccagccctgctcttgttgtggagaaggaagcagatgtgatcacatcaccccgtcattgggcaccgctgactccagcatggaggacaccagggagcagggcctgggcctgtttccccagctgtgatcttgcccagaacctctcttggcttcataaacagctgtgaaccctcccctgagggattaacagcaatgatgggcagtcgtggagttgggggggttgggggtgggattgtgtcctctaaggggacgggttcatctgagtaaacataaaccccaacttgtgccattctttataaaatgattttaaaggcaaaaaaaaaaaaaaaaaaaa

SEQ ID NO: 811 - DNA, 4287 bp, HOMO SAPIENS
ctgcgcctgcgcgagggctacgcgcgctccggccggggcgcgggcgcgctctcaggcgggctccggcggcagcgacgcgagcgcggcgatggggagcggcggcgtggtccactgtaggtgtgccaagtgtttctgttatcctacaaagcgaagaataaggaggaggccccgaaacctgaccatcttgagtctccccgaagatgtgctctttcacatcctgaaatggctttctgtagaggacatcctggccgtccgagctgtacactcccagctgaaggacctggtggacaaccacgccagtgtgtgggcatgtgccagcttccaggagctgtggccgtctccagggaacctgaagctctttgaaagggctgctgaaaaggggaatttcgaagctgctgtgaagctgggcatagcctacctctacaatgaaggcctgtctgtgtctgatgaggcccgcgcagaagtgaatggcctgaaggcctctcgcttcttcagtctcgctgagcggctgaatgtgggtgccgcacctttcatctggctcttcatccgccctccgtggtcggtgagcggaagctgctgcaaggccgtggttcacgagagcctcagggcagagtgccagctgcagaggactcacaaagcatccatattgcactgcttgggcagagtgctgagtctgttcgaggatgaggagaagcagcagcaggcccatgacctgtttgaggaggctgctcatcagggatgtctgaccagctcctacctcctctgggaaagcgacaggaggacagatgtgtcagatcctgggcgatgcctccacagcttccgaaaactcagggactacgctgccaaaggctgctgggaagcgcagctgtctttagccaaagcctgtgcaaatgcaaaccagcttggactggaggtgagagcttccagtgagatcgtctgccagctatttcaggcttcccaggctgtcagtaaacaacaagtcttctccgtgcagaagggactcaatgacacaatgaggtacattctgatcgactggctggtggaagttgccaccatgaaggacttcacaagcctgtgcctgcacctgaccgtggagtgtgtggaccggtacctgcggaggaggctggtgccgcggtacaggctccagctgctgggcatcgcctgcatggtcatctgcacccggtttatcagtaaagagatcctgaccatccgggaggccgtatggctcacggacaacacttacaagtacgaggacctggtgagaatgatgggcgagatcgtctccgccttggaagggaagattcgagtccccactgtggtggattacaaggaggtcctgctgacgctagtccctgtggagctgagaacccagcacctgtgcagcttcctctgcgagctctccctgctgcacaccagcctgtccgcctacgccccagcccgcctggctgccgcagccctgctcctggccagactgacgcacgggcagacacagccctggaccactcagctgtgggacctcaccggattctcctatgaagacctcattccctgcgtcttgagcctccataagaagtgcttccatgatgacgcccccaaggactacaggcaagtctctctgaccgccgtgaagcagcggtttgaggacaagcgctatggagaaatcagccaggaagaggtgctgagctacagccagttgtgtgctgcattaggagtgacacaagacagccccgaccccccgactttcctcagcacaggggagatccacgccttcctcagctctccctcggggcggagaaccaaacggaagcgggagaacagcctccaggaagacagaggcagcttcgttaccacccccactgcggagctgtccagccaggaggagacgctgctgggcagcttcctcgactggagcctggactgctgctctggctatgaaggcgaccaggagagtgagggcgagaaggagggcgacgtgacagctcccagcggcatcctcgatgtcaccgtggtctacctgaacccagaacagcattgctgccaggaatccagtgatgaggaggcttgtccagaggacaagggaccccaggacccacaggcactggcgctggacacccagatccctgcaacccctggacccaaacccctggtccgcaccagccgggagccagggaaggacgtcacgacctcagggtactcctccgtcagcaccgcaagtcccacaagctccgtggacggtggcttgggggccctgccccaacctacctcagtgctgtccctggacagtgactcgcacacacagccctgccaccatcaggccaggaagtcatgtttacagtgtcgtcccccaagtcccccggagagcagtgttccccagcaacaggtgaagcggataaacctatgcatacacagtgaggaggaggacatgaacctgggccttgtgaggctgtaagtgtgtcagcacatttgccgcagtggatgtgtactgagggggctggaggcgaagggtgggagcatagcataggaacgctgcatagaccatggaggcctttgcgcagagagcagagaggatgacttgcggccaccaagtttctgtctccgcgggagtcccgtgcaagccatcagaatgttgaaatgagggtgaagagctcagatccctctctttggaaagtttagcctggaagcagttggccacactgtgtggagggcacctctctgtcccttccgtgtctcactgtctctggaagcttcagcccatgtgtgtcctggtgttcccagccccaccagagccccgtgccgggagctgacagctttcacgcttaaggcacgtgtgacctgggtagtcagacaccacttgagcccctgcccacatctgctggtttggggcttcagtggggagctgacagctgtgagcacaccactgtcccctcatccacctcggcctgcatggggcacccacttccttctgggtggggcttccatggtaagggggcctgcgtccctgcacactgcgaggactgccttggccacaggcccactccctacgacacgtgactcgttttagagctctgtcccagaggcgttcgtatgtgacccacagatggcgtcaatgtgaacacctctctttgtgctgaatttctgggccattcttttcctgtcttatttctaaatttccttcttccaagatgaaaacaaaagaaaaacttaaaacagaaggtattaaaaaaacaagagattcccaccattatttaggttcacctgcaaaacaaaaatcttactccagcccctcaatgccatcctgacacactttatgcaaaaagaattttcccagataggctagccagaaaaaacttcaagtcctctgtaacatctgaggtgaccaagaggcagaagagcagagcagtcgggggccgtgtcctggctgatcccaactgcagctctgctgtgggggcccgtgggagggaggcagacccctgggctttcctgctggccacggagactctgctcctgcatggaaagggagcctgggagccagcagcccacgcctggggagcctgcctggggccatgtgaccatggcctctccctgggaacgggctgaccacaacacaccctgctgccatccacttctgtttactctgcaaatgtaagaaagaaccacttggccagaagtgtcccccagatgcttttttttttttttttttggagacagttttgctcttgtctccccggctggagtgcagtggcatgatctcaactctcaactcactgtaacctccgcctcccggatactcctgcctcagcctcctgggtagctgggattacaagcacccaaccacgcccagctaatttttgtattttcggtagagacgggatttcaccatgttggccaggctagtctcgaactcatgacctcaagtgatccgcccacttcggtctcccaaagtgctgggattacaggcatgagccacggcgcctggcccccaaatgctcttgaaccggaaacccagggatgggagatgctcactgagctgctgcttttatgtgtgctggtgctatgtgtgttcatgtccgcggcagctgtctttttgctactataagggaattctggccaccctgggtggggtgtggtcggggtgagaacccaagcgttggaactgtagacccgtcctgtcgactgtgtgcccctgggcatgtgtgagcctcagtttcctcatctgtaaggggggcaatgatacctacctcacaggggtgttgtgaggattaaatgtgaggaggatagtggcagatg

SEQ ID NO: 812 - DNA, 1162 bp, HOMO SAPIENS
gggaggggcgcgctggggagcttcggcgcatgcgcgctgaggcctgcctgaccgaccttcagcagggctgtggctaccatgttctctcgcgcgggtgtcgctgggctgtcggcctggaccttgcagccgcaatggattcaagttcgaaatatggcaactttgaaagatatcaccaggagactaaagtccatcaaaaacatccagaaaattaccaagtctatgaaaatggtagcggcagcaaaatatgcccgagctgagagagagctgaaaccagctcgaatatatggattgggatctttagctctgtatgaaaaagctgatatcaaggggcctgaagacaagaagaaacacctccttattggtgtgtcctcagatcgaggactgtgtggtgctattcattcctccattgctaaacagatgaaaagcgaggttgctacactaacagcagctgggaaagaagttatgcttgttggaattggtgacaaaatcagaggcatactttataggactcattctgaccagtttctggtggcattcaaagaagtgggaagaaagccccccacttttggagatgcgtcagtcattgcccttgaattactaaattctggatatgaatttgatgaaggctccatcatctttaataaattcaggtctgtcatctcctataagacagaagaaaagcccatcttttcccttaataccgttgcaagtgctgacagcatgagtatctatgacgatattgatgctgacgtgctgcaaaattaccaagaatacaatctggccaacatcatctactactctctgaaggagtccaccactagtgagcagagtgccaggatgacagccatggacaatgccagcaagaatgcttctgagatgattgacaaattgacattgacattcaaccgtacccgccaagctgtcatcacaaaagagttgattgaaattatctctggtgctgcagctctggattaatgaaaatcaagttccatcctcagacaagaggtaaagaaggaaaattcagccagttgattttgtttttagcttactgctgcctttgtccgaagaaactgttcctccattatttgaattactgaagacagcaagatatttgtaaattatcttaaaataaacaacttaaaataaaaaaaaaaaaaaaaaa

SEQ ID NO: 813 - DNA, 5689 bp, HOMO SAPIENS
gggcaatttcagtgtgagactgagccgcgagactgagctgcggctccgagcgctgcgcggcggctcctcccgcccagggtcagcgccccggcgcgcgcacgcgcacccccgccgcccgagcgcgccccgcgccgcccgcgcagtcggtcggtcggtcgtctgtcctgtcgccgctgccgccgccgccacagcggccgccgcgggcgccacctgagggagtcgcctccgcgggacgccacaagacctgaccggactgcgccgcccgaggccgtcggccgccgtcagcgagggcgccgagcaacttcgttcagaatgaccgaagaagcatgccgaacacggagtcagaaacgagcgcttgaacgggacccaacagaggacgatgtggagagcaagaaaataaaaatggagagaggattgttggcttcagatttaaacactgacggagacatgagggtgacacctgagccgggagcaggtccaacccaaggattgctgagggcaacagaggccacggccatggccatgggcagaggcgaagggctggtgggcgatgggcccgtggacatgcgcacctcacacagtgacatgaagtccgagaggagacccccctcacctgacgtgattgtgctctccgacaacgagcagccctcgagcccgagagtgaatgggctgaccacggtggccttgaaggagactagcaccgaggccctcatgaaaagcagtcctgaagaacgagaaaggatgatcaagcagctgaaggaagaattgaggttagaagaagcaaaactcgtgttgttgaaaaagttgcggcagagtcaaatacaaaaggaagccaccgcccagaagcccacaggttctgttgggagcaccgtgaccacccctcccccgcttgttcggggcactcagaacattcctgctggcaagccatcactccagacctcttcagctcggatgcccggcagtgtcatacccccgcccctggtccgaggtgggcagcaggcgtcctcgaagctggggccacaggcgagctcacaggtcgtcatgcccccactcgtcaggggggctcagcaaatccacagcattaggcaacattccagcacagggccaccgcccctcctcctggccccccgggcgtcggtgcccagtgtgcagattcagggacagaggatcatccagcagggcctcatccgcgtcgccaatgttcccaacaccagcctgctcgtcaacatcccacagcccaccccagcatcactgaaggggacaacagccacctccgctcaggccaactccacccccactagtgtggcctctgtggtcacctctgccgagtctccagcaagccgacaggcggccgccaagctggcgctgcgcaaacagctggagaagacgctactcgagatccccccacccaagcccccagccccagagatgaacttcctgcccagcgccgccaacaacgagttcatctacctggtcggcctggaggaggtggtgcagaacctactggagacacaaggcaggatgtcggccgccactgtgctgtcccgggagccctacatgtgtgcacagtgcaagacggacttcacgtgccgctggcgggaggagaagagcggcgccatcatgtgtgagaactgcatgacaaccaaccagaagaaggcgctcaaggtggagcacaccagccggctgaaggccgcctttgtgaaggcgctgcagcaggaacaggagattgagcagcggctcctgcagcagggcacggcccctgcacaggccaaggccgagcccaccgctgccccacaccccgtgctgaagcaggtcataaaaccccggcgtaagttggcgttccgctcaggagaggcccgcgactggagtaacggggctgtgctacaggcctccagccagctgtcccggggttcggccacgacgccccgaggtgtcctgcacacgttcagtccgtcacccaaactgcagaactcagcctcggccacagccctggtcagcaggaccggcagacattctgagagaaccgtgagcgccggcaagggcagcgccacctccaactggaagaagacgcccctcagcacaggcgggacccttgcgtttgtcagcccaagcctggcggtgcacaagagctcctcggccgtggaccgccagcgagagtacctcctggacatgatcccaccccgctccatcccccagtcagccacgtggaaatagtgcgagccaggccccgtggaagacgggctccctcctcccccacctggcccctggtctagaaggacccactgcaccaccctccgctggctcgggaagacaccgtgcccgccccaagagcaagcaccggccatgctgcagaggcaagacctcaattcttggctgcaaagtttcatcagggctagggggctggtgccgcctcataggcagacgaggatcatcgctgggggacctttcccgtgggctttcttcctttctctctttgcctttagtttgcccgacaccagcagaaaagtggaccttgggggctggttctgctcctggcccccttgttcagcccctgccggcacacgggcggctcaccctggacactgtgatgcgcatgggcaaggccagcgcccggggcttctgaaccgagcggggtgtttcatttttttgcttttccctgtcttaggctcccagtctttgactgccttcccatggcgatctataagttgaaagattttttttttttttaatcacctcatgatgatggagttaaaagtaaaccgtgcagaccctggggtccctgttgtacgctgcatcatcccgctggccctgtgccctggagggtgggcggctcatggtgccacagcccctggcagggacggccggcccgcccccgtgactgactgacagatgcagggatggccgaggcagccctcgctccagctgaacgcctccattgctgcttgttctggagacccccgcccccgcaccttccagacttagcagaagaacaaactgaagaacagacccagccagagaagcagggattccagaagctgcccattaagggagaaggagaggatccggtcggcagcagccctgagcagaaagctggaggggggactgtcgcggggtttttctgttgtggtttattttattaaattttttccttttttctattcatttcgatggacgcaatcttaagccaccctggccttgctcctgggaggtgagcgtgcacaggtgtgtgcaggtcaggaggtgccgtccaggtgtgcggcgagccgctgcgcacagatgtcaggatttccgtttgggtctagtttagaacctgtccttaaacctaggggttgctgtcaggatttgctttcagactttttttttttttgtaattccctttagagtctacaaaaatgtttttaaaaggatcaggtctgcttttagtttcatttttgtttctttcccgtcccactctttaaaaactggttccgtgaggaaaggcagaagccgttccgtgtctcttgcaggctgggccggcttcatgccagtgcgagggcgtcccgtgcccacgtacatacgtatgtctccatgagttctgggctccactggttccaattgagctccagccctggttttcctacccatgcagttagggactttaatttaattttttttttgtagggccaccgccttcaaacacaactgctacaacattctaataaaggctcatttaacccccaggctcctgtcgtgtgaatatcctcagtctgtaggaaactttttttgacacagcatagaagacctagttttggaaaacattatctaattttttgttgtgcaaatccccaaatttctcactaatttttgtttttttgtgcataacttggatgggctgaaggaggtgaggacagattggggaagggtggctttcattccaagatccagggatttggggaaaaggaaggaatttgatgttttttggggtgggaggggagggtgtgttttttacaccaaaaaaaaaaaaaaaaatcaagagtatgcaagcatttctattcctcgcatttttctgtgtgcctggcaaataaatacctgtctcctacgaccctgagctgttagccctctctgttccatgacaggggccagatcttccagctcctcccagaaggagcacccaggctggcttcttcccactgaaagccctccccagcgaaccaacctcagttctatgcagtggctggggatcaggcatccagaccgaagtcacctctgcctgctccagcttgggtcagctgggtctgaccagggggccagatccgagccgcacctgccggcccccagccccagctccagctcctgacctctcccagcctggcctggctgttcctccagggctgatggctgtcaacccatccttgtgagttcatatggactgctgcccctcgaaagggagagggtcggccccatgtccccagggagcattccatcagggacaacgtacatactgtgatgtaaactttttttttttccccccagggggcaaaagtgtgagatgccttaatctttccttcatttctgctgtctcgaacactctagcccattatttcctttcagttccttgcagcataacctctacgataagccccaagcgggttgttgtattatgacgtttatgatgttccaggtgaaggcattattaagtacctctctgggtgtggggtttggacgcaccaggatagctattgattaatgttaagggtgttctacccacagcaaagcacaccctcttaaaccaggcactgcctgggtcctggtcccgagagccctaccaggatcaggttcctgcaagccgtcagaatgtgggagcccccagcccaactgattgtaactgtcccctgttacctgtgacatgaacctccaacagcacctggaaacggttccctctgtcagctgctctgtagacagggctggggagatctcagagttcacacctcgcctgttgtaggggaggttgggggtagggtttggaatggccaagtgcccttggaacctcccacagctatggccgtcctgacctcatcccaggaactctacggtgaccaggaaccacccctctgacgaggtctgtagcggcccttctcagagtggaacagcccacagtgctagttgtgcctggtcttacctgtactccacggacctcggtgaagcaaaagcttcagggcagagggaatgaggcaacccagtggcagccccgctgggccccgtggctcctgctctcctattggacgtagaggcaggggagagacttctctatacaaatattctcatcacagaagggatgatccttgctgctctgccgtagggtttttgatgctgagctatgctgcacatgacgttaacctaaagaacttggactgagcttttaaaaaaggacagcaaacaattttataatccttaaagtgtaatagacggttacactagtgcagggtattggggaggctctttgggtgtggaggctgtcacttgtatttattgtgactctaaatctttgatagtaaaacaaatgtaaaaagaaatgtttgccaccagatgggaatagaagttccaataagcaggctggaatgggtggctatacgttgtatcacgaggaagttttagactctgaaggataataaatggatgatgtgtcaactggaaaaaaaaaaaaaaaaaa

SEQ ID NO: 814 - DNA, 5821 bp, HOMO SAPIENS
tgaggtccggaagcggctgccgggcagcaaaggaggatggcgaggggctgatactgaacccgggaagggtgggctgtgctgaagccagagccggagccggagctggggccagaacccgagcagtgagttcctccactggctgccggctggcggcgctcgccgccttgggcaggacccacctcgccttcctcccggcgtggcagatgctccagctgccatgtccacgcagagacttcggaatgaagactaccacgactacagctccacggacgtgagccctgaggagagcccgtcggaaggcctcaacaacctctcctccccgggctcctaccagcgctttggtcaaagcaatagcacaacatggttccagaccttgatccacctgttaaaaggcaacattggcacaggactcctgggactccctctggcggtgaaaaatgcaggcatcgtgatgggtcccatcagcctgctgatcataggcatcgtggccgtgcactgcatgggtatcctggtgaaatgtgctcaccacttctgccgcaggctgaataaatcctttgtggattatggtgatactgtgatgtatggactagaatccagcccctgctcctggctccggaaccacgcacactggggaagacgtgttgtggacttcttcctgattgtcacccagctgggattctgctgtgtctattttgtgtttctggctgacaactttaaacaggtgatagaagcggccaatgggaccaccaataactgccacaacaatgagacggtgattctgacgcctaccatggactcgcgactctacatgctctccttcctgcccttcctggtgctgctggttttcatcaggaacctccgagccctgtccatcttctccctgttggccaacatcaccatgctggtcagcttggtcatgatctaccagttcattgttcagaggatcccagaccccagccacctccccttggtggccccttggaagacctaccctctcttctttggcacagcgattttttcatttgaaggcattggaatggttctgcccctggaaaacaaaatgaaggatcctcggaagttcccactcatcctgtacctgggcatggtcatcgtcaccatcctctacatcagcctggggtgtctggggtacctgcaatttggagctaatatccaaggcagcataaccctcaacctgcccaactgctggttgtaccagtcagttaagctgctgtactccatcgggatctttttcacctacgcactccagttctacgtcccggctgagatcatcatccccttctttgtgtcccgagcgcccgagcactgtgagttagtggtggacctgtttgtgcgcacagtgctggtctgcctgacatgcatcttggccatcctcatcccccgcctggacctggtcatctccctggtgggctccgtgagcagcagcgccctggccctcatcatcccaccgctcctggaggtcaccaccttctactcagagggcatgagccccctcaccatctttaaggacgccctgatcagcatcctgggcttcgtgggctttgtggtggggacctatgaggctctctatgagctgatccagccaagcaatgctcccatcttcatcaattccacctgtgccttcatatagggatctgggttcgtctctgcagctgcctacccctgccccatgtgtcccccgttacctgtcctcagagcctcaggtatggtccaggctctgaggaaagtcagggttgctgtgtgggaacccctctgcctggcacctggataccctgggccaggtaacctgagggcaggggagaggtggggtggcagacacgcagaagtgctactagtgacagggctgccatcgctcacctgtacctatttacacccagaactttccagctccccctcatcatgcctcctccttcctacctgcctcccctctgctggtgcacctcgcccaactcattcttactgcacagttcactttatttaacaattttcatgtcccccacctcatgttttcaccttttctgggccaggcatagattaagtaactgggaacgccccctctttataaagctgggcttctttctcatctctctcccaaatgttgtatctcagtattcttcctattcgagtctccagggggtggctggacctacctggtcatttgaaacaggcccccaagctggagtttttaatctggactctctggcttgctgtgacccctaaggcaatgcttctcttccctggattccttagtgtgggtcacagtactgtgttcttagttgctttagctcttaaaacatacgaagtgttgcctaaactgaaaatatttatcttttatttaaaatcagatttttgtttttagactgtcttagatctggggctattacgaatcacttcttcttcagtaaactttgactcaacttctcctgctgaaaagaagctcgctccagatgtctgcatgggtcctcggcactcttggctgaggactcaaaggttttaatcaggatcgtctaaaaatgtacctcggtgaggaggcacagattttgcctcctgttgaccagcctggtttcataccgaaaagacattgaaggactgcagaaatgtatgggtgcaccgggccgagggaagggtggctgagtgagaggcgtataaaatggggctgtgtgcatgcaggcccatgtttcagcctcagcccacgccaggtgaaaggatcagcaatgctctgttgccatcgtgctgggacgacaccagctctattgccaccgatgagtagctgaggtcagtgtgcacagagtttgaaattaagttaatagactttacagcagctggtctgacactacgcgcagtgctcggttgtttacaatcagtggggaaaagggcagaaccagtgcccggccccacactgcctctgtggcctggactttgaaaggaacccactgaacactaattatgagccctgtctttcccccagaatgcctccctgggtttcacaaacagccttgaggttggccctcctcaaggtcagccttcagatttgggagcaaacttcagagaaggcagaggaagatacattgccttgctgtgggctgcctcttctttcctcttggtgtgcgaagtatttcagaaggccattgatgaattccccctctttagctgtgtatttgtgcacgtgtgtgtgtacgtgcgtgtgtgtgtgtgttcctgtgtaagtaacagaccagactccttttctcttctgtcccgtcaccaggctcttgcttcactgcagatacagttcactctgaaagctggttgaaggagagcagcaaaaatgtatcaggggttttgcttctgtgtttcgccaaagctcataagggctgtgacccacccatatggccccagttttttctgtctcttctgttccaaagccaggagagctgacttccaggtgaagggatgggaaaagtggactctcattgtagtgactcccaacctacctaataatttgttaacttaggaatatgctatcattgttgacttgttcttccttaggagaaggacgattttcacccaccctttctgttctatggtggactcttaacaggtgctatgtgaccaggaatctagccgggagtagcagaggccctgtcttctgaagtctcaggcttagaagttaccaaagtgggctcagaaactgtcatctcctggttccaagttcgggctctggcagcccagccgctatcttagctgtctttcccagcggtgctaagagtggtctcagtgagaaggtagatgccaactggagggccagacctgtgtcctgcccatgtcctccttggtggacgtttctgtttactcagagctgctagagaccatcctgcccatccgagttctgagattgggactgtgatgttgggacctgaggactggatggtagaatactggggtcccccagctcttagcaggatgcaggctattgcttccacacccctggccgtgagaacgtggtatgtaggagagttggctgtagctttaggatttctggaagccaatttggcatggcctatttgatctctggcttgtgctcctgctacactgacagactgattgcgtggctctttcagaagacccaggaagggcagctccagccagaggaccttcctggctatgcaggtgcacagctcttaggcatcaagcaaagggtcagccagtcagtagtagtgggaggaagcccttcctcctcttatgcaagcagctcgcagccagcccagaatctcttatgcagcccaaagggcttcttgaggtagagagccctccccagtgtcttcccaggataagtagaaatatgatcacagagcaacggagcaaaggctttcgggagtgtgaggctgcatctgctggagcaaagggaaaccgtgggcttttccggccagatactcttgagctctgtgaccctgctcctgtcaccccaatttctccaagccagaggtagctttctcagagccccttggtggttctgtcctccaaatgctgctgttgggagcgggcttccagctctcagtgggcagtgcacctcctcctaaatgcaggcacttgctaggaagagtgtgagctggcgtcttctgttcaccctgcctagcagttgtcaccattcacaagtggcattatttatgttgtgctgctgtccagctgctaagatcccttcatctgcacaagccctggctagatatgtgtgaatgtgtggcatcatttcacttcagccgcccaattccatctctcctctgcagccagattcactggctgatgctcactgctcactgtctatccccacgaaatttagttttatcagtagtcttaaagtgttgatctcaaacaagtacattagaaaaatcatgtttcttctctctcatcttactttttcttctcagatttctcccttcctagaacattctctctgtttagcactaatgttcacctcgtattttttggaagtgcaaaaatctcaatttgtgtctgtttacagctctctctcctcactgctcacagcaaggggttctgtatcagtggatttcattttgtagctgctgagatgttaaggcaagcctcagcatctgcccctgctgggtgcacaatgctgcttcctcgaagagaagacacagagtccaagtggcaggacttgaggttggcttccactctgccttagaagttaattttccaaagtacattacaaatctctgaggccattaggggaaaaggaaggggtgtggtttgtctttgaaattacggttaatacttttagacagtaagtccggctggttgcagggctatttgccccgacagcatcagcctgtaacatttcttctctttcctttgtgccactgagtcgttccctggccagaggacataaatggtgctggtaggaggttatcagagtaaggaaggtagcagatataggtgcagggtgcctgtcattcactgtgttatttggtttaaatcaaagtgattctgggggaagctatgctctttcagtggataataaaattggtaactctattgtaaaacatgtcaatggtgtgtgaagaaaaatcaaccaatctgtaggtgttgataactagacagtactgtgtatgttacgtgcctgtgtggatgtgcacttccagcatggtatgtgtagcgatgtggatcatgccagagttcgtagatcctgttttggggtttgcacatggatcgtatgttaagctttttcttttcaataaatgaattttatttttatttttgaaaaaaaaaaaaaaaaaaaaaaaaaaaaaaaaaaaaaaaaaaaaaaaaa

SEQ ID NO: 815 - DNA, 3126 bp, HOMO SAPIENS
atgtcggaaagctgtttgaatgcccagcgaggagggaggcgcgagagggagcgagatagtaaagctctgtctcgggtgtgcgcgccggcgcgcagtgctcgctctcccttgggcgcgcgcgcggggggtgcgcgtgtcccgggagcgcgtccgcgcggcggcctcccgcgtgctcgtgtgcgcgcgcgtcccgggtgccgcgcgcccttcttatgcacagctgcggtgcgccccgccgcccgccagaggctcggctcgcgcggcgcggccgctgcgacttcctggagttctgcctgccgggggcgcgggcgggtgtgtgagagagaaggcgaagggagccgcggggtgggagaggagggagtcccggcgggagggcgggggagaggctggcgggaggggggctccacggagctccagccagggccgcggttcgcctgcacgtcacggctactcaaacccaagcacgtcccgaaagcggtattttctgcgtctgggaggtttttgcatcctcagttcccaccgctggggctggcggcgaccaactgtaagagaaactcactgggaggcgaggcaggggggtgcggaggatgggaaggcgactctgaagggtgggaagtgaatgctggacttgatcgtctttctctttctttcagcgcagacctgtcgcagccagagagctgtcatttcagtaccgggattcagaattgatccagtccgcagcggagggggcacatcccagctaccgagctgctgagtgtctctggctggaacaatagtatttttttctctgcgaggctgcaattaacatcttatttgttctggctccatacaggctttgtcaggatcgcggtgcggcgaccgacgttgggctcttgcattgctttgtgcttggcaatggaatcatggtttcggggtctaaacttttgtttcgttttgtagtcttaatgtatctgattctttttcaagtttccctagtaacaggtttggggacggggtgggaagaagcgagaaaaggggtgaagagaaaaaaccagattatatagaaaggaaaaagggaaaagggatgtttccccaccttttaatctaactatctatctgtctgtctatctatcatcatagatagtcattttgcctcctggacagttggctgacgaagtgtctgataaaccagcttcagatacatgctacaaaaggtcattcgcctcctgattatgtttctacttgtaaacgcagttggtggtttgcaaaacaagtgctaaaatagtgcagtgatgtggtgggaggaaaccataatgggtaattcatataaagtgctggaatcttcgtaagggtgagtttctcgagcggcaggtgaagttgaataaagcaattttccatcatttgttcccctcactcttgcatttttttcctccgcttgtttctctcccctggggcgattatggatagccaagaacaccattttaaaagagattgatagtgaaaacaggaagtttatggtctgttatccactggagttgtttgaaatattaaaattggtcctttacttcttaatgcatattaatagagtgaccctcttcaaggctttcccgtcttaaacgaatgcctgggataaacactgtaaggggaaacagttaataattccccagcaggctttaactattttcccagtaacaaatcaccggcaagagagcagcctgggtggcattttggttttgtgtcattttggttctttacaatattttttattcatttaaggaaatgttaaaaggaaataattagggtttatgtccagaacaaattttgaaacaccgtttaagcaacacattttcttttaaaaacaaagaacattgagcaacacaaaggagaaaaacattttatttatttcaacttccctagagatcgtaattatgattttcgcaaggcaatttggtcagttctgttactttatccagaggaaaaaaaagcatgacagatgtggaataaaaacggaggaaaaaatgctttggatggtttatacataaaaaggaaagaatgtaatgtgaggttcagttatacctctattttgcatctagtgatttctcatattatcttgtaacactgattttgatgtttcttagaaattcttaaagtcatgacacagtggcataagaataacagctgaaagggacaatttaaaagcctaaatcctaaatggaaaggttcacttactcccaggatcatttatattcaagtagaagtcagggcagggtcagaaaagaaagccacccttaataaagcgcttcacccttcacattgtttctcataaccttcataaattgcaggctactgagctggcctgatgatgatccttctgagatatatttatagcagatgatttgtggatgataactacgccaagcaagacactgtctccagtaaccccaggctcgtctgacttcctcaggggattataataaagaatcacaaaaagaaccctatatggacagtctggtctctggacactaacaacagcacaatccaaaggcaaagaaaggaggaaccaccttgtttcatgtctgcaagctgctccatatgaaagcattgctgacatgttgacccaacagcaaaaagagagcagcagtttacacaccctcagctctctgtcctttcctttctattgatgttggtccacttttatgactgaatacatattaaaatcaccatttcaaattataattatctgctttcattggtctctttcacaagtctatgtctatatttatgtttacatatataaacacatatacacatattttatacatacatatgtatatgtatgcacgcattatttgtaagtacacatacacgtgtgtgtatatatatgtatatgatatgtatatgtgtatttcagttgatacacatatatttgcttgggaagtttcactacattgctttgtatttctcttttataaggtaatgcatttaattccaaaactaccacattaattgtataaattgattattacataagtttccttgatgatttacagaagaactattgagaggtcagtgttagcacatcaaaatatagtctggtatggcattttaaattgacccaggtatctaatattaaagcctttcaaattt

SEQ ID NO: 816 - DNA, 2174 bp, HOMO SAPIENS
gtttttgtgttgctagccggggccagcggcggtggcggcggcggcggaggcgtcggtggaggaggggaggcggcgaggaggcgcagctcccgctgcaccgcgatcgacgctgcggagcgagcccacccgccccgggagctcgcctccccggtgctcccccgccctccccgcccccccagcggcgctgcctcctccaaatgagcgattcgcccgctggatctaacccaaggacacccgaaagcagcggcagcggcagcggcggcggcgggaagaggccggcggtgccggcagcggtgtccctcttgccaccggcggaccccctgcgccaggcgaaccggctcccgatcagggtcctgaagatgctgagcgctcacaccggtcacctcctgcacccggagtacctgcagccgctgtcctccactcccgtcagccccattgagctggacgccaagaagagccccttggcgctgctggctcagacctgctcgcagatcggcaagccggacccgccgccctcctccaaactcaactcggtggcggcggcggccaacgggctgggagcggagaaggaccccggccgctcagccccgggcgccgcctccgcagccgcggccctgaagcagctgggggactcaccggccgaggacaagtccagcttcaagccctactccaagggctccggcggcggcgactcccgcaaagacagcggctcctcctcggtgtcttccacctcctcctcgtcctcctcgtccccgggagacaaggcgggcttcagggtccccagcgccgcctgcccgccctttcccccgcatggagcgccggtctccgcatcctcgtcctcgtcgtcgcccggcggctcccgcggcggctccccgcaccactctgactgcaagaacggcggcggggttggcggcggggagctggacaagaaagaccaggagcccaagcccagcccggagccggcagccgtgagccgcggcggcggtggggagcccggggcgcacggtggcgccgagtccggggcctccgggcgcaagtccgagccgccctcggcgctggtgggggccggccacgtggcgccggtgtctccctacaagccgggccactcggtgttcccgctgccgccctccagcattggctaccacggctccatcgtgggcgcctacgccggctacccgtctcagttcgtgcctggcctggatcctagcaagtccggcctcgtgggaggccagctgtctgggggcctgggcctgccgccgggcaagccccccagctccagcccgctcaccggggcctccccgccctccttcctgcagggattatgccgcgacccctattgcttgggaggttaccacggcgcctcgcacctcggcggctccagctgctccacctgcagcgcgcacgaccctgccgggcccagcctgaaggcggggggctacccgctggtgtaccccgggcacccgctgcagcccgccgcgctctcgtccagcgccgcccaggccgcgctccccggccacccgctctacacctacggcttcatgctgcagaacgaaccgctgccgcacagctgcaactgggtggcagccagtgggccgtgcgacaagcgcttcgccacctcggaggagctgctcagccacctacggacccacacggccctgccgggagccgagaaacttctggccgcctaccccggggcctcgggcctgggcagcgccgccgccgccgccgccgccgccgcctcctgccatctgcacctccccccgcccgccgcccccggcagccccgggtcgctgtccttgcggaatccacacactttgggcctaagccggtaccacccctatggcaagagccacttatccacagcggggggcctggccgtgccgtccctccccacagccggaccctactattcgccatacgcgctgtatggacagagactagcttcagcctcggcgctgggataccagtaactacagctcttcctccaccccagccccctcaccctcctccctctccctcctcctccctccccacctgccgtcgccgctgcaacctccactactgcttgaccctgccgggattccccacccaacccttccccaccggactgtgtatttatttactataatgttagcttacaagctgggaatataagtgcattaacggcccacatg

SEQ ID NO: 817 - DNA, 2009 bp, HOMO SAPIENS
agaaactatttcagtttgctagaggaacattttaaatctgaattgaaccacccattttcctttcttagccaaatcaccaaaatgtccagttagaacaagaatttagcattctgcaaaagaagttaacagctgagataacgaggaaatattctgaaatggatcccaaatatttcatcttaattttgttttgtggacacctgaacaatacatttttttcaaagacagagacaattacaacagagaagcagtcacagcctaccttattcacatcatcaatgtcacaggtattggctaattctcaaaacacaacagggaatcctttgggtcaaccaacacaattcagcgacactttttctggacaatcaatatcacctgccaaagtcactgctggacaaccaacaccagctgtctatacctcttctgaaaaaccagaagcacatacttctgctggacaaccacttgcctacaacaccaaacaaccaacaccaatagccaacacctcctcccagcaagccgtgttcacctctgccagacaactaccatctgcccgtacttctaccacacaaccaccaaagtcatttgtctatacttttactcaacaatcatcatctgtccagatcccttctagaaaacaaataactgttcataatccatccacacaaccaacatcaactgtcaaaaattcacctaggagtacaccaggatttatcttagatactaccagtaacaaacaaaccccacaaaaaaacaattataattcaatagctgccatactaattggtgtacttctgacttctatgttggtagctataatcatcattgtactttggaaatgcttaaggaaaccagttttaaatgatcaaaattgggcaggtagatctccatttgctgatggagaaacccctgacatttgtatggataacatcagagaaaatgaaatatccacaaaacgtacatcaatcatttcacttacaccctggaaaccaagcaaaagcacacttttagcagatgacttagaaattaagttgtttgaatcaagtgaaaacattgaagactccaacaaccccaaaacagagaaaataaaagatcaagtaaatggtacatcagaagatagtgctgatggttcaacagttggaactgctgtttcttcttcagatgatgcagatctgcctccaccacctccccttctggatttggaaggacaggaaagtaaccaatctgacaaacccacaatgacaattgtatctcctcttccaaatgattctactagtctccctccatctctggactgtctcaatcaagactgtggagatcataaatctgagataatacaatcatttccaccgcttgactcacttaacttgcccctgccaccagtagattttatgaaaaaccaagaagattccaaccttgagatccagtgtcaggagttctctattcctcccaactctgatcaagatcttaatgaatccctgccacctccacctgcagaactgttataaatattacaacttgctttttagctgatcttccatcctcaaatgactcttttttctttatatgttaacatatataaaatggcaactgatagtcaattttgatttttattcaggaactatctgaaatctgctcagagcctatgtgcatagatgaaacttttttttaaaaaaagttatttaacagtaatctatttactaattatagtacctatctttaaagtatagtacattttacatatgtaaatggtatgtttcaataatttaagaactctgaaacaatctacatatacttattacccagtacagttttttttcccctgaaaagctgtgtataaaattatggtgaataaacttttatgtttccatttcaaagaccagggtggagaggaataagagactaagtatatgcttcaagttttaaattaatacctcaagtattaaataaatattccaagtttgtgggaatgggagattaaaatgcatgtttgagaatagaaaaaaaaaaaaaaa

SEQ ID NO: 818 - DNA, 1162 bp, HOMO SAPIENS
ccaagtcctcggtgccccttgccattttccagccgcgctcccacgagggtcacggcggcggggagaggtggagccgcgagagctcggccgggggccccgcctggtggtcgcggccatgacagcggctcgggactggctccttttccgcgcccctcccgccggaggtgaggggaagatgtccatgtccgggttcaagggcaaaccgaagttactggcctctatcttccaggagaaccaggagccacagccgcggctcacgccccaccgcaacattaagattacaagtggacacctgagtcagcaggacctggaatcccagatgagagagcttatctacacgactcagatcttgttgtcacccccattattgacaatccaaaggtgcagaaagcactctgacaattccaattgctaatccagcatttgtggatagctgcaaactgcgatatatgggccaaggttgctcgggtgattggtttactggcttcgcacaaaactgatctccaggaaaatacacctgttgttgaggccttccctaacagtcccagaactcctacattgcctggtgtgctgacctaaagccctcattaagaccagtaacaaatcaagcctatcttatcaactgacaacacattctggaaccatggcgtgtccatggataagacatgaagtccttctttcaagacttggttttctggtcctggaaaataccaatatggataaaagaccttcaaagctgctacgatgggtaaggaacaatgcacacagtataccattaaggcaaagaagatagtcttaatcctgtatgaaatgccaatgaagatgtaattaatgaatagacatttcattgaaatgaaatcaaaagacattttccttctctgacataacagagtagaactctctagtaagaacacaaaactgaccagcctgaccaatgtgataaaaccccctgtctctactaaaaagacaaaaattagccatgcatggtagcagatgcttgtaatcccagctactcaagaggctcaggcatgagaatctcttgaacccaaaaggtggaggctgcagtgagtcgagatcgcacaactgcacttcaccctgggcgacaaagcaagactttgttttttaaaaaaaagaagaagaagagaaaaaaaaaaaaaaaaaa

SEQ ID NO: 819 - DNA, 5169 bp, HOMO SAPIENS
agcttgcgggacacggagccgcgaggagacagctgaggcccgcggagaccagggggtgaagcctggagaccctcttgccctggcctagctgcaggcccccgggatgctttgggcatgtcctctggagccccacagaagagcagcccaatggccagtggagctgaggagaccccaggcttcctggacacgctcctgcaagacttcccagccctgctgaacccagaggaccctctgccatggaaggccccagggacggtgctcagccaggaggaggtggagggcgagctggctgagctggccatgggctttctgggcagcaggaaggccccgccaccacttgctgctgctctggcccacgaagcagtttcacagctgctacagacagacctttccgaattcaggaagttgcccagggaggaagaagaagaggaggaggacgatgacgaggaggaaaaggcccctgtgaccttgctggatgcccaaagcctggcacagagtttctttaaccgcctttgggaagtcgccggccagtggcagaagcaggtgccattggctgcccgggcctcacagcggcagtggctggtctccatccacgccatccggaacactcgccgcaagatggaggaccggcacgtgtccctcccttccttcaaccagctcttcggcttgtctgaccctgtgaaccgcgcctactttgctgtgtttgatggtcacggaggcgtggatgctgcgaggtacgccgctgtccacgtgcacaccaacgctgcccgccagccagagctgcccacagaccctgagggagccctcagagaagccttccggcgcaccgaccagatgtttctcaggaaagccaagcgagagcggctgcagagcggcaccacaggtgtgtgtgcgctcattgcaggagcgaccctgcacgtcgcctggctcggggattcccaggtcattttggtacagcagggacaggtggtgaagctgatggagccacacagaccagaacggcaggatgagaaggcgcgcattgaagcattgggtggctttgtgtctcacatggactgctggagagtcaacgggaccctggccgtctccagagccatcggggatgtcttccagaagccctacgtgtctggggaggccgatgcagcttcccgggcgctgacgggctccgaggactacctgctgcttgcctgtgatggcttctttgacgtcgtaccccaccaggaagttgttggcctggtccagagccacctgaccaggcagcagggcagcgggctccgtgtcgccgaggagctggtggctgcggcccgggagcggggctcccacgacaacatcacggtcatggtggtcttcctcagggacccccaagagctgctggagggcgggaaccagggagaaggggacccccaggcagaagggaggaggcaggacttgccctccagccttccagaacctgagacccaggctccaccaagaagctaggtggtttccaggcccctgccctccccttcctcccatccttgtccttctctccctcagaagcctcaggacccaacaggtggcaggcagtggacagggtgcccgccccacagtgctttccccagcaccccagagccagtcgggacaccccccgcagcccgtcctggtggctgtggaactgcactgggtggcgggcagatggtggaaggcagcttaggagacctcaccaaagagaagatggaccggctcttgctcccagctcctattaggcccggggtgggaccagaggtcataggtgcccaacggcagccaaaccaaagacactggtgtgcatggggcagcatggttgtgcacgtgggaccctggggcggacccaggagccaaactcttgaagcaccccctgggtcaggcccagcagcggagtggccagccccagtttcccattgctcctctctgcggccagggccaggtgggttcatatttacagatatgcccagccagtcctggtcggccacaccagtgtcccaaagaggagagcgcagcagagccaggggtctgttctgtagcagccacccccctgcccccactccagggcagccatgatgtgcttgggcccaccagggccttccgggctgctctcttccctgagcccggaaccggcgacgcacatgtgtcttttgttggtgtgtttgtttttttccagggaggtctaattccgaagcagtattccaggttttctctttgttttatcagtgccaagatgacctgttgtgtcatataatttaagcagagcttagcatttattttattctttagaaaacttaagtatttacttttttaaagctatttttcaaggaacctttttttgcagtattattgaatttattttctaaatcaggattgaaacaggaacttttccaggtggtgttaataagccattcaagtgccttacacagctttgaagaaactaggactgcagtgggctcggataggcccattgaggtttttagaaaagcaggatttgttttgttagggaggcatgattttggtgagatctttctggaagagttttccgcctctttgtgatgctgaacacccccaaggttctcccctccccccgctgcccaggtgactggcaggagctgcgactgccacgtagtggtgcctgggcccgacagcggggctctgggcatcccgggtgaccttggcccatctgcctgcattcccacccccttgggcctggctggatcccaggcagagggaccttgctgctgtgtgattggaacattcccaaatatcttgtgaatttgtaatcaaattggtctcattgggaaagactcttaattaagaggctcaggcaagcacagaggcagcccgtgggtctctgtctcagtctggaggcagcagggatgctgctgggagtccatggcacaggccacagcccctcaccttgccgcggtggctggcagcacgcctgccttgctctgccccatgccctgaacaggcatgagagctccacgtcccctagtgcaccctgagagggggctcacaagtgaccgatcctgggtgcctcagggagctcactgagggcgtgcaaagttgaaagtggcaaggctgggggagggtgtcgggtagagggaagagggcagggggctaggggaggactcagaggccatctgcagggccaagccacaggaagggctgagctggaggtgggcagggctgctccaggcaggtcagagcagtgcagggggaggagaggagaaagggaggaagctgggctgtgtggtccccatgaaggcattcagagtccacctgcagacagcgagagccccaggaaggtttgcacagctgtgccccaagcaccttggcctcctctcagctcgccgaggaggcacgctagagccgccttcccggtgggagccctctgtcccacagggagcggggagccagctttgctggggccctacctgcatgcccagccttacccctcattctcacagcacagatgaggttgagaccatgcagtcaatgcattgcttaaggtctcttatttacaaaaaaaaaccttaaacatagtcgctgtcattcagacattcagagaatggttggccacaaacaatgaccaagtattgcttggcttaacttgaaggcctgctgtctccttctgggggtcagggacgcagctccaccctcaccactagcccaccctgcccgtgggcataaccttgacgaagagagagaatgattggcatctgcttttctcttttctttgctaataattctgttcctggctgccgagagtgaagtttcaccatgtggaggtttggctcctatcacctggtggtctgattcataccctagcctgaggctccactggaagatctcgcagcctcagtgtatgggaaaccctttccccaggcttgtcccagcactgccgctccccacccctgagccaggaccccagaggatggccatgccccgtgcctggcagaggtctggtgccagcactgggagctgctccgcccttgccttggggccgagggagccctcgtccacccctgcacagcagctgggcacagaggagcgctcttccatcttgaccaggactgcaccaagaagcaccaggtgtcttcagcctccaacctccggggcgaccttctcttccagccacagtcccatgagggcccctagccagggacactggtctgtaaattgtaatcctttctccagcccagctctccacttgttccttgtgtgagctgagcaggcagtgcacctctgagtgtcccttttgtaaggcccaggggttgcactgagtctgcagaggccgcgacctcctagaacgctgtgggtgcaggtgagccggcgtgtcctggggagatgctgccagcacacaggggccctcctgctgccagcaggttggggtggttaagtcttattagtgtctattcttaaaattaagtgggctggagaagaatggagctccacatgccagcaccgtatatggaatacaaaagctggggaagcagggcctgccttacaggtgtggctgactctgagcccaggcctgcaggggtggagggcagtccctcagaatcccagaggcagtcccagcctcagaacccaggataggaaatgggtgtgtttagtggggaaagggacggggtgcagacggcagggccagtatggggccccctccctctcctctcctctcctatggtgagcccagcgtgggcaccgggccgtctcagccgtgttcccagggctgggaggacagctctggcccttcttaggcctagcctcgtcccaagctaaatgtaagccagttgggctgtgttaaaggaagcagtgtttttggttcgattctgcctctgtagctcaaggggggcagcccccagagtcctgtgcattctgccaaggctccatagctttgccaaatgcacggagctctgccattccggtgcagtgcaggccttgcgaagggtttatctgcgttcgtctcggtgggcttctcctgcatgggagttgtgttcctgtgcaagggggagctttgctccaggacaggatgactgtcttccctattcttagggacaagtcccaagatgccagaaaggcagtctcccaaggacccaccatgcagaagtgtcaataaaccacaagttctgaactctgaaaaaaaaaaaaaaaaaa

SEQ ID NO: 820 - DNA, 2207 bp, HOMO SAPIENS
cccgcccgctaatgttttggccgcttcaagatggcggtgcaggagtcggcggctcagttgtccatgaccctgaaggtccaggagtacccgaccctcaaggtgccctacgagacgctgaacaaacgctttcgcgccgctcagaagaacattgaccgggagaccagccacgtcaccatggtggtggccgagctggagaagacgttgagcggctgccccgccgtggactccgtggtcagcctgctggacggcgtggtggagaagctcagcgtcctcaagaggaaggcggtggaatccatccaggccgaggacgagagcgccaagctgtgcaagcgccggatcgagcacctcaaagagcatagcagcgaccagcccgcggcggccagcgtgtggaagaggaagcgcatggatcgcatgatggtggagcacctgctgcgttgcggctactacaacacggctgtcaagctggcgcgccagagcggcatcgaggacctagtgaatattgagatgttcctgacggccaaagaggtggaggagtccctggagaggcgtgagacggccacctgcctggcctggtgccatgacaacaagtcccggctccggaagatgaagagctgcctggagttcagcctcagaatccaggagttcattgaactcatccggcagaataagagactggacgctgtgagacatgcaagaaagcacttcagccaagcagaagggagccagctggacgaggtgcgccaggccatgggcatgctggccttcccgcccgacacgcacatctccccgtacaaggaccttctggaccctgcacggtggcggatgctgatccagcagttccggtacgacaactaccgactacaccagctgggaaacaattctgtgttcaccctcaccctgcaggctggcctctcagccatcaagacaccacagtgctacaaggaggacggcagctccaagagccctgactgccctgtgtgcagccgctccctgaacaagctggcgcagcccctgcccatggcccactgtgccaactcccgcctggtctgcaagatttctggcgacgtgatgaacgagaacaatccgcccatgatgctgcccaacggctacgtctacggctacaattctctgctttctatccgtcaagatgataaagtcgtgtgcccgagaaccaaagaagtcttccacttctcacaagccgagaaggtgtacatcatgtaggccccacgtcgtgaagcgcacgcctcggggacgggctgcagtgggcggggaggccacgccttcctcctgtcccacgctccagcctgccgcggcgtttctgtttcttgcgaccaaagatccgtgagcaacgataaatactcttaggaagagagaaaataaggtttcataagtttgtacttgaaaacatttggattggtaggattttgtaacacgtcaaccatttgatgcttctgaaaagtactttcaacttgcgaaggaaactcttctttaaagactgacctaaacaccgagggaaacttaagaacgtttaaaatataggagtccgtgatttccctgtgttttcagtttctttccttctgtgaacgatgagacttggagaacgggctggtccttcaccacttcctgttggccctggcctggccggggaaggtggcagcggcaccggactgacctgcagtgacccgcgatgccgcgccacgagggacacttatggcttcattcgagagctgctgccaaaacgcctggcgccgccaccgtcgggggctggcttcgaggacgcccgcctgcctcgcgggtcgtgtccgcgggactgtgttcgtacgtgcatagtttcgatatcacatcgcggggctgtgttcgtagctgcgtcgtttcgatatcacaccctctgtgtgccgccttacttcctgcttcgagaatgtataacgtggaaatccacgggaccaaatttctgcagaggccttgccggatggttccataactgtagagtctaattgctatccattacagaaattaatcgttcagttgaaagaagtactgatgacttttcaaaacaaatgaaccaccgtagctgacagagaaccgtatcgtagaggtttgtagttagtgcttatttttgcatgttgatgttgactagctaataaactgtaaatgtaaaccatgcgaataaaatggttttctatttctcaaaaaaaaaaaaaaaaaaa

SEQ ID NO: 821 - DNA, 7207 bp, HOMO SAPIENS
gaggcggaggggaggagggcttgcggggctggggcgttagctgcgtcccggctggaagcccgcgaagagaagtaggaggaaggcgccgccgtggccgcggccgcagtgctcgggcgcgacaagccatgagcagcgaccccgcgggcgacgccgccgtccctggcagccgctgagcccgacccccaggcagctcgccgctccctagcaccttctccagtcgacactctcgcgcccggagaaacatgattcccgtgacagaattccggcagttctctgagcagcagcctgccttccgagtgctgaagccatggtgggatgtgtttaccgattacctctcagtagccatgctcatgatcggcgtgtttggatgtactttacaggtcatgcaagacaagataatctgccttccgaaaagagtgcagcctgctcagaaccactcttccctttcgaatgtctctcaagcagttgccagtaccactccactgcctccacctaaaccatctcctgctaaccccatcactgtggaaatgaaaggcctgaagacagatttggaccttcagcagtacagctttataaatcagatgtgttatgagcgagccctccactggtatgccaagtatttcccttaccttgtcctcatccataccctggtctttatgctctgcagtaacttttggttcaaattccctggttccagctccaaaatagaacatttcatctccattctggggaagtgttttgactctccttggaccacacgggctttatctgaagtgtctggggaggactcagaagaaaaggacaacaggaagaacaacatgaacaggtccaacaccatccaatctggtccagaaggcagcctggtcaactctcagtctttaaagtccattcctgagaagtttgtagttgataaatccactgcaggggctctggataaaaaggaaggtgagcaggctaaggccttatttgagaaggtgaagaagttcaggctgcatgtggaagaaggtgatattctatatgccatgtatgttcgccagactgtacttaaagttatcaaattcctaatcatcattgcatataatagtgctctggtttccaaggtccagtttacagtggactgtaatgtggacattcaggacatgactggatataaaaacttttcttgcaatcataccatggcacacttgttctcaaaactgtccttttgctatctgtgctttgttagtatctatggattgacgtgcctttataccttatactggctgttctaccgttctctacgggaatattcctttgagtatgtccgtcaggagactggaattgatgatattccagatgtgaaaaatgactttgcttttatgcttcatatgatagatcagtatgaccctctctattccaagagatttgcagtgttcctgtctgaagtcagtgaaaacaaattaaagcagctgaacttaaataacgaatggactcctgataaactgaggcagaagctacagacaaatgcccataatcgactggaattgcctcttatcatgctctctggccttccagacactgtttttgaaatcacagagttgcaatctctaaaacttgaaatcattaagaacgtaatgataccagccaccattgcacagctagacaatcttcaagagctctctctgcaccagtgttctgtcaaaatccacagtgcggcgctctctttcctgaaggaaaacctcaaggtcttgagcgtcaagtttgatgacatgagggaactccccccctggatgtatgggctccgaaatctggaagagctgtacctagttggctctctaagtcatgatatttccagaaatgtcacccttgagtctctgcgggatctcaaaagccttaaaattctctctatcaaaagcaacgtttccaaaatccctcaggcagtggttgatgtttccagccatctccagaagatgtgcatacataatgatggcaccaagctggtgatgctcaacaacttaaagaagatgaccaatctgacagagctggagctggtccactgtgacctggagcgtattcctcatgctgtgttcagcctactcagcctccaggaattggacctgaaggaaaacaatctgaaatctatagaagaaatcgttagctttcagcacttaagaaagttgacagtgctaaaactgtggcataacagcatcacctacatcccagagcatataaagaaactcaccagcctggaacgcctgtcctttagtcacaataaaatagaggtgctgccttcccacctcttcctatgcaacaagatccgatacttggacttatcgtacaatgacattcgatttatcccccctgaaattggagttctacaaagtttacagtatttttccatcacatgtaacaaagtggaaagccttccagatgaactctacttctgcaagaaacttaaaactctgaagattggaaaaaacagcctatctgtactttcaccgaaaattggaaatttgctatttctttcctacttagatgtaaaaggtaatcactttgaaatcctccctcctgaactgggtgactgtcgggctctgaagcgagctggtttagttgtagaagatgctctgtttgaaactctgccttctgacgtccgggagcaaatgaaaacagaataacttatttttcgttaaagtttgactgaaacacgcttctaccaaatacagtataaataattaggtagtcttaatgcctttcctatttttttttccttttcacacaaaatgtacacaaagatcgcgtaaggagtatgtatttttaataaaaatttaattgtattttttcaatattaatattttgaagttttatttgtcttgaaacacaatgtatctattatctactgacagaaagagatagttccatttggttttttgtttttgttttttagttcattcttgtggaaaggagggaattataagttgcatgctttttggcattttttaaatagaggaagatattttgccaaggccatttttaacttgtttacacctgtacagggttcttatttttgttttcattgtgtgtgtatcaaggaatctgtgctagttattttaataccagctgtcttctccattggccaagaccttcattcagtggaacttcacataagtgcattgtcatagagtattttaaatgttcccctgcctccaacaaaaccctaaactgtgttatttcatatacctgacagttattgttatccttaggcaaggtttttgtgagtgaagaaaataatctttagtggctggtatgtttgaattaggcctttatcatttaacttatttgcattttaccaacattttaaaaatatttaaaacctaaatacagaggctcctcccaccttaatctcaatactgctatgtagtactggtgaacaactttggagaacctagatttattttaatattctaatagataattaaattttaaaatgatagaagcctggtttttgagtaatttaatcatctttcatatcttgatatgcagctgcatcagatggaaaaaaatttactaaagcaccctgttaaagagctggtgtgctccagtgaggccctctccttttctcagcacagtgtggcagtggtaatctattcaaattttgcctgttacacaaaataatccacttatatatacagtcagccttccgtacttgtgggttctgcatctgtggattccaccaactgtagatggaaaatactcaaaaagaaagttgtgtctgtactgaatatgtacagactttttccttgtcattattccctaaacaatacagcgtaacaactatttaaataggatttacattgttttaggtattataaattacctagagatgatttaaagtatatgggaggatgtgcataggttatatgcaatttctgcaccattttatgtcaaggattttgaacatcctcagattttggtgttcgagggcatcctggaatcaattccccatgataccgagggatgactggatattaatcgatttccctcaagcctgcccttgctgtgaactagtgctacaagcacgggaaatccatctgctctctggcttaaaatatgtatctcatctaaaattgttcgttaaagtgtgaataaattgctaagtggttgttgcttagcaataatttttgcctgaccatcagcagagcttttatttacctttgtaattaaaatccaacatagcatgggctcttgggcaaaatatttcactgactattaagcatgtagaacaggaaaatgaaatacactatttgtgcccttgacctagaaccagaaccactaattatgagaactttgttttatgtaccaaattcacattgaccattttctgagctctagactgatcgtagtaagttttgtgacttaacaatgaaagaaagtagaaagatgctttgggttttcaaaatgttgttttttaaaattgttctttgggtgaatttactcagtgctgctttgagttgtatacagaaacaaatgttgggaattgctcctcagaaatgtgttcctaagttgtgttttcaactttacatcatgaggtgaagcattagggaaagagattctttcgatttgtttaataatctaattatacagaccaaagtgctttacgtttctgctctatgttaatgttttagaatggtgattttgctgattaatttagacctggaattgaaataatgtgctcagaataataacatggttatagttcttgtatgataaagtattcaatttcagaatagtgttggaatcctgagtttgaataatgtgttgtatttagaaacatagccctatctgttttaaacaaataatttgttggccgattgtccatggttgagcatgacaaaaatacctcgtcgaaaggcaagcttaggtaactgctggcaaaacactgggtgcactatttttctggataaaatttatagttattttctatattacccttcaaaagggatctcttcaggttaaaaatcacgcttatgctgaagtctttatctggtgttaactaaaaatctcatatgggttcataaccgaggtcactaataattcatttttatcacttgtaaaaatttgctcaaaattccaaaaaaatattgatttgttttttagtgattttgcaggctgacccccaacctaagttttgataacatctggtaagtcagtatagttctgtgacttcatgttttaactaagaaggaaaattcatagatattcctattagattttataaaccttcaaaagtctgaaacttaattttgagtctaaattttctgacactggccccttttaatattgtaagtttttgttcactttcttaagtaaaaaaaacatttaattactagttagcccttaactgggaaactcaggtaatgaactgctgacttttctaaagttctttaactgatcaattctgtatagagggatatttatctaaccactttccgtattttacaagtgctctttctaaaaaggaataactattatagctctatttccccaatctctataggactcatgagagattgcttgtgtaaatataaaagcaccatatgtgttcttaactcctatggctgcttgaagctcatgatgaaaaagtctttttgtcagttttaattgttaagtacagaacaaacaattgtttggtgatggcctggttgaaagagagcatataaatatatcccagtggaactcaccaaagaagaccacacctcagaaattattgcattttctcattatgtgttgggtttgatttgcttttgtttttaatgcagctcttttaatataaagattcttgatacagtgaaatctcttatttcaagtgtaagttattcttcacccaccccttcccctgccattgtatttcccatctgtttcaaggagtttcaacaatttacattgcatcgtatgcagtaggtactgctttttcagaaagacctggaaaacatacctgctatgaatattttgttcagatgtagccatttacctggctctcaagttgtctttgtggagagggtcttagacaaaaatcttccttgtatttacttgggttaagtgaagtccaaattcttacagtatgctatttcaggatttctgatattaaaaaagaaaaaacaaaatctttatatctcttattaacacttcccccaagaagggttgtgctgttatttattttctattataagaaaagttcattctttaagtagtttcttttacctctaatctaatttcataccaaatacctgatcaatagaaatgatatatttaagcagcaaagattcctaatccatcattatgaaaagtgtcagcatacttagtagtgaacagataaagtcaatttgaatataattccactttgtttttagagactaaattaagattcaattaacattatcctatgaattctgaatgtgataatgtgattcaaacagtcaaattttattaagctcttagtaactcaggatagcattccatactaacctcaagttagcaaaacaaattagttaaacagcttggttcttagcagactgcttaaaagatcaagaaaattttctcatcttttctttctacttagaaacattgcaagaaaccttggacagtcttcaccagacctgccatgattttataagatttaggcctcagtgacatgctcctgaaagtttcctgccagccatccaaactaagcatccactcattccatcttcccaaagtcactcaccgataaaggtagcatccttaagttcatttttgaaaggtggaggaggatctccccctgcccaaaggaatttttttatcagaataccttgaaaggggggtatataaatttggaaaacttaatttcttggctgtgtttgataacagttcctatgcatggtttttaatgtgaggtaaatttgtttctttcttcagaatacctctctccaccccccaccttattcttcctctttaatgaatatttttattggagctcaaactccatgacttacgtgctcactaagttttcttttttccccttgtttactctgtctgtatgtatgtcaaaagctggcaaaacctctaaaactgtcaagaaaatgcttgaaagttgatttgtcatagtgcaaattcatgataaaatgtcttaatgttatttggatatgtagtacatagaaacagaaaaataaagtcatttttataacttaaaata

SEQ ID NO: 822 - DNA, 3193 bp, HOMO SAPIENS
cagccccagccgcatgacgcgcggaggaggcagcgggagcagccgcgggagccgggaccgggtagccgcgcgctgggggtgggcgccgctcgctccgccccgcgaagcccctgcgcgctcagggacgcggcccccccgcggcagccgcgctaggctccggcgtgtggccgcggccgccgccgccgctgccatgtctccggggaagcccggggcgggcggagcggggacgaggcggaccggctggcggaggaggaggcgaaggagacggcaggaggcggcgacgacggtgcccgggctcgggcgcacggcggggcccgattcgcgcgtccggggcacgttccagggcgcgcggggcatgaagccggcggcgcgggaggcgcggctgcctccgcgctcgcccgggctgcgctgggcgctgccgctgctgctgctgctgctgcgcctgggccagatcctgtgcgcaggtggcacccctagtccaattcctgacccttcagtagcaactgttgccacaggggaaaatggcataacgcagatcagcagtacagcagaatcctttcataaacagaatggaactggaacacctcaggtggaaacaaacaccagtgaggatggtgaaagctctggagccaacgatagtttaagaacacctgaacaaggatctaatgggactgatggggcatctcaaaaaactcccagtagcactgggcccagtcctgtgtttgacattaaagctgtttccatcagtccaaccaatgtgatcttaacttggaaaagtaatgacacagctgcttctgagtacaagtatgtagtaaagcataagatggaaaatgagaagacaattactgttgtgcatcaaccatggtgtaacatcacaggcttacgtccagcgacttcatatgtattctccatcactccaggaataggcaatgagacttggggagatcccagagtcataaaagtcatcacagagccgatcccagtttctgatctccgtgttgccctcacgggtgtgaggaaggctgctctctcctggagcaatggcaatggcactgcctcctgccgggttcttcttgaaagcattggaagccatgaggagttgactcaagactcaagacttcaggtcaatatctcgggcctgaagccaggggttcaatacaacatcaacccgtatcttctacaatcaaataagacaaagggagaccccttgggcacagaaggtggcttggatgccagcaatacagagagaagccgggcagggagccccaccgcccctgtgcatgatgagtccctcgtgggacctgtggacccatcctccggccagcagtcccgagacacggaagtcctgcttgtcgggttagagcctggcacccgatacaatgccaccgtttattcccaagcagcgaatggcacagaaggacagccccaggccatagagttcaggacaaatgctattcaggtttttgacgtcaccgctgtgaacatcagtgccacaagcctgaccctgatctggaaagtcagcgataacgagtcgtcatctaactatacctacaagatacatgtggcgggggagacagattcttccaatctcaacgtcagtgagcctcgcgctgtcatccccggactccgctccagcaccttctacaacatcacagtgtgtcctgtcctaggtgacatcgagggcacgccgggcttcctccaagtgcacaccccccctgttccagtttctgacttccgagtgacagtggtcagcacgacggagatcggcttagcatggagcagccatgatgcagaatcatttcagatgcatatcacacaggagggagctggcaattctcgggtagaaataaccaccaaccaaagtattatcattggtggcttgttccctggaaccaagtattgctttgaaatagttccaaaaggaccaaatgggactgaaggggcatctcggacagtttgcaatagaactggatgatttgaacacctgcctggaattccatcatctgaaacagagttggcagataagaatggcccctatgccaaatttggctcattgtctgtttttgtaaataaagttttattggatcacagccatgttcatttgcttatgtactgtctatggctactttggtgctagaattgagtagtggcagcagagaacgtgtggcttgtgaagcctgagatatttattttctggccattacagagaatgtttgctgacctctgggctagatcagtggttttcaaattgtggtccagggctctctagggatccctaggttctttcaaggggtctccaaggtagtattatcataacaatactaaaatgttatttggctttttcattctcattctcttttggagttttccaactttgatccgatatgggatgacattgtctctcaggtctaatggaatatatgctgtggattcttacattttaaaaatttcttcattttaaatccctgatatagtaaatattaataaatataacctatgtaaatacaaattctctgagagccttaataacttttaagatggtaaagaagtcctgagagcaaaaagtttaagaacctctggtcaagatgtgttagaaattaactactgtgctgtgttgggcaggtggactgttcacagtctttcctaaacaacactgtgatgagatactttgttagttctagaaggctaattgaaattgataaaatcattttatagtcagctacggtggcctgcacccatcgtcccagctacttgagaggctgcggcaggaggattgcttggcccaacagttgcagactagcaccagcctgggagaccctgtctcaaaaaaaaatttttttttatagaaacagtttaaattattaaattatttctaggcctacaggagaaacttctgggaaatcctagagagtaatgttcattattgttgttttaaaattttgaaataattgttttttggaaaggttgaaaaacatacagtcttccttgatctaagattcaagatagttgaaatcttttatacagagggtagaataaagatatacctaatgtaaatgatgagttaatgggtgcagcacaccaacatggcacatgtatacatatgtaacaaacctgcacgttgtgcacatgtaccctagaacttaaagtataataaaaacatatatatatatataaaaaaaaaaaaaaaaaaaaa

SEQ ID NO: 823 - DNA, 2689 bp, HOMO SAPIENS
gatcttgggctgaggttcccgggcgggcgggcgcggagagacgcgggaagcaggggctgggcgggggtcgcggcgccgcagctagcgcagccagcccgagggccgccgccgccgccgcccagcgcgctccggggccgccggccgcagccagcacccgccgcgccgcagctccgggaccggccccggccgccgccgccgcgatgggcaacgccgccgccgccaagaagggcagcgagcaggagagcgtgaaagaattcttagccaaagccaaagaagattttcttaaaaaatgggaaagtcccgctcagaacacagcccacttggatcagtttgaacgaatcaagaccctcggcacgggctccttcgggcgggtgatgctggtgaaacacaaggagaccgggaaccactatgccatgaagatcctcgacaaacagaaggtggtgaaactgaaacagatcgaacacaccctgaatgaaaagcgcatcctgcaagctgtcaactttccgttcctcgtcaaactcgagttctccttcaaggacaactcaaacttatacatggtcatggagtacgtgcccggcggggagatgttctcacacctacggcggatcggaaggttcagtgagccccatgcccgtttctacgcggcccagatcgtcctgacctttgagtatctgcactcgctggatctcatctacagggacctgaagccggagaatctgctcattgaccagcagggctacattcaggtgacagacttcggtttcgccaagcgcgtgaagggccgcacttggaccttgtgcggcacccctgagtacctggcccctgagattatcctgagcaaaggctacaacaaggccgtggactggtgggccctgggggttcttatctatgaaatggccgctggctacccgcccttcttcgcagaccagcccatccagatctatgagaagatcgtctctgggaaggtgcgcttcccttcccacttcagctctgacttgaaggacctgctgcggaacctcctgcaggtagatctcaccaagcgctttgggaacctcaagaatggggtcaacgatatcaagaaccacaagtggtttgccacaactgactggattgccatctaccagaggaaggtggaagctcccttcataccaaagtttaaaggccctggggatacgagtaactttgacgactatgaggaagaagaaatccgggtctccatcaatgagaagtgtggcaaggagttttctgagttttaggggcatgcctgtgcccccatgggttttcttttttcttttttcttttttttggtcgggggggtgggagggttggattgaacagccagagggccccagagttccttgcatctaatttcacccccaccccaccctccagggttagggggagcaggaagcccagataatcagagggacagaaacaccagctgctccccctcatccccttcaccctcctgccccctctcccacttttcccttcctctttccccacagccccccagcccctcagccctcccagcccacttctgcctgttttaaacgagtttctcaactccagtcagaccaggtcttgctggtgtatccagggacagggtatggaaagaggggctcacgcttaactccagcccccacccacacccccatcccacccaaccacaggccccacttgctaagggcaaatgaacgaagcgccaaccttcctttcggagtaatcctgcctgggaaggagagatttttagtgacatgttcagtgggttgcttgctagaatttttttaaaaaaacaacaatttaaaatcttatttaagttccaccagtgcctccctccctccttcctctactcccacccctcccatgtccccccattcctcaaatccattttaaagagaagcagactgactttggaaagggaggcgctggggtttgaacctccccgctgctaatctcccctgggcccctccccggggaatcctctctgccaatcctgcgagggtctaggcccctttaggaagcctccgctctctttttccccaacagacctgtcttcacccttgggctttgaaagccagacaaagcagctgcccctctccctgccaaagaggagtcatcccccaaaaagacagagggggagccccaagcccaagtctttcctcccagcagcgtttccccccaactccttaattttattctccgctagattttaacgtccagccttccctcagctgagtggggagggcatccctgcaaaagggaacagaagaggccaagtccccccaagccacggcccggggttcaaggctagagctgctggggaggggctgcctgttttactcacccaccagcttccgcctcccccatcctgggcgcccctcctccagcttagctgtcagctgtccatcacctctcccccactttctcatttgtgcttttttctctcgtaatagaaaagtggggagccgctggggagccaccccattcatccccgtatttccccctctcataacttctccccatcccaggaggagttctcaggcctggggtggggccccgggtgggtgcgggggcgattcaacctgtgtgctgcgaaggacgagacttcctcttgaacagtgtgctgttgtaaacatatttgaaaactattaccaataaagttttgtttaaaaaaaaaaaaaaaaaa

SEQ ID NO: 824 - DNA, 4464 bp, HOMO SAPIENS
gcggaccggccgggtggaggccacacgctaccccgaggctgcgtaggccgcgcgaagggggacgccgtgccgtgggcctggggtcgggggagcagcagaccgggaagcaccgtgaggaccgaggatttggggtggaaggcaggcatggtcaaacccatttcactgacaggagagcagagacaggacgtgtctctctccacgtcttccagccagtaaaagaagccaagctggagcccaaagccaggtgttctgactcccagcgtgggggtccctgcaccaaccatgagccgcctgctctggaggaaggtggccggcgccaccgtcgggccagggccggttccagctccggggcgctgggtctccagctccgtccccgcgtccgaccccagcgacgggcagcggcggcggcagcagcagcagcagcagcagcagcagcagcaacagcagcctcagcagccgcaagtgctatcctcggagggcgggcagctgcggcacaacccattggacatccagatgctctcgagagggctgcacgagcaaatcttcgggcaaggaggggagatgcctggcgaggccgcggtgcgccgcagcgtcgagcacctgcagaagcacgggctctgggggcagccagccgtgcccttgcccgacgtggagctgcgcctgccgcccctctacggggacaacctggaccagcacttccgcctcctggcccagaagcagagcctgccctacctggaggcggccaacttgctgttgcaggcccagctgcccccgaagcccccggcttgggcctgggcggagggctggacccggtacggccccgagggggaggccgtacccgtggccatccccgaggagcgggccctggtgttcgacgtggaggtctgcttggcagagggaacttgccccacattggcggtggccatatccccctcggcctggtattcctggtgcagccagcggctggtggaagagcgttactcttggaccagccagctgtcgccggctgacctcatccccctggaggtccctactggtgccagcagccccacccagagagactggcaggagcagttagtggtggggcacaatgtttcctttgaccgagctcatatcagggagcagtacctgatccagggttcccgcatgcgtttcctggacaccatgagcatgcacatggccatctcagggctaagcagcttccagcgcagtctgtggatagcagccaagcagggcaaacacaaggtccagccccccacaaagcaaggccagaagtcccagaggaaagccagaagaggcccagcgatctcatcctgggactggctggacatcagcagtgtcaacagtctggcagaggtgcacagactttatgtaggggggcctcccttagagaaggagcctcgagaactgtttgtgaagggcaccatgaaggacattcgtgagaacttccaggacctgatgcagtactgtgcccaggacgtgtgggccacccatgaggttttccagcagcagctaccgctcttcttggagaggtgtccccacccagtgactctggccggcatgctggagatgggtgtctcctacctgcctgtcaaccagaactgggagcgttacctggcagaggcacagggcacttatgaggagctccagcgggagatgaagaagtcgttgatggatctggccaatgatgcctgccagctgctctcaggagagaggtacaaagaagacccctggctctgggacctggagtgggacctgcaagaatttaagcagaagaaagctaagaaggtgaagaaggaaccagccacagccagcaagttgcccatcgagggggctggggcccctggtgatcccatggatcaggaagacctcggcccctgcagtgaggaggaggagtttcaacaagatgtcatggcccgcgcctgcttgcagaagctgaaggggaccacagagctcctgcccaagcggccccagcaccttcctggacaccctggatggtaccggaagctctgcccccggctagacgaccctgcatggaccccgggccccagcctcctcagcctgcagatgcgggtcacacctaaactcatggcacttacctgggatggcttccctctgcactactcagagcgtcatggctggggctacttggtgcctgggcggcgggacaacctggccaagctgccgacaggtaccaccctggagtcagctggggtggtctgcccctacagagccatcgagtccctgtacaggaagcactgtctcgaacaggggaagcagcagctgatgccccaggaggccggcctggcggaggagttcctgctcactgacaatagtgccatatggcaaacggtagaagaactggattacttagaagtggaggctgaggccaagatggagaacttgcgagctgcagtgccaggtcaacccctagctctgactgcccgtggtggccccaaggacacccagcccagctatcaccatggcaatggaccttacaacgacgtggacatccctggctgctggtttttcaagctgcctcacaaggatggtaatagctgtaatgtgggaagcccctttgccaaggacttcctgcccaagatggaggatggcaccctgcaggctggcccaggaggtgccagtgggccccgtgctctggaaatcaacaaaatgatttctttctggaggaacgcccataaacgtatcagctcccagatggtggtgtggctgcccaggtcagctctgccccgtgctgtgatcaggcaccccgactatgatgaggaaggcctctatggggccatcctgccccaagtggtgactgccggcaccatcactcgccgggctgtggagcccacatggctcaccgccagcaatgcccggcctgaccgagtaggcagtgagttgaaagccatggtgcaggccccacctggctacacccttgtgggtgctgatgtggactcccaagagctgtggattgcagctgtgcttggagacgcccactttgccggcatgcatggctgcacagcctttgggtggatgacactgcagggcaggaagagcaggggcactgatctacacagtaagacagccactactgtgggcatcagccgtgagcatgccaaaatcttcaactacggccgcatctatggtgctgggcagccctttgctgagcgcttactaatgcagtttaaccaccggctcacacagcaggaggcagctgagaaggcccagcagatgtacgctgccaccaagggcctccgctggtatcggctgtcggatgagggcgagtggctggtgagggagttgaacctcccagtggacaggactgagggtggctggatttccctgcaggatctgcgcaaggtccagagagaaactgcaaggaagtcacagtggaagaagtgggaggtggttgctgaacgggcatggaaggggggcacagagtcagaaatgttcaataagcttgagagcattgctacgtctgacataccacgtaccccggtgctgggctgctgcatcagccgagccctggagccctcggctgtccaggaagagtttatgaccagccgtgtgaattgggtggtacagagctctgctgttgactacttacacctcatgcttgtggccatgaagtggctgtttgaagagtttgccatagatgggcgcttctgcatcagcatccatgacgaggttcgctacctggtgcgggaggaggaccgctaccgcgctgccctggccttgcagatcaccaacctcttgaccaggtgcatgtttgcctacaagctgggtctgaatgacttgccccagtcagtcgcctttttcagtgcagtcgatattgaccggtgcctcaggaaggaagtgaccatggattgtaaaaccccttccaacccaactgggatggaaaggagatacgggattccccagggtgaagcgctggatatttaccagataattgaactcaccaaaggctccttggaaaaacgaagccagcctggaccatagcactgcctggaggctctgtatttgctcccgtggagcttcatcggggtggtgcaggctcccaaactcaggctttcagctgtgctttttgcaaaagggcttgcctaaggccagccatttttcagtagcaggacctgccaagaagattccttctaactgaaggtgcagttgaattcagtgggttcagaaccaagatgccaacatcggtgtggactacaggacaaggggcattgttgcttgttgggtaaaaatgaagcagaagccccaaagttcacattaactcaggcatttcatttattttttccttttcttcttggctggttctttgttctgtcccccatgctctgatgcagtgccctagaaggggaaagaattaatgctctaacgtgataaacctgctccaaggcagtggaaataaaaagaaggaaaaaaaagactctatcttctcaaaaaaaaaaaaaaaaa

SEQ ID NO: 825 - DNA, 409 bp, HOMO SAPIENS
aatcactcgacctgaatgcatggcaaggcatttttgtcatcaaaaggatgaggtctgtggtggcttaaaatgtagctgttattatagaagagtgagttacgtcttttctttagaacagaaagagaccaaagctatctcatagaactaaaacccctcaatgacaagtgaggaagtagatgtgagaggtcacgcgacctcctgaggtcccagccttcctaggcggtggagctgtagagagggctcttcactgctgcctggcccatctggggtggcctgcgctcggggacacaggcggatgaggaggatgttgtggagcccactgaaaatgagagtcttaatggtcactaggaaaattccggttgcagactttttacatcacacttgatattaggacagcctacctacttgt

SEQ ID NO: 826 - DNA, 6771 bp, HOMO SAPIENS
ggggggtctgctctgtgcggtgaagcttctcttcttggcacctgcctggcatcggaagagggccccttctccctccctgggcttttatgtggacactgtaatgcctcagttttctttctttctttttgtttttgacacagggtctcactctatcacccaagctggagtgcagtggcaccatcttagctcaccgcagcctcaaactccccagctcgggtgattcttcctgcctcagcctcctgagtagtagcagctgggaccacagacgtctgccaccaagcccagctgcaccgccagttccggggagggccctgggccagcggctgtccgccccccctcctttataaagtcctggcctcgggacagcccgcacagctgcccagcctgcggagacgggacagccctgtcccactcactctttcccctgctgctcctgccggcagctcagctggaaccatgggaggccgcgtctttctcgtctttctcgcattctgtgtctggctgactctgccgggagctgaaacccaggactccaggggctgtgcccggtggtgccctcaggactcctcgtgtgtcaatgccaccgcctgtcgctgcaatccagggttcagctctttttctgagatcatcaccacccccatggagacttgtgacgacatcaacgagtgtgcaacactgtcgaaagtgtcatgcggaaaattctcggactgctggaacacagaggggagctacgactgcgtgtgcagcccaggatatgagcctgtttctggggcaaaaacattcaagaatgagagcgagaacacgtgtcaagatgtggacgaatgtcagcagaacccaaggctctgtaaaagctacggcacctgcgtcaacaccctcggcagctacacgtgccagtgcctgcctggcttcaagctcaaacctgaggacccgaagctctgcacagatgtgaatgaatgcacctccggacaaaacccatgccacagctccacccactgcctcaacaacgtgggcagctatcagtgccgctgccgcccgggctggcaaccgattccggggtcccccaatggcccaaacaataccgtctgtgaagatgtggacgagtgcagctccgggcagcatcagtgtgacagctccaccgtctgcttcaacaccgtgggttcatacagctgccgctgccgcccaggctggaagcccagacacggaatcccgaataaccaaaaggacactgtctgtgaagatatgactttctccacctggaccccgccccctggagtccacagccagacgctttcccgattcttcgacaaagtccaggacctgggcagagactacaagccaggcttggccaataacaccatccagagcatcttacaggcgctggatgagctgctggaggcccctggggacctggagaccctgccccgcttacagcagcactgtgtggccagtcacctgctggatggcctagaggatgtcctcagaggcctgagcaagaacctttccaatgggctgttgaacttcagttatcctgcaggcacagaattgtccctggaggtgcagaagcaagtagacaggagtgtcaccttgagacagaatcaggcagtgatgcagctcgactggaatcaggcacagaaatctggtgacccaggcccttctgtggtgggccttgtctccattccagggatgggcaagttgctggctgaggcccctctggtcctggaacctgagaagcagatgcttctgcatgagacacaccagggcttgctgcaggacggctcccccatcctgctctcagatgtgatctctgcctttctgagcaacaacgacacccaaaacctcagctccccagttaccttcaccttctcccaccgttcagtgatcccgagacagaaggtgctctgtgtcttctgggagcatggccagaatggatgtggtcactgggccaccacaggctgcagcacaataggcaccagagacaccagcaccatctgccgttgcacccacctgagcagctttgccgtcctcatggcccactacgatgtgcaggaggaggatcccgtgctgactgtcatcacctacatggggctgagcgtctctctgctgtgcctcctcctggcggccctcacttttctcctgtgtaaagccatccagaacaccagcacctcactgcatctgcagctctcgctctgcctcttcctggcccacctcctcttcctcgtggcaattgatcaaaccggacacaaggtgctgtgctccatcatcgccggtaccttgcactatctctacctggccaccttgacctggatgctgctggaggccctgtacctcttcctcactgcacggaacctgacggtggtcaactactcaagcatcaacagattcatgaagaagctcatgttccctgtgggctacggagtcccagctgtgacagtggccatttctgcagcctccaggcctcacctttatggaacaccttcccgctgctggctccaaccagaaaagggatttatatggggcttccttggacctgtctgcgccatcttctctgtgaatttagttctctttctggtgactctctggattttgaaaaacagactctcctccctcaatagtgaagtgtccaccctccggaacacaaggatgctggcatttaaagcgacagctcagctgttcatcctgggctgcacgtggtgtctgggcatcttgcaggtgggtccggctgcccgggtcatggcctacctcttcaccatcatcaacagcctgcagggtgtcttcatcttcctggtgtactgcctcctcagccagcaggtccgggagcaatatgggaaatggtccaaagggatcaggaaattgaaaactgagtctgagatgcacacactctccagcagtgctaaggctgacacctccaaacccagcacggttaactagaaaaatcttctgaataagatcttccctctttgcccgtggaaaatctgaacaatctttgagccatctagaggggaaagaaaagactttgttctgtgtgtttcaagaaattcaccatgtcagcaatatgaaggatgttatggaaggcgtgctaggcattcaattcctgcagaaaccggaaatcttccatgccctgcaatgtgctcatcaaactctcagcatatggacggccagctgtggcccatatcttggtcactctgaagcacaatatttatgaagctatagaacgttaagacctctttcacagcctctccttcctacaaagactcctccaaatcttaaaatgaagcaggaaaacgagcctaagaggactttcataccgacaacatctgaaaggactagaatgttcacaccacgatctggatttcttaattttttgtttttgtttttgttgttctctagttctacgggtttgattatttagtcatgtgaaaaatattgattactcacacatagatcaagagagacacggctcctgccttcatggagcttttaggggaaaatgaagtggctcttgcagctagagttgactcagaagccgaaattcctagaaatcaggtttctactgctaggcaattgaagtataaactattttataaacactgtcttctttcgtcttcacaccaacatgcagaaaagtttctaatctcagatcggggatgtgcaacaaattccatttcaaaggaatgacctgcaaaactcctaaatattccaagcaaatgcccttaaccctgtctgttatctgctttccttgaacagaaattctacatgaccataaaacctcgaagatgggtatggcacagttcatgccctgtaatcctagcactttgggagggtgaggcaggaggatggctcaagcccaggagtttgagaccagtgtgggcaacagagtgagaaccatctctacccaaaaaaaaaattaaaaattagccaagcatggtgatgatataggagttaaggagaaatcatttaggcaaatagcaagggtaggaagtcctcagtaaggttttccatttaatgaaaagcagcccccaaaatcattttcttttctaacaaagaacagcctgtaaaatcgagctgcagacatagacaagcaagctggaagcttccacgggtgaatgccggcagctgtgccaataggaaaaagctacctagactaggcatgtccaaaatggcggctccaagttcccttctctttgccagccatgtgtacagtaaaaagcaggcaacatagtgtcagccaaagctcatttgcataataagattagggtggggtggccagctcacataggggtaggccctaggtaaatcagacaccgccttctcaagcctgtctataaaatctggtacactatgacgagggtcagatttcccattcagacgcccctctcccatgcaagagaaagagctgttctcctttctctttcttttgcctattaaacctctgctcctggccaggcacagtggctcacgcctataatcccagcactttgggaggctgaggtggtcagatcacctaaggtcaggagttcaagaccagcctggtcaacatggtgaaatcttgtctctagtaaaaatacaaaaatatatgaaatctcacatagatgataatattaagttccaaaagcaactcaacctggtagattctaattttttttgaggcagggtcttgctttgtcacccatgctggagtacaatggcacaaacactgctcactgcagcctcgacctcccaaggcctaagcaatcctcctgcctcagtccccctccaggtatttgaaactacaggtgtgtaccaccacaccgggctaatttttgtattttttgtagagacgtgggtctcactatgctgcccaggctcaggtcttaatctcctgagctcaggcaatccgcaggcctcagcctccctaagtgcggggattacaggcttgagccactgcacctagcctctatttgttttacaaaagagaaattgagatcctgaatgttaagtgacttgcctgaggccatcccactaacaggagccagggttaggattcaaaccccatccaactggtcccagagctggagcttcttgcactgccctacactacctaccatctccatcctctgggcacctttttataagaaccaaaacattacagagcattgctttgtcaactcagctgggaacatttcccagtgcaactcacatttttcactgctctgtgcctgtccgtataagctcaatgagtattgatttaggggctttggagaactttgaatgctaccccccaagtaaccattgttggcaacctggtacctctacttttagccatttctccttctctataaatagtgcagaagtaacccacttggtaacaggcatccttgccaagcctccaccactaggtcagtgtaagaattaaagaaagaggaaagaaacacaaaaagtggcttgatggttaagacaggtttattttagagaaaacacacctgagaggggctgctggctgaattaggttagagtcttttctacagactaagagtgtttaaggatttagggtgggagagtttcttagaggcttggactgcttctgtgttttttttgttgtgcttatatgggagggagagtggtgtgtttgcttttatacatttttctgcagctgtaggcataccccccaagtctgcttttagcttccctattttagtgcacctggagggaaaggaatgtgcttattaaggcccactgttttactggggcccattgtatgagggtgaagtttggcagttacccaagagacttttcctccaccttcctctgtgcccgagctgttttatctgcattttactgtctgctttttttggctgcttatagtttttaaaaaagtaatttccttaaatccagaaggctaaaaatgaagctgaaacttaaagtggcggtgtttgtccaaaataacggggctcctgctctgccagtcagtaccctcaagtcactcctgatcctcaacctccatgcctaaggctggttcaagagaccacataatatctgccttttattacatacatgatgggtgcatgggattctgcgtgccctttgcttgatatagactgctaaggtgagatggggaatatcagagtcagctgctgcttgaggaagcagaacacacagctggaggcttggaacatgtgggtccctatgagtgtagagcccatatccccatagagtctacctagagcaggggtcgccaaatgttttcttaaagagcctgatagtgtatatgttaggctttgtgagccaggtatttacagcaactcaattctaccactgtggtatgaaaacagctatagacaatcataaatgaatgatcatggctatgttttaataaaactttacagacactgaacttgaacttccattgtgatatgaaaacagctatagacaatcataaatgaatgatcatggctatgttttaataaaactttatggacactgagcttgaacttcatatatcagtcatgtgacacaaaatatcattcttctttttatttgttttcacccatttgaaaaatgtaaaaactattcttagctgtacagaaacagatggtgggtcagatttgactcactgcccatagtttccagaccatgatgttcaggttcatggaagcacttcactctacactaatttattcatccattcatcacatatgtgatgagcacatacagacacacctcagagatattgcaggctccactccagatcaccacaataatgtgaatattgcaataaagcaagtcatacacatt

SEQ ID NO: 827 - DNA, 236 bp, HOMO SAPIENS
ttctgttgggtaagcggcccagcctgtggtcctttgtcacggcagccctggcagacgaatgcaggccgcacttcccaccgccatggtgccactgtctgtggacagcatgccagcctcatcgcacgagttatccctgaagatgctcaaattagcaggctgttcttagaaccaaatttcctggacaggcttcagaaaacattctccctggtgatacagacatctgaaaacacacacac

SEQ ID NO: 828 - DNA, 5302 bp, HOMO SAPIENS
gcagaggcgcgtcgcggcggcggcgcaggtgggcgcaggcgcggaggtgggctctctagggccgcgcgggagccccgggtccgcacgccgcgcgcggaacacctgggggcggagccaagaccgcgtcccgcccactcccgggcgcgaagccccctccccgcgcccctcccatcgcgccgcagaggcgcgcaggtgcgtgaggccgcgcccgcccgggaccctgcagacgtgggccagccatggagcacatccgtacgcccaaggttgaaaatgtccgcttggtagatcgagtgtctcctaaaaaagcagctctaggtactttgtatttgacggctacccatgtcatattcgtggaaaattcacctgacccaagaaaagaaacatggattcttcacagtcagatttccaccattgagaaacaggcaacaaccgctaccggatgccctctgctgattcgctgcaagaactttcagataatacagctcatcatacctcaggaaagagattgccacgacgtgtacatctccctgatacgccttgcaaggccagtgaaatatgaggagttatactgcttttcattcaaccccatgctggataaagaagaaagagagcaaggctgggtgctgatcgatcttagtgaagaatacacgcggatgggcctccctaatcattactggcagctcagcgatgtgaatagagactacagagtctgtgactcttatcctactgaactgtacgttcccaaatcggccacggcacacatcatagtggggagttccaaattccggagtagacggcgatttcctgtcctttcttactattataaagataaccacgcctccatctgccggagcagccagcccctgtccggcttcagtgcccggtgcctagaggacgagcagatgctccaggccattaggaaagccaatccaggaagtgacttcgtttatgtcgttgacacccggcctaaacttaatgcaatggcaaatcgtgctgcagggaaaggctatgagaatgaagacaattattccaatatcaagtttcagtttatcgggatagagaacatccatgtcatgaggaacagtctgcagaaaatgctggaagtgtgtgaacttaaatctccctccatgagtgatttcctgtggggtctggagaactctggctggttaaggcacattaaagccataatggatgcaggaatcttcattgcaaaggcagtgtcagaggaaggggcaagtgtgcttgttcactgttctgatggctgggacaggaccgctcaggtgtgctcggtggcaagcctgctgctggaccctcactaccggactctgaagggcttcatggtattaattgaaaaggactggatttcctttggtcataagtttaatcaccgatatggcaatctagatggtgacccaaaagaaatctctccagttattgaccagttcattgagtgtgtttggcagttaatggaacaatttccctgtgcctttgagttcaatgagaggtttttgattcacattcaacatcacatttattcctgccagtttggaaacttcctatgtaacagccaaaaggagagacgagaactcaagattcaagaaagaacatactcattatgggctcacctgtggaagaatcgggccgactacctgaatcctctgtttagagctgatcacagccagactcagggaacccttcatctccctacaacaccatgtaacttcatgtacaagttttggagtggaatgtataaccgctttgaaaaggggatgcagccccgacagtcagttacagattacctaatggcagtgaaggaagaaactcagcagctagaggaagaactagaggccctggaagaaaggctggaaaaaattcaaaaggtccagttaaattgcactaaggtgaagagtaagcaaagtgagcccagcaagcactcagggttttctacctcagacaacagcatagccaacactccccaggattacagtgggaatatgaaatcatttccatcccggagcccttcacaaggcgatgaagattctgctctgattctaacccaagacaatctgaaaagttcagatccagatctgtcagccaacagtgaccaagagtccggggtggaggatttgagctgtcggtctccaagtggtggtgagcatgcaccgagtgaagatagtggcaaggaccgggattctgatgaagccgtgtttctcactgcctgaagtttccctttggagttccaaagtaaaggacacataagcaacacttccaaaaacaagggaacaaggtggtttattgtaaaaacaggaaatggtgcatgtcattgagaactactttaatgcagctatgaaaagggaaaaaagtgcccagttcttgatttcttagatactgaagaggacgtagtcatttcatttatcaaatataaggaaaattattcaccattttgaagctcaccctagactatgaaaattatattcactgcagagcaattacttctgtcattacctgaagtgatcagtatctatcttccttgtcatagcatgcatctctcaaaaagcctccactcctttccctcacatctgtgatcatcatgattcttttagttcacttctagatgcatattttgtgttttctaaagcatctgacattatcctcctttccgaccctcttatacatatttctaaaaacaggcacattggtgagatgcaccctttttagttaatagatgcattcctaaggagcttttaattgcttatctttcaggcataatcatcactttaacttttccttggagcatatattttgaattgtgagaataattttgttgcttttctctgagatctatagtctgtttctcctcattatttaaaaatgctaaaccttgtatctcactttttctctaacactgatttaatagctaacgaggtagaagcaacattcattctcctggtcttacatatgaatttaagtatcagctttcttgtaataaccttttattactgttctagagactacactaccgacagtgtgggccagccaccagcctgatctcaaagtatcacattataaagttagtagataaaacatctgtgagtgaaaatccagtttcaagaaccagagaattgggttgtcatgtctgtttaatgaagggaataggttttgtaatctatcattttagaaattatgtaactggctaatatggtttaattaaccttagtaacatctcatgaccactgactgctgaaagttctgaaaagaatttttgttttgttacactgcacatttaagggagagtccctcccctatcttatgagttaaaaaagacttcactaggtgacctaaattaaacttagtggggaaaagtggccatgtttggacataaataaatggtattcacactgtatggttttaatatattagtacattctagaatgtaaaaggattaaactttacaatttagatcaatattttgaatatgtgaaaggattaatttaaactttacaatttacatcaatattttgaatatctgattttttttaatgggagaattattacatttcgctgaaatgaggacgagggcaagaaagcaacattgctgatctctctagtatgaaagatttggagggagtgttgcaatatatataaatgaaaacatttaattgtgttcatcatatttaaaaatatagaatatattagagaactgtgatttaaaagtactgttaatgtaaaaaataaagcaagtgtaattaattctttcagaatataaaatttgggcattctctgctgagcagttcccaaattaagtacaaggaatgtttattcattttctgcaatatactatatgtaatagggaataccttgctaaaataaaacttaggatatagtggtaatggctttcacatttttataacataacataactcacttcacaaccttcttggagctgtccactcttagaaactctgttgcctaatattgaggatgtggctttaatttcttccgtttgacagtgtatgtctataaaaacaataaacattttttaaaaaatgacaaagtatctatgccaaacagcactatgcttttatttgaaaagcaaatagtataaatatttgatgttttaaaatgtagttttttaatatgacaacttccatatcagagtcataaacttttagtcccctcaacttttttacaagacagacattataatttatgtaacatgttcgtctgcttattagaagttaacctagcactgagatttatataaaaggttacatttattgcttattaaaactttactgtactttcacagattcttcagagcatggctaacccaacaagactaaaatatccccaacaagactaaaatatctaataatcaaacattaatcaggaagtgttttattgagagcagtggtttaaagcatagggaataatccagtataaaactgatttgaggcatattacttcccaattagtaatatatagaatgcaagtaatttattttttaaagttgatatgaaataaataggtaagaattttgaccatgacccagcaaatcagtaactgagctttttatagaatggaaggtgatgatcagagacagaaaccatagaataaatttttattctttaagagcacattagtttactttcttctcctaaaaatgaatctgagctgtccttcaatttaagcatatatatgtgtcaagcaccctctattctgatataaatttcctagtctcaatttatgcctagaaatttctttcaactttgaagtgggtctgtttagtttatatctcactgattgattgatttagaattttcttctattttaagatattaacctttaaatctctacctatgacaaattcgtacactgattagcctagtaactcctaagtattcctctttaattctgatttctatctcatcttgtaaaatcagaatacaaactttcacatgcatttcatttttcctgtggcactgcttctccgatgtgaccaatttttatgaagaaaatatatagccataaaattagaaaaaatggtcacttaatctctgttgcaaaaacagaacccacattcatacgggcatattcaaatgcagattcttttcatcgtgggtgacatacataacctttatgtaaactgatttgtctatttgttaaatgcagataactgatcacactgctctgtttcatgactgggttgtaacaaggttatccaatgaatggtatagaatgaaactgggatagttcaactttaaagaataaaaaacactgagatgaaaaaaaaaaaaaaaaa

SEQ ID NO: 829 - DNA, 446 bp, HOMO SAPIENS
ttcctccttttttgagctggtttcttgtcgctaggatggtttattccaggaaattcaggtctcacgttactaggaaggctcattcctaggaagtcatgttccatgttgctaggaaggctcattcctagaagtcatgtcccacaaagattaaaaaataaattgggggaggaaagagggaaaaaggaaggaaaggagatgattctgagggctccagacttaaaggagaaaagggtcctatctcttttctcttaatgttaaatgttattttgtttgtggaatgttcactctataatatatatgttgattaagtataccattatgcatgatttgcaatattgattgacctgtggagtgccttgagcctgtgtgtccaagactctgagtgctgagtgagtgggaagtactaaggagaattgctttcttggaaactccatgtagttcgtggc

SEQ ID NO: 830 - DNA, 1250 bp, HOMO SAPIENS; identical to SEQ ID NO: 554

SEQ ID NO: 831 - DNA, 2634 bp, HOMO SAPIENS
tcccttgacttgcttgcggagggagcggccggcggagggagcggcaggtggagggagtggcacgaggcatgcggagggagctgcaccgacatcacataaacgcactgggcagctcgcaggcgccattcgctcttcagacgccggagacgtaggagtgggtcttcagactccaaaggggttggactaatggcggatgctgaggcgagggctgagttcccggaggaggccagacctgacaggggcaccttgcaggtgttgcaagatatggccagccgcttgcgaatccattccatcagggccacatgctccacgagctccggcagttcttctgagatcatgtctgtgctgttcttctacatcatgaggtacaagcagtcagatccagagaatccggacaacgaccgatttgtcctcgcaaagagactgtcgtttgtggatgtggcaacaggatggctcggacaaggactgggagttgcatgtggaatggcatatactggcaagtacttcgacagggccagctaccgggtgttctgcctcatgagtgatggcgagtcctcagaaggctctgtctgggaggcaatggcctttgcttcctactacagtctggacaatcttgtggcaatctttgatgtgaaccgcctgggacacagtggtgcattgcccgccgagcactgcataaacatctatcagaggcgctgcgaagcctttgggtggaacacttatgtggtggacggccgggacgtggaggcactgtgccaggtattctggcaggcttctcaggtgaagcacaagcccactgctgtggtggccaagaccttcaagggccggggcaccccaagtattgaggatgcagaaagttggcatgcaaagccaatgccgagagaaagagcagatgccattatcaaattaattgagagccagatacagaccagcaggaatcttgacccacagccccccattgaggactcacctgaagtcaacatcacagatgtaaggatgacctctccacctgattacagagttggtgacaagatagctactcggaaagcatgcggtctggctctggctaagctgggctacgcgaacaacagagtcgttgtgctggatggtgacaccaggtactctactttctctgagatattcaacaaggagtaccctgagcgcttcatcgagtgctttatggctgaacaaaacatggtgagcgtggctctgggctgtgcctcccgtggacggaccattgcttttgctagcacctttgctgcctttctgactcgagcatttgatcacatccggataggaggcctcgctgagagcaacatcaacattattggttcccactgtggggtatctgttggtgacgatggtgcttcccagatggccctggaggatatagccatgttccgaaccattcccaagtgcacgatcttctacccaactgatgccgtctccacggagcatgctgttgctctggcagccaatgccaaggggatgtgcttcattcggaccacccgaccagaaactatggttatttacaccccacaagaacgctttgagatcggacaggccaaggtcctccgccactgtgtcagtgacaaggtcacagttattggagctggaattactgtgtatgaagccttagcagctgctgatgagctttcgaaacaagatatttttatccgtgtcatcgacctgtttaccattaaacctctggatgtcgccaccatcgtctccagtgcaaaagccacagagggccggatcattacagtggaggatcactacccgcaaggtggcatcggggaagctgtctgcgcagccgtctccatggatcctgacattcaggttcattcgctggcagtgtcgggagtgccccagagtgggaagtccgaggaattgctggatatgtatggaattagtgccagacatatcatagtggccgtgaaatgcatgttgctgaactaaaatagctgttagctttggtcttttggcctctttaccctgtgtttatgtttgttccaaaaccatcatttaaatctctactgtcacattttgtttcttaaaagcaaagccagctaacaccttcattcatccctagttcggaaattcaagctaactacttaccctttaaactgtcactgcatatgcaagtaccgctctaatttttggatcattaaagggagttacacaacttttaagtgaaaaaaataggtaacaaaacaaccacctgatagtaagttttctgataagactatagataagtggtagaggtaatcaattcttccgaagtgtttccttcgtgaataactggtagaggtaatagttttttcaatgtatttccttcatgagtaaagaaaatgtggattgaagtatagattccagtagcctagtttccacagcacgataacaccatgacgcctactgctgttcccaccttgggattctgtgtgctgccatcccacctgcagctgccctggaattcccttcgctgtttgccttcatctccctccacgtttgagaggctgtcaggcagcagcgaaagcttgttaggatgtcctgtgctgcttgtgatgagagcctccacactgtactgttcaagtcaatgttaataaagcatttcaaaaccagctgctttattca

SEQ ID NO: 832 - DNA, 2360 bp, HOMO SAPIENS
gacgggcccggctgtagcggcggcggccgcggcgtcttaagcggcgcccagtgcaggatggtgctggaggcggcggcggccgtggtggcggcagcgtcgttggcggcagcgggagtgggtgcggcggcagcggcggcggcgcccgcgggtggtataaaatggcggatttcgaagagttgaggaatatggtttctagttttagggtttctgaactacaagtattactaggctttgctggacggaataaaagtggacgcaagcatgacctcctgatgagggcgctgcatttattgaagagcggctgcagccctgcggttcagattaaaatccgagaattgtatagacgccgatatccacgaactcttgaaggactttctgatttatccacaatcaaatcatcggttttcagtttggatggtggctcatcacctgtagaacctgacttggccgtggctggaatccactcgttgccttccacttcagttacacctcactcaccatcctctcctgttggttctgtgctgcttcaagatactaagcccacatttgagatgcagcagccatctcccccaattcctcctgtccatcctgatgtgcagttaaaaaatctgcccttttatgatgtccttgatgttctcatcaagcccacgagtttagttcaaagcagtattcagcgatttcaagagaagttttttatttttgctttgacacctcaacaagttagagagatatgcatatccagggattttttgccaggtggtaggagagattatacagtccaagttcagttgagactttgcctggcagagacaagttgccctcaagaagataactatccaaatagtctatgtataaaagtaaatgggaagctatttcctttgcctggctatgcaccaccgcctaaaaatgggattgaacagaagcgccctggacgccccttgaatattacatctttagttaggttatcttcagctgtgccaaaccaaatttccatttcttgggcatcagaaattgggaagaattactctatgtctgtatatcttgtacggcagcttacatcagccatgttattacagagattaaaaatgaaaggtattagaaaccctgatcattccagagcactaattaaagaaaaacttactgcagatcctgatagtgaaattgctacaactagccttcgggtatccttgatgtgccctttaggaaaaatgaggctgacaatcccatgccgtgcagtgacttgtacacatctgcagtgttttgatgctgccctctatctacaaatgaatgagaaaaagcccacctggatttgtcctgtgtgtgacaaaaaagctgcctatgaaagtctaatattagatgggctttttatggaaattctcaatgactgttctgatgtagatgagatcaaattccaagaagatggttcttggtgtccaatgagaccgaagaaagaagctatgaaagtatccagccaaccgtgtacaaaaatagaaagttcaagcgtcctcagtaagccttgttcagtgactgtagccagtgaggcaagcaagaagaaagtagatgttattgatcttacaatagaaagctcttctgacgaagaggaagaccctcctgccaaaaggaaatgcatctttatgtcagaaacacaaagcagcccaaccaaaggggttctcatgtatcagccatcttctgtaagggtgcccagtgtgacttcggttgatcctgctgctattccgccttcattaacagactactcagtaccattccaccatacgccaatatcaagcatgtcatcagatttgccaggtttggattttctttcccttattccagttgatccccagtactgtcctcctatgtttttggatagtctcacctcacccttaacagcaagcagtacgtctgtcaccaccaccagctcccatgaaagcagtactcatgttagttcatccagcagcaggagtgagacaggggtcataaccagcagtggaagtaacattcctgacatcatctcattggactaaaggaggactcacttgattctgggaatcattcatcagaactgctttttcttggatctctagtctgtggaaacgttcttttttttttttttttaataatttggtatttattgaaagtcagatggattcttttgctttctgaggggtgaacacagaagactgcaacaagaaccaaatgacatgcaaggatttttcttaattatgctgtactctcagcatcagatacattcaaccataactgtatcttcctgagagatggatttcactttcatacgttaatggatggagtctacaaatcagtgaaaaaagtttttgttaaaataaagagcaataaaatta

SEQ ID NO: 833 - DNA, 2775 bp, HOMO SAPIENS
tgccgcttaataccatcacatgatcctccccgaggccctgtatttaattaaaatagagagggaggcaccacagatgccagaagaacactgttgctcttggtggacgggcccagaggaattcagagttaaaccttgagtgcctgcgtccgtgagaattcagcatggaatgtctctactatttcctgggatttctgctcctggctgcaagattgccacttgatgccgccaaacgatttcatgatgtgctgggcaatgaaagaccttctgcttacatgagggagcacaatcaattaaatggctggtcttctgatgaaaatgactggaatgaaaaactctacccagtgtggaagcggggagacatgaggtggaaaaactcctggaagggaggccgtgtgcaggcggtcctgaccagtgactcaccagccctcgtgggctcaaatataacatttgcggtgaacctgatattccctagatgccaaaaggaagatgccaatggcaacatagtctatgagaagaactgcagaaatgaggctggtttatctgctgatccgtatgtttacaactggacagcatggtcagaggacagtgacggggaaaatggcaccggccaaagccatcataacgtcttccctgatgggaaaccttttcctcaccaccccggatggagaagatggaatttcatctacgtcttccacacacttggtcagtatttccagaaattgggacgatgttcagtgagagtttctgtgaacacagccaatgtgacacttgggcctcaactcatggaagtgactgtctacagaagacatggacgggcatatgttcccatcgcacaagtgaaagatgtgtacgtggtaacagatcagattcctgtgtttgtgactatgttccagaagaacgatcgaaattcatccgacgaaaccttcctcaaagatctccccattatgtttgatgtcctgattcatgatcctagccacttcctcaattattctaccattaactacaagtggagcttcggggataatactggcctgtttgtttccaccaatcatactgtgaatcacacgtatgtgctcaatggaaccttcagccttaacctcactgtgaaagctgcagcaccaggaccttgtccgccaccgccaccaccacccagaccttcaaaacccaccccttctttagcaactactctaaaatcttatgattcaaacaccccaggacctgctggtgacaaccccctggagctgagtaggattcctgatgaaaactgccagattaacagatatggccactttcaagccaccatcacaattgtagagggaatcttagaggttaacatcatccagatgacagacgtcctgatgccggtgccatggcctgaaagctccctaatagactttgtcgtgacctgccaagggagcattcccacggaggtctgtaccatcatttctgaccccacctgcgagatcacccagaacacagtctgcagccctgtggatgtggatgagatgtgtctgctgactgtgagacgaaccttcaatgggtctgggacgtactgtgtgaacctcaccctgggggatgacacaagcctggctctcacgagcaccctgatttctgttcctgacagagacccagcctcgcctttaaggatggcaaacagtgccctgatctccgttggctgcttggccatatttgtcactgtgatctccctcttggtgtacaaaaaacacaaggaatacaacccaatagaaaatagtcctgggaatgtggtcagaagcaaaggcctgagtgtctttctcaaccgtgcaaaagccgtgttcttcccgggaaaccaggaaaaggatccgctactcaaaaaccaagaatttaaaggagtttcttaaatttcgaccttgtttctgaagctcacttttcagtgccattgatgtgagatgtgctggagtggctattaacctttttttcctaaagattattgttaaatagatattgtggtttggggaagttgaattttttataggttaaatgtcattttagagatggggagagggattatactgcaggcagcttcagccatgttgtgaaactgataaaagcaacttagcaaggcttcttttcattattttttatgtttcacttataaagtcttaggtaactagtaggatagaaacactgtgtcccgagagtaaggagagaagctactattgattagagcctaacccaggttaactgcaagaagaggcgggatactttcagctttccatgtaactgtatgcataaagccaatgtagtccagtttctaagatcatgttccaagctaactgaatcccacttcaatacacactcatgaactcctgatggaacaataacaggcccaagcctgtggtatgatgtgcacacttgctagactcagaaaaaatactactctcataaatgggtgggagtattttggtgacaacctactttgcttggctgagtgaaggaatgatattcatatattcatttattccatggacatttagttagtgctttttatataccaggcatgatgctgagtgacactcttgtgtatatttccaaatttttgtacagtcgctgcacatatttgaaatcatatattaagactttccaaagatgaggtccctggtttttcatggcaacttgatcagtaaggatttcacctctgtttgtaactaaaaccatctactatatgttagacatgacattctttttctctccttcctgaaaaataaagtgtgggaagagacaagaaaaaaaaaa

SEQ ID NO: 834 - DNA, 5157 bp, HOMO SAPIENS
agtgacgtcacagctaagcgcctctgtatcgtcgcgaatccgtcgcggaacctgtcttctgtctttacccagagctaccatgagcaagcggaaccaggtatcgtacgtgcggccagccgagccggcgtttctggcccgcttcaaggaacgggtcggctacagggagggacccaccgtagagactaagagaattcagcctcagcccccagatgaagatggggatcacagtgacaaagaagatgaacagcctcaagtggtggttttaaaaaagggagacctgtcagttgaagaagtcatgaaaattaaagcagaaataaaggctgccaaagcagatgaagaaccaactccagccgatggaagaatcatatatcgaaaaccagtcaagcatccctcagatgaaaaatattcaggtttaacagcaagctcaaaaaagaagaagccaaatgaagatgaagtaaatcaggactcggtcaaaaagaactcacaaaaacaaattaaaaatagtagcctcctttcttttgacaacgaagatgaaaatgagtaagtgtaaatattttgaatttagtctactttgaaagtatatggagtgttcattaaaatcacattttttcctattataaagatactacaagttctttatagaaagtttaggaaatagagaaaaaaatttaataaactacatctattcatcaatacccctctgacttaaaatgccaactctatagaaattagctagtattaacattttgttatttcccttgtgtggttgtatatatatgtaaattatatttttaagcaaaatacattttttgtgtgtaaacaaaattttataaatacaactgtattgcaaatgttctttgtcctgcttctcacttgacattgcattacgagtattcttccaggtcagtaaatttcaaaaacctgacattaatagctacagataatttcataaacatctcattgtatctttttcattagcaatagctccactttgggtgggggagatgataatgtgccttgttaaaaatacctccccaactcctgctaagggtggccatgagactcagctctggcaagttaagaaatacaggtggaattctgcttgataaagctgctgggttttttgttacaaaaggacagacttggcaaacatgagcctttgctcttatcttttcatcctacttggagtgcagagataaaacctgagtaccagagccacttttaggcataaggaaggcagccatgtgctttgggtcatgttagtaaaaagactcagagcttggctccttgctgacatgcctggaggagctgctacaccagcttggattgctgacctctgacttcttggtagtgagaagaataaacactgtgcttaattaggccttggtcaggtttcttttatatgcagccaaatgcagtcctaagtaatacaataaataactggtcaaactgttactggtggagggtgtccaggttcttggcattttggacaaataattgaacaaaacgcacaaagcaatgaatatcctctagaggtttgccattggttacttggcgtacaccctgtgtaaatgaagtagtggcccgtgacctgtctgattggtgcagaaagtgaccaatcagaggctgaagtgaagttacaaagttatactcctgtgtaaatgaggacttggcctatgaccagtctgattggttgcaggaggggaccaatcagaggcactttcatttttcatctgcaatgcagaaaaggcaaggggattgcaaagggagtagcctctgatccttttgttacttaggtatggagaggtggggttttccttttgattcagttctaggaagtcaatgtgaatcagccttaggttccctgtctccagaccctattctcctgcctcattttccccctgagagacgtgatcctcgtaaatctttatgggaggctgagagactgagggtctttcttctgtaactgcttcatgctaacttgggacacagtccctacctattggagatcacgtaactctcaccctgctttgtctaggggagacagggtagcttcttgatggccggtggtgtcttctcctgaaactggctagaaatcttgtcacatgatcatctaacttggtggtctctaggcaaaaggaaatggatttggttaaaagatttaacagatatggtccaaaaaccaaggcaaatataatcattaataatgggctggccaagggagggagccatgaaacccaacttagtgccctttaggtgccccagctgttgtcatattttagaggcccagtcagctagttttcaggtggtgtcccttactaatcctgattggttgacatcaaaacagcattcttcttctaggaaaatacataagccacctgtttcagcagttaggagatctagtccccttcgattttgcaaagcgaccactgccaaggagcctatccgaatttgtaaggtgacaatactttgagcaatgttatccaggctttccataaaatccttggacaagcgttggtaataggatagggaagttgcaatcccgctaactcccattcctacctctgctgttattcctagccgttgtgtctggtggttgcagttaaaggtataatgagggattggttgttgggagctatattaatttagggacatacaatatttctgtctccagtctaccacttccaccaaagacaaatcacagcagaaccgacctaacttcaaaataaactgcagtcccatatactgggcctgattacccacacaaagtgcaacaagaatcattgtccatatagactctcctagattggctttgctagaacatttcacaaggccatttcagtcaaagtcctgagaaagtaaccggtttcaattgtgccctattacaaaagaaaacgtggttattaactttatacagacaaatgccatgaattaagaatattcataaatagtttacaaattctggagaaattagaatactcaatacacttaaagtgtatttcaaggctataaatagctcaaaataaaaagattattcagactctgaaaaaacaaaaagaagtagcaatatttcaaacaacaaaagccatacaaattatttcagtcttccattagttcatttcagtccatgtaatcaactcctgctctacttcatattcatctttatgaacacatcagcctttcaattagtgccttggaagttttctgtctaatccaatggcacactctccaaagttaccagaaacctgcattcaagagttcttttcatgaactccaaagaagtaagccttggactgtagctgattataagtcactttttttttttgagaaggatcagagcaaaacatcaattatggatgacaaaagtcttaagacagccataaagacacagttgacaaatgtggctatttctgtggcttacaacaatttaacataatcattacaacatatattaagacatatcagaattttagaactctcatacaatcctggaacacatattaacaacaaatctctatcagtataacccaaaggaagctaaacaccacctcacacttgacaatgtttcctgtataattcaaacattacaaataagcctaatataagcctaatatgtcactcttgaacttcaggaagcctaatatccaaaaagttagtttaaggtcaaaagtttttgaattaacttttttccattagtatggtcatatctttcttactaatttgtaagttatgtaatttatcaatttttttttgttgttctgtttcccaacctctatgtcagataaagaatcacccaggccagacacaatggctcatgcttgtaatcccaacactttgggaagccaaggtgggagaattgcttgaagccaggaatctgagcccagcctgggcgacaaagcaatacccctatctctacaaaaaataaaaaatagccaggtgtagcgacacacacctgtagtcccagctgctcaggaggctaagcaggaggatggcttgggcccaggagttcaacgctgcagtgagctatgattgcaccactgcactccagcctgggcaacagagtaagaactgtctcaaaaaaaataaaaaatagaaataaattttaaaaaaagaattacccatattctctttgtttttgtttattcacattaacctttattctatctggaatttattagagtatacttttttctcaaataatcaattgtcctagaaccatgtgtttctcatttatttgaaaggccatctagtgagagatttctccaaatgttggggtagggaagggaggggaagcactttaaagtctgagcctttagaggtgattcctcaagaccctgcttaatcctaacaattttcctcattagtaaaagtcagcccaaactgggggcttgttaagatccttaccagccacatccatctgaaattatgaatttcaaagtatcttacaaatttggtgccacattatcttttttaagtttgttttgttttgtttttttgagacagagtctcgctctgtcacccaggctggagtgcagtggcgcgatctcagctcactgcaagctccgcctcctgggttcacaccattctcttgcctcagcctcccaagtatctgggactacagtcgcccgccaccacgcccggctaatttttttgtatttttaatagagacggggtttcactttgttagccaggatggtctcaatctcctgacctcatgatccacctgcctcggcctcccaaagtgctgggattacaggcaggagccaccgcgcctgggcctttttttaagttttaagtacctataaagaacactgaaaggtgatgtgtgtggatgagctaggaagacctgaaataggctctctctaaattaatcaaattaatcctgaagccattctgcaatactgtctttaatgtatactcacttgttatagaagccagggttttttcccctaatttgtatcattgctatatgtgttattgtaccaaactacactgttttaattgctgtaaattttaatatgtcttagtatctgggtgtgggaatcttgaaagcatggagtttgtgttattcaccactgtattctcaaatatcagaagagtatctggcctactaagtgcacaataaacatagttaaaatgaaaaaaaaaaaaaaaaaa

SEQ ID NO: 835 - DNA, 5701 bp, HOMO SAPIENS
gcagtgccgtagtagcgggccacggagatagacagctttggagctgctgaactccgagcacagggtgaagaccccggcgctaccaaccacagcctggcagcctggtctccgcggcacccactggggctgcatccccctcccccgagagggctgcgcaggcgggaagacgcccagaggccagcttcggtcccccttctgtctctcggttcctctttcctcccaagtaagggaataaaccgcgaagaaggagcgccccgggccaccgcgcaaccaagtgttgcctggtgaggaagagccaggacttctgaatttaccttgaatacagacaggaggatgttgcctaaggaatagcagagatcttgtctcatcttctgagaggtgcctgctgctgctgtatacacttgagtgctcccagaagtctcctgaaaggcttacatcgcaaacctgcaatgagccaggccctgggctgggcctccacttcagcctagtgaacaaaactccatcactgccctttagccactcacataaagtttaaaaatgggtgaagaacggtgggtctccctcactccagaagaatttgaccaactccagaaatattcagaatattcctccaagaagataaaagatgccttgactgaatttaatgagggtgggagcctcaaacaatatgacccacatgagccgattagctatgatgtcttcaagctgttcatgagggcgtacctggaggtggaccttccccagccactgagcactcacctcttcctggccttcagccagaagcccagacacgagacctctgaccacccgacggagggagccagcaacagtgaggccaacagcgcagatactaatatacagaatgcagataatgccaccaaagcagacgaggcctgtgcccctgatactgaatcaaatatggctgagaagcaagcaccagctgaagaccaagtggctgcgacccccctggaaccccccgtccctcggtcttcaagctcggaatccccagtggtatacctgaaggatgttgtgtgctacctgtccctgctggagacggggaggcctcaggataagctggagttcatgtttcgcctctatgattcagatgagaacggtctcctggaccaagcggagatggattgcattgtcaaccaaatgctgcatattgcccagtacctggagtgggatcccacagagctgaggcctatattgaaggagatgctgcaagggatggactacgaccgggacggctttgtgtctctacaggaatgggtccatggagggatgaccaccatcccattgctggtcctcctggggatggatgactctggctccaagggggatgggcggcacgcctggaccatgaagcacttcaagaaaccaacctactgcaacttctgccatatcatgctcatgggcgtccgcaagcaaggcctgtgctgcacttactgtaaatacactgtccacgaacgctgtgtgtccagaaacattcctggttgtgtcaaaacgtactcaaaagccaaaaggagtggtgagtttcaccgcaaatgtgaattatcaacgttgtgtgacggtggggaactcagagaccacatcttactgcccacctccatatgccccatcacccgggacaggccaggtgagaagtctgatggctgcgtgtccgccaagggcgaacttgtcatgcagtataagatcatccccaccccgggtacccaccccctgctggtcttggtgaaccccaagagtggagggagacaaggagaaagaattcttcggaaattccactatctgctcaaccccaaacaagttttcaacctggacaatggggggcctactccagggttgaactttttccgtgatactccagacttccgtgttttggcctgtggtggagatgggacagttggctggattttggattgcattgataaggccaactttgcaaagcatccaccagtggctgtcctgcctcttggaacaggaaatgaccttgcccgttgtctccgctggggaggaggttatgaagggggcagcttgacaaaaatcctgaaagacattgagcagagccccttggtgatgctggaccgctggcatctggaagtcatccccagagaggaagtggaaaacggggaccaggtcccatacagcatcatgaacaactatttctccattggtgtggacgcttccattgcacacagattccatgtgatgagagagaaacatcctgaaaaattcaacagcaggatgaagaacaagctgtggtactttgaatttggcacctcggagacttttgcagcgacctgcaagaaactccacgaccacattgagttggagtgtgatggggttggggtggacctgagcaacatcttcctggaaggcattgccattctcaacattcccagcatgtacggaggcaccaatctctggggagaaaacaagaagaaccgggctgtgatccgggaaagcaggaagggtgtcactgaccccaaagaactgaaattctgcgttcaagacctcagtgaccagctccttgaagtggtggggctagaaggagccatggagatggggcagatctacaccggcctgaagagtgcaggcaggaggctggcccagtgcgcctctgtcaccatcaggacaaacaagctgctgccaatgcaagtggatggagaaccctggatgcagccatgttgcacgattaaaattactcacaagaaccaagcgcccatgatgatggggcctccccagaagagcagcttcttctcgttgagaaggaagagccgttcaaaagactaaacagtgtgccaaacaccagctaaaccaagagagaaagcaagaaactataatgcacactcacacacaatttatgtgcacactcacacatgcacacacacacacacatacacactcttctctaaccagtggaagcaaagccacccttcgggaagaaaacgtcaccttgccatacattctgtttcaacagtgggtacacccctaacagagccagtgccaacaaaacattttgaatggacttagggcccatgaggttgtggctggcttaggcagcaacctccacattcccacaggccttgagcagaattttctgagactgaagggaaatccccctttctttctaccagccctgcaagtttcctcatggacgctcgcgaggagcaggctgcaggtttcctgcctatggtgagatcagatgtggccaagggaaggagctctggttccagagaatttgcacaaagttccctctgtacagagacaaaacggcctccggctctcagagcataatccttggcagggctcagcaggcgcacgttggtttcttggtcgtcctttgagtgacaacttctccgtgaacctgctgaagaggcagaaaggctgtggaaagctgtatttccattcttgggtttctgcgccgtcggtgggcacttgttattttccaggaaccttctcctggtgtctacatgtttgcttagaggcggctccaagagcccccagagctgcctgcatagcacaccttagatgtggtatttattttcttagttctgtgaacacctgggagggagagcggagaaactgggatttatttttcaaattggtgtcataatattgtgtaaaaagggaaggaaaaaaaaaaccacccccagcttctttctttttcaagccaaagcgtgtttcctgtttgagttccaagccctggtggcagactattcctgaaggcagaaaagatgggaaggaaggaactttgctggggaaaccaggagacggttccctcctgcttctttgcactcaccactcccagagtatgacctgaaggaccttctgatggtcttaacgtgtgtgcgcgcgtgtgtgtgtgtgtgtgcgtgtatatatatatatttagcctatatatttatatatatatatatataaatatttatttactgatggacttttcctcattggaaaaaaaaaacataggtagtatgagacagaaagtggtaaggaaaaagaaggttctcactcccccactccaccgtttcattgtcaggacgcatctccctgtggtgatcacaagggttaaggggaatgaaagtagctccctattatgaacgaagagaccgagaactcctattctggatcctcaaaacaagcatgaaagacctgctgggctggatttactctcccatttgtcagataagaaaattgagtctcagaaaagttcagagacttttccatggtgtcttggctaatgcagcttgagagtaggtgccgttacaaagatatttaatggagaaaagaacccacacatctcagagtagggtcatttctggtcactgaaaagtgagtccacttggatccaggttgccagggaggaacaaacgtacagcacatgcgtggatgggatatccccacacaagaaaacgagcgcctcatgctgcttcccagaggttctctctgacctgaatggaaaagaagttggtctgagatcgaaggtactaaacagatcatcagactgaactctccacatgtcacctcatcatggtcatcatagtctcttagtttggaaacaaccttggctgcagggatgacctcagtggagagtcacaagaaggactgaggcgtcttctgcaagatactgccagccaggacagaggggtctcagcagagctcagtgggcttcattcagcaagtgccagcattaccatcctttcccaagggcaaggccatgcagagcttcattgggcctccatccctctctgagatttatcagtggaaacttggacccacttgatatcgttccactgagctgcctctaatcttgcattggacaggagctttggacaaagaagggaatattaagattgtgtgtacaaatggcacttaactgtgaaggaccacctaggagcaagatcttggaccattctgctcaacctaacagtgcagaatgctaagtaaggggaaaaccaggccacctgaagaatatctttaatgatggtattcttggtgatgggaccaacaagctccagaattactacaggtactatcttggaagccacttgtttctgaaactgaggcaggttcaggtttggggtcactgattctaagacatttacagaagttcgtgcatgtgtttcagccatgatccccaagattgaggctattgagacatggcactatcaacaggtgaaattgattctcagagactcacaggtctcatgaaggggcagtgcagaaaatggcccttacctgctgcaccctagtgcacaggacttgcaatgttgcttgagagacatatcccaagtccttcttagaggcatggagtataacaacttcagtggaattgcacttccagtttggtaaccttagtaaatcttgtgttgttgtttaatcgtgccttgcaaatcatcctttaaacactatgactgtggtttcttgtggtggagtccctcatcatagtgaccctcatagcaacctctgaggttagcagagaaggtattattatctcgatctcaatgaggagaacaaggcttaatgaggtttagtgacttctcaaagccacatggttagtcaggggagaacctaatcccttatttcttatcttattctgattctggccatgctacaaacatgttctcacctgccccccatgcttctaccccaacagcaataaaaactgtaaagcaggaaaaaaaaaaaaaaaaaa

SEQ ID NO: 836 - DNA, 390 bp, HOMO SAPIENS
tcaggctcagtgtacacagctgcgagaagagcaagcggtttcagaagcttagagctgtaatggaagtgaaatcagcatggtcaaatgcagttctcattactttggagccttttaaatatttttgttcaatattttcattaatatgctctagatgctatataaatttgattactatatatttgctttggcttctttttattgctattgggttttgttaaaagttaccatcaagctacaggtatcaacaccttccttagtattccatttcatcacttgcttgcattttttctgacttgtttctgggaaagtcatttcgtcttagcttgcggttatttaattattttgtgtgtgagacttaggaggttggcatagaacttggttggctagctt

SEQ ID NO: 837 - DNA, 4604 bp, HOMO SAPIENS
atacctacaccggctttttgtacgactgttggccctggagaacgatcctttggtggcgagggcggggaggacgaaagcgcccactgtggattggacagtgtcaaaaagaggggcggtccctactgaaggggcggttgggcgacgaagggaagagtcttttcagcgctgaggactggcgctgaggaggcggcggtggctcccggggcgtttgagcgggctcacccgagcccgcgggccaacgcggatccaggcccgactggcgggaccgccccggattccccgcgggccttcctagccgccatggaggacggcgtctatgaacccccagacctgactccggaggagcggatggagctggagaacatccggcggcggaagcaggagctgctggtggagattcagcgcctgcgggaggagctcagtgaagccatgagcgaggtggaggggctggaggccaatgagggcagtaagaccttgcaacggaaccggaagatggcaatgggcaggaagaagttcaacatggaccccaagaaggggatccagttcttggtggagaatgaactgctgcagaacacacccgaggagatcgcccgcttcctgtacaagggcgaggggctgaacaagacagccatcggggactacctgggggagagggaagaactgaacctggcagtgctccatgcttttgtggatctgcatgagttcaccgacctcaatctggtgcaggccctcaggcagtttctatggagctttcgcctacccggagaggcccagaaaattgaccggatgatggaggccttcgcccagcgatactgcctgtgcaaccctggggttttccagtccacagacacgtgctatgtgctgtccttcgccgtcatcatgctcaacaccagtctccacaatcccaatgtccgggacaagccgggcctggagcgctttgtggccatgaaccggggcatcaacgagggcggggacctgcctgaggagctgctcaggaacctgtacgacagcatccgaaatgagcccttcaagattcctgaggatgacgggaatgacctgacccacaccttcttcaacccggaccgggagggctggctcctgaagctggggggccgggtgaagacgtggaagcggcgctggtttatcctcacagacaactgcctctactactttgagtacaccacggacaaggagccccgaggaatcatccccctggagaatctgagcatccgagaggtggacgacccccggaaaccgaactgctttgaactttacatccccaacaacaaggggcagctcatcaaagcctgcaaaactgaggcggacggccgagtggtggagggaaaccacatggtgtaccggatctcggcccccacgcaggaggagaaggacgagtggatcaagtccatccaggcggctgtgagtgtggaccccttctatgagatgctggcagcgagaaagaagcggatttcagtcaagaagaagcaggagcagccctgaccccctgcccccaactccattatttattacggagctgccccgcctgggtggccggacccctgggccttggggctgtggatcctggttccctgtttggaaaattcaccacctctagctcctcactgttctttgtaattaacacgctgttggtaatcttattaattatttaaccacttggcctgctgaccccctcatttcttggggttgacagagtcgaggtgctccgtggagccagcctgtttccctggacaggggcctggacccgcctgtctctgggtgctgcctgggctgtcccggtgggtctgttctggtttcaccccgagcccagcaggagtggagtaaagggagaaggttaatatggtgggagtctggagttggaattggccggggacagagtttagaatgcagggattcagggtcaaggtctagcattcattctagaagttacttgacagccatcagccagttacgctacagccatcagctagttcccatcgttgctttcatggggcttgaggtctttgaggggcaggagatgaagctggtgaggttgtgagctgggccagggctttgaggacaacctggagctggaagaacatgcgaccacctcagggagggtcagggaaggatgagtggggaggtggcccatgtcctgcaagggccttgctgatgggatgtcctgaagggctgggcagccttagatcgggctaagagggcaggactgtgggccagtgccagagccaggcttgtctgttctcaaaggatcagcctcctttggaggacattttgtgtcaaggatagggctgaggacctgcgttctgaacgtctttcctgggattcttgacagccaaagaaattcgaggatcgcctctatgaaggtgaagtcttggcatgtggggtacccctgaatcctgggctaaggtctgtgaccttttgccctccagttggggtatgtgtggtgtccccaaagaacaagggctcgtggatcccgagcagggtgcgatggcggattgggaggtcccatgtcactctcccatgcccgcctttgaagctgaggcgctctttagttaacaaactacaagtcccagcagggaccgggacgcgggtgggagaggcgcctgtggccccgaggcgtgccgcgagttgtagtccctcctgcccgctgtgttcgcttttgagctctccgatgggatgcggcgcttcggaatttcgggctttgatccctgtcccgcccttggccacaggcacctgccggcctgaaggcccccgcggtgggggtaccctgcgcccctccgcgggaaggtggactacagttatcggcaggctgtgcggcgccaaagccacggtgacccagacccgaggtttttccgggcgtcgcagtttcccgagactccgtggcggcgtttgtcttctttttcttagtcagatcccgtacttttgtggagggtagaggaggctttgaccgccgcggccccgggggctggtgggaaatggagttccaaatgagaaaatagaattccccacttctctttcccacaggtgccagggaaacggagtcatcgacccaagaaggtcgtgggagatgaggtcccagggtaaacagcgggtcccgccactatgtcaccctttcctgccgcctccccggatgaactgcatgcagggcggccggctccgtggcaggcagaggcaggaagaggcgcggagcccgctggtggcgaagaggggagtgcggcgggaggggagggcagaggcaggcggccggtcgcgtggggcctgggccgccccaggagggcctctggctggattcttagcagatggaagccgtgcaagggcaggaggcaggggcctgacgtgtttggattgaggttgcaggaggggcccctggctgcttcagggagaataatttggaggcgagcggggaggtgagaggaagctgtgcggtgcaggatggcgtggctgtggaggtggagaacgttgggccacgctaggagtcttgaaagaggagccaaaaggacttgctgagagccgccgcagctggtgaatgacggtgccatgactgaggtggtcgaaagggagtatttaaggggaaatcaggcattccgttttgaccaaattaagctggagatgcctgtggaacattccagccaggctgcatcacgtcacactgaccttcagcattgcccacagtccatcttcccccaggacctgaggattttgcgtccggctccctcctcgcccaggacccccaagctcccagcacgcttctgattttttttgtaggtttttttttttgttttttgttttgttttgttttgtttttgagagggagtctcactttgtgccctagactggagtgcaatggcgccatctcggcttactgcaacctccacctcccaggtgcaagcgattcccctgcctcagcttcccgagtagctgggattacagatgtgagccaccgtacccagctaatttttgtatttttagtagagacggggtttcaccatattggccaagctggtctcgaactcctgacctcaggcgatccatctgtctcagcctcccaaagtgctgggattacaggtgtgagccaccgcgccaggcctcagcccacttcttttgggtggcaatggtttggatatcgtttgtcctcactaaaattcatgttgagattcgagccccagtgtggcaggtgttgggatgtggggcctcataaggagctgtgtggtcttggaggtggagtcctcatggatagattaatgcctgccttaaggggtgagtgagtgctcacccttgggaatttgggaatttggttttctctcccttgcttccttcagcaccatgtgatctctgtgcacacagctgcatccttctgccctcccccagaagcagcagcagcctcagggatgagggaggtcctcagtgagtgcacctgcccagtcttgaaccttccagccatcagaatctgagccaaatcaacctcttcctttataaagacccagcctcaggtcttctgtcagagcaacacaaaatggactcagcacggatcaaattgtgtctcccccacccccacaaaaaactttatattaaaatcctaacccccagca

SEQ ID NO: 838 - DNA, 9462 bp, HOMO SAPIENS
gacacagtctcaagtttccactgaatggtaacaaagactgtagaatgttgttggtactgcagtgagaggcatgcttccttagaccaggcaacatttcatttgttgcatttccagtttccaataccaactcacctacaaagattttaccaaaaaccttaggaccaataaatgtgaatgttggaccccaaatgattataagcacaccacagagactaaccagttcaggaagtgttctgattgggagtccatatacccctgcaccagcaatggttactcagacacacatagcagaagctactggctgggtccctggtgatagaaaacgggctagaaaatttatagactctgatttttcagaaagtaaacgaagcaaaaaaggagataaaaatgggaaaggcttgagacacttttcaatgaaagtgtgtgagaaagttcaacgaaaaggtacaacatcgtacaatgaagtcgctgatgagctggtgtcagagttcaccaattcaaataaccatttggctgctgattcgcaggcttatgatcagaagaacattaggcgaagagtttatgatgctttaaatgtgctaatggcaatgaacataatttcaaaggaaaaaaaagaaatcaagtggattggcctgcctaccaattctgctcaggaatgtcagaatctggagatagagaagcagaggcggatagaacggataaagcagaagcgggcccagctgcaagaacttctcctacagcaaatcgctttcaaaaacctggtacagagaaatcgacaaaatgagcagcaaaaccagggcccgccggctctgaactctaccattcagctgccattcataatcatcaatacaagcagaaaaacagtcatagattgcagcatctccagtgacaagtttgagtatcttttcaattttgacaacacctttgagatccatgatgacatagaagtactaaagcggatgggaatgtcgtttggcctggagtcaggcaaatgctctctggaggatctgaaacttgcgaaatccctggtgccaaaggctttagaaggttatatcacagatatctccacaggaccttcttggttaaatcagggactacttctgaactctacccaatcagtttcaaatttagacctgaccactggtgccaccttaccccagtcaagtgtaaaccaagggttatgcttggatgcagaagtggccttagcaactgggcagttcctggccccaaacagtcaccagtccagcagtgcggcctctcactgctccgagtcccgaggcgagaccccctgttcgttcaatgatgaagatgaggaagatgatgaggaggattcctcctccccagaataaagacaagagaaagcctacgtttcaatatgtgatgctcatgtgtgtttgtagtgtgagctcttgtttttgaaatgattgcttcagtctttgcctttgtttgcactgtgtgttcagtgaaaactagagaaacacaataagcaaatcacatgaaggctgagatgattgagatgaaagttaacatagtgtgaatgaaagtctggccaacagagcagtagatgatataacaaagaaagcatgctttctgaggagatagtggggataatccctgaagagttggcagtgtgagtgcaactcatttatcttctgtgaggtgggatttttgtgttcctcacacccatgtaattattcttagaattgagattgctacacggagcagtccttgacgatcgtgtttctgacgtttctcttccttgcctggactgcctttgacaaggcagaaatgaacatgaaaagtccccaggagaggggagctgtgtagtgagggatactgagggcagtcctgtggctgaggggcacagattgaactgctgaactagttggaggtctagatgaggtgctttacgcatcagctgccttagacagcttctagaaaggagcgagcgctacttcttaagtacttaagtgacatttagataatttatagtaaaactgaaattattattagccaatgcattggtgcatagaatttactagggctacttctggaagccaaaatagaatagcatttccatgtgcattaaatactttgccagcactgcctttgccagcatcctaaatctggagttttacaaagaaggaaactgtatctttaggttaatcaaagctatgcatttcatatagctttttcatttaaaacaagacaaagaaacaaattcctatgaccaaattgcttgcctacagttccctgcagtaattgtatgatctcacccagtgtgcaatttgtgaaaatgaaccaaatgtcattacttttgtcttaaagaaaagtctatttcaagaatatgaacagcagtgtttccttgtacatgtcaccttttttcacattttcattaatcagaatgaccttattgagcctactcctggggtcaattgcatttcaaactaatccaatatttagtgtttcacagaaacactagaaaacgttgaacactcctactgcctggatatatggtagtgcagttatgttgtttatggctcaagatgtcattagaaatactgcagtggtgtattcacagctgctccttctctgaatgaaagagtgtagggacacctgccaccatggccagaccctgactgaatttcacattaaggctttggaaaggagcaaataataatgggagaattaactccaaaactttgacctgaatcatgtggatttgtcccaagattatgctagatgcaccaagcatggcccaaattggttcttttttaaatcccatgggggaagtgcaggctccttcctgtggtgcctctttatagcctcaccaccatgctaacactgagcatggtgaggaggaggaagctttggctagctaaacatgtttaataaggccataaaaactgagaaagaaaaacattcaactttagctgaagctcctttgatacaaaagtttcattctgtcagaaataagccatagtacagactcagagatagaggcagtttctagagaactcggtcttatcgtgggttctggagcacacctctcagaccagtcaggaacactggggaggtgacagcaggtccccaggggcctgcagggaatctttcagctgcacggattgggatttccctccaaaccaaactgtcctttaaggggcagcctcctcttttactaactccaccctttctcatctctgggacccagcagggacctggagaggccaacagccactgctacctttgtagtcttcaaaatattgaactgcaggtcccaagatgcatttcaggatttaagacaggtgcactaatgataaccattccttcaccaagtagcaacattcttgccagagttcttgggaaacctgtttttttctctactctccatctctgctgctctcatgctttaaattgataaaatatgggctcaaaaaaagaaagccgccaaagactcttatccttattggtgccccatcattggccaccccagccataggtgtgtgctgttggtgggaaatggtctccttcctcagcgttgtgtttgggttactggtgaggccagctcacagagtgacatcatggtcaccagtacatgtcgctggagtaaaatcttgcctttagaaactaggttgagctgttcagaaaggtcaattctcttctgtattccccctcaacatttatctgggtctaaagctcagcactgagtcacaatttcacacaagatcaaagtgaggcagtgttaggaaaccatgggctgggtgcagtgcctctcgcctgtaatcgtagcactttgggaggccgaggcgggcacattgcttgagctcaggagttcaagaccagcctgggcaacatgacaaaaccctgtctctacaaaaatacaaaaattagctgggtgtggtggggcatgcctgtagtcctggctactcaagaggctgaggtgggaggattgcttgagcgcaggaggcggaggttgtagagccaagatcacaccactgcactccagcctgggtgacagagcaagaccctgtctcaaaaaaaaaaaaaaaaaaaatggaagttgtggtcacaatgcccaggcttctttgttatagtggcacgctgggttacttgccacacacagatcactcctcccagggctgctggcacacactgattgtggggagttcaagaggccttttccccttgagggtgtggctgtccccctttcaggcgtgtggcgtcattcatggaggaagtgctggctctacttagcacacgcacagtggcactaggacctgcgtgcctggccctcagtgggtagggcggtgctgcctaggcacacagcagcgcttacgggccccaggtgcctactaggctgccttcctcttccccgctgtcagtctgtgtcctccacgtgcttatttcctgtggtgagagcagttgtggtgtttgtataccttgtgccttatgatcaaggtgggccttggaggagggcgggaaaggagcgaccaacatggcggtcctccacccctcagcgacacccaccgcccgagaaactacagacaatggccacaagtttggcgtccttcaatttaattctttaaagaagtgctgggaagaaaaagctatgtggtttctaccattttagcaggataaagaggataactccttccattagcaaattttacagttgttaacagtactctgccatatttgaaaaataatgccagagtcagtccttgaaaacaaggtagctcctatcagaattcaaatggaaattttttttttttttttttttttttttgagactgagtctcgctctgttgcccaggctggagtgcagtggtgatctcggctcactgcaagctccgcctcccgggttcacgccattctcctgcctcagctgggaccatgcctggctaattttttttgtatttttagtagagacggggtttcaccgtgttagccaggatggtctcgatctcctgaccttatgatccacccctctcggcctcccaaagtgctgggattacaggcgtgagccaccgcacccggcctcaaatggaaatatttcacagaggagtggttcagtttagccctgcaagacatctataacttgactgtttgctaaaccacaactctttttggctacttgggtcatagagacagcagagttgctccaagtataaatgtgacttaggctccctccagcacacagtgtgtatgttggagggagtgtggattagcagagaatgagaactacctcagctattcctgccataaccacactgagagaggggggcacggtggggagcctatttagcttttttttttttttgagacggagtcttgctctgtcgccaggctggagtgtagtggcgcaatcccggctcactgcaacctctgcctcccgggttcaagcgattctcctgcctcagcctcccaagtagctgggattataggcgcatgccgccacacccgactaattttttgtatttttagtagagtcagggtttcaccgtgttgcccaggctggtgtcgaactcctgacctcaggtgatctgcccacctcagcctcccgaagtgctgggattacaggtgtgagccaccgcacccggctctatttagctttttaaaaattatttcctttcaagggccctttaatatctatcaagctccctcccctaacaaaatgggctgtccctgcccaacaagtctgaaatagaccttaaaactgtgctgccttagtggtaagtaaggggtgggggttggacagtgaatcttaagatttcatccttcattcagtaagcatttgagtacctactgtgagcaggcattggggcggagcagcgagagccctgccgatgttgggttctcctcctattggggaaacttgatcacagatggaacacgtgcagattgattgatgagtgctgtggagaaagcagcagcgtagcgggaccgtttgggaaaggctactttggctgggggtggctgggaaaggcccctctgggaaagagacagttttactgagtcagatggtggaaagacagatgtctctatactttcttaacaagccactctgtcccataacatgcacttggaatctctcctaagttccagaggccccactgttccagtttcaagccttcattttggagtctgtttgggaacttttaagacttcaaagcaaagttagctaccagcaatttctgtaaaccaagagaagattgtcacaaagattcactactttccaactgaatctatgcagtagaaaaatcattagaaaatacaaaaattagccgggcgtggtggcacatgcctgtagtcccagctactcgggaggctgaggcaggagaatcacttgaacccaggaggcggaggttgcagtgagccaagatcccgccactgcactccagcccaggtgacagagcaggactctgtctcaaaaaaagaaaaaagaaagaaagaaaaatgattagaaattgagaactattttacgtgtttctaagttgttggctacatcaaagagatcatctgtattctgcatatgggctggctttggtgaagctgatgactggacttctaagaaccgttttcccaaatgggttcccatattcatgcacccaaagcaatggtccccaagcactgatgaaaactaatatgcatttcccaaagacccacactatgtatcaggagcctgcaccatgccatttgaatgaccctcagcaatgtgcctccctgccctcaaattcccagttgataacagtgtttgattaaatttccactcaagccaaacatggttactaagaagagaaaaacctgatgtttgcataatattttttttcccctcgagatggagtcttgctctgttgcccaggctggagtgcagtggcatgatctcagccactgcaacctctgcctcccgggttcaagcgattcttctgcctcagcctcccaagtagttgggattacagacatgtgccaccacgcctggctaatttttgtatttttagtagagacagggtttcaccatgttgaccacactggtcttgaacttctaaccatgtgatctgcctgcctcggcctcccaaagtgctgggattacaggcttgagccaccacgcccagcctaagattttatgattaaaaaaaattcaagctcaatacccacataaattataacgtttctcaggaagtagtcccttaaccaaaacgtctctgagaagtgatgcttaggtaatctctgggatccgattttcccacatgtctcactccacagtatgctaaagaagaaaaagtgagtgggcacaacactttgaccctctggctaagccctgggagtccctgacaggtccagaaacttctctgacacccattcaccagggtgctgagataggagaaagtgctcatttataatgtgtattctgtgcagctgttctcagacaagaccggatcttgtcatcttaccttttgctttacaaaaaaggcctgttgaagtcaatgctgtcttgccccttgctgtttcagcaggttagactttggtcttcactgcttatagctgcattggaggccaacgtagctgatgctcagggtcaggcctcgccccttcgccgcaggtctcaggatcggggataacatcgctcccaccctgctcatttagagatgggaaacaagcaagagcttgacttgcctcccatccctcagcctgtctgtggcagagcctgcaccaaaacccagagcttcttccctccgtgagggccacgctgtcaccacagtcctcccagatgggttttggattagcatcagtcctgtgtcaccaagtgccaaacagctgaggggtagaagtgggactcctttcccgagccccagcatgaggctgtggtgtcaggtttaggcctctctcaagtcagaaaaccccgggctgagacctccacagacaagggctccccatgctggccattggcaggggcccaagaagttcagtgaccaactggtccttccacaccacaccagctggtgctgcccatgtctgtcgaatcataacggaaaattccccagatcacgtttggatttaaaaactcatcccttgtcgtgcttcaatgcatgccatttgtcacttaccatacttcaccatggccgagcttcatgtcacatggcctggcgattgtgcttgttcacactggggccaggattttcatactaaaacgtcactgacaatggggctacttttctcctgaatagctcctctgggcttgttgcagttctagttttcccagtagttccatggcaggttcaacctctcagtgtcctgaaaaatggaaccacccactaaccatatgcactggctgcccaggtggctgcactccggggatcacgtttcagtactgagttccttcacgcacttggttcaccaccatcactcttgagttttggacaaaagaggtgggtatgccaggcacagtggctcacgcctgtgatcccagcactttgggaggccgaggcgggcggatcacctgaggtcgggagttcgaaaccagcctgaccaacatggagaaaccctgtctctactaaaaatataaaattagccgggtgtggtggcgcatgcctgtaatcccagctactcgggaggctgaggcaggagaatctcttgaacccaggaggcaaaagttgcaatgagctgagatcgtgccatttgcactccagcctgggcaacaagagcgaaattccatctcaaaaaaaaaaggtgggtaaagggccatgagcccaaaccactaggttgttcaccttttcatctgaaaatgctttactctgactatgtgctattgggttttatttccagaaaatatagttctccttttttctgcatgaaggatacatcgtggtgccacatgctttaagcaatttaaacaagagagataagaggaaaatgcaaccaccacatctgacttgcccaatgtagactttcctttattagattgaagtacacaacctaatatgatatattattttgtagtatctcagactttgtaaataaatgccattatttttatatggaaattttatagaagagctatttctgtatacgtaattactcctgattttctgaaattgcttctggtagataacagacaagtcctaagcagtgttccactaagggtggttccaggcctgcctgccgtggagttgactgggggaattttacagttttgcgatcctaggatgcgtcccagacgctcagtcagaagtgctggaggtggggcctgggaagctgtatttgtaatgaactctggtgttttttgtccattaaagtgtatctttgtccatcctataagattaaaggaaagaaaaagcatctcaaatgagtgtaagttgttcttgagaaaaaaatgtatcagacttttatgatttgaatgaaatgtattatagaaaaaaataaacactttaaaataaaaaaaaaaaaaaaaaaaaaaaaaaaaaa

SEQ ID NO: 839 - DNA, 4418 bp, HOMO SAPIENS
gctcgacttcctgccgggcgctggcaagccgcgcgctgcctggggtctccgggggccgcgcttgcagctggccgagtccgggccagctgaggggctggcggtgggcgggagcggtcggcggcctcagccccttcagagagcgactttcaaactcgcgcccgcgtcgcggcagcacctgggcagccccgcacgccgtgcgcgtcccgagcccgcggggcagctaccgctcgaatctccctggggtgccctccccaggcagcaatgccaggatgcctgtgtccacctccctccaccaggatggcagccaggagcggccggtgagcctgacctctaccacctcctcgtcgggctcctcctgtgacagtcgcagtgccatggaggagcccagcagctccgaggctcccgccaagaatggggcaggctccctgagaagccggcatctgcccaacagcaacaacaactccagcagctggttgaacgtgaaggggcccctctccccgttcaacagccgggcagcggcagggcctgcacaccacaagctcagctacctgggccgagtggtgcgggagatcgtggagacagagcgcatgtacgtacaggacctgcgcagcatcgtggagagccaagagtttgatatctacactcagtattgcaacaattaccccaactccgtggccgccctgacggaatgcatgcgggacaagcagcaggccaagttctttcgggaccggcaggagctgctacagcactcgctgcccttgggctcctacctgctgaagccagtccagcgcatcctcaagtaccacctgctgctccaggaaattgccaagcattttgatgaagaagaggatggctttgaggtggtggaggatgccattgacaccatgacctgtgtggcctggtacatcaacgacatgaagaggaggcatgagcacgcggtccggctccaggagattcagtcactcctcatcaactggaaggggcccgacctgaccacctacggggagcttgtcctggagggcacattccgcgtgcatcgcgtgcgcaatgaaaggacctttttcctctttgacaaaacactgcttatcaccaagaagcggggcgatcactttgtctacaagggcaacatcccgtgctcctccctgatgctgatcgaaagcaccagagactccctgtgcttcactgtcacccactacaagcacagcaagcagcagtacagcatccaggccaagacagtggaggagaaacggaactggactcaccacatcaagaggctcatcctagagaaccaccatgccaccattccccagaaggccaaggaagccatcttggaaatggattcctattatcccaatcggtaccgctgcagcccagagcggctgaagaaggcttggtcctcccaggatgaggtgtccaccaatgtgcgccaggggcgccggcaatctgagccaaccaaacacctgctcaggcaactcaacgagaaagcccgagcagcaggaatgaagggaaaggggcgcagggagtctgaaagctccaggagcagcagaaggcccagtggccggtctccaaccagtactgagaagcgcatgagcttcgagtccatttcttccctgccagaggttgagccggaccctgaggctgggagtgagcaagaggtattttctgctgtggaagggcccagtgccgaggagacgccttcagacacagaatctccagaagtcctggagacacagcttgatgcccaccagggccttctggggatggaccccccaggtgacatggtggacttcgtggcagctgagagcactgaggaccttaaggccctgagcagcgaggaggaagaagaaatgggaggtgccgcccaggagcctgagagccttctgccaccctctgtgctggaccaggccagcgtcattgcggagcgatttgtcagcagcttctctcggcggagcagcgtggcacaggaggacagcaagtccagtggctttgggagcccgcggctggtcagccggagcagcagcgtgctcagcctggagggcagcgagaagggcctggcccggcatggcagtgccacagactccctcagctgtcagctctccccagaagtggacatcagtgtgggggtggccacagaggacagcccttctgtcaatgggatggagcccccaagcccaggctgcccagtggagcctgaccggtcttcctgcaagaagaaggaatcagcactctccacccgagaccggctgttgctagacaagattaagagctattatgaaaatgcagaacaccatgatgcaggcttcagcgtccgtcgccgggagagcctctcctacatccccaaaggactggtaagaaactccatctccaggttcaacagccttccccggccagacccagagccagtacctccagtggggagcaagagacaggtgggctcccggccgacttcgtgggccctgtttgagctcccaggaccaagccaggcagtcaaaggggacccacctcccatctcagatgctgagttccgcccatcttcagaaattgtgaagatctgggagggaatggagtcttccggagggagccctgggaaggggccaggccagggccaggccaatggctttgacctgcatgagccactcttcatcctggaggagcatgagctgggagccatcacagaggagtcggccactgcctccccggaaagctcctctcccactgaggggcgcagcccggcccacctggcccgggagctgaaagagctggtgaaggagctgagcagcagtacccagggggagctggtggccccactgcacccccgcatcgtgcagctctcccacgtaatggacagccacgtgagcgagcgcgtcaagaacaaggtctaccagctggcccgccagtacagcctccggatcaagagcaacaagccagtgatggccaggccaccactgcagtgggaaaaggtggcccctgagagggatgggaagagccccactgtgccctgtctacaggaagaggctggagagccattaggtggcaaaggtaagaggaagccggtgctgtctctatttgactatgagcagctgatggcccaggagcacagccctcccaagccctcctcggctggggagatgtcaccacagcgtttcttcttcaacccgtctgctgtcagccagaggaccacctcgcctgggggccggccctccgcccggagccccctcagccccacagagaccttcagctggcccgacgtccgtgagctctgctccaagtatgcctcccgcgatgaggcacgccgagcagggggcggccggccccgcggcccacccgtcaacaggagccactcggtgccggagaacatggtagagccacctctgtcgggcagggtgggccgctgccgcagcctgagcaccaagaggggccggggaggcggagaggctgcccaatcccctgggcctctgccccagagcaagccggatggaggcgagaccctgtatgtcactgcagacctcaccctggaggacaaccggcgggtgattgtcatggagaagggaccccttcccagccccactgcagggctggaggagagcagtggccagggaccaagctcaccggtggccctgctggggcaggttcaggacttccagcagtctgcagagtgccagccgaaggaagagggttccagggacccggcagacccgagccagcagggcagagtgagaaaccttagagagaagttccaggccttgaactctgtcggttgatgctgactcctgggggagggaggagtcatgttggaggttggggaagaacctgggcatccttcccctcaagcctgggctcatggagcccctgcccagggccctcaggtgggcggaaagtccatcccctccgcccttcaggaaggatgctcccgtgtgcaggggtctcctgcctgtgccatccactggggctcgagacaatttcccactcacctgtgaggccggtgtggctgcttcccttgtaaatagttgttctctggtaagaagccaaatatttaagctcacttcttcccagagagaggaagctctgctcaggcctccagcgttggctggccatggccacagccagatggaggagcccatccccaggagactcaggcagtggcctggagaggctttgttctgtaacggtgccttttcttagggtccaggcaggaatgaagccaataatttattgctttccattctgtggtatgatgtgcgtgtgcgtgagtgtgtggcccctgtttattcccctcctgtcaagaatgaagtggattcagttcaggtacttttgagggttgttgtgctgaccctgtggttgtcgctgatgtacacacatttcattatttgccaatggtgcaataaccactgctgaccaacaaaaaaaaaaaaaaaaaa

SEQ ID NO: 840 - DNA, 18278 bp, HOMO SAPIENS
gtcacttttatttgggggtgtggacagctgctttcccaggggagtacttcttacagtgggatttcaagacaagatcggcctgaagaaaaattatatttgtatattttttaaaaagtgggaactttgaggctcagagacagagcagaagacagaacctggtcttctgattccctgtgttctgcttttttcattgttccactggacgctcatcagagggaagatctttttcctcaattgattccaacaatgtctcacccatcttggctgccacccaaaagcactggtgagcccctcggccatgtgcctgcacggatggagaccacccattcctttgggaaccccagcatttcagtgtctacacaacagccacccaaaaagtttgccccggtagttgctccaaaacctaagtacaacccatacaaacaacctggaggtgagggtgattttcttccacccccacctccacctctagatgattccagtgcccttccatctatctctggaaactttcctcctccaccacctcttgatgaagaggctttcaaagtacaggggaatcccggaggcaagacacttgaggagaggcgctccagcctggacgctgagattgactccttgaccagcatcttggctgaccttgagtgcagctccccctataagcctcggcctccacagagctccactggttcaacagcctctcctccagtttcgaccccagtcacaggacacaagagaatggtcatcccgaaccaaccccctctaacagcaaccaagaagtctacattgaaaccacagcctgcaccccaggctggacccatccctgtggctccaatcggaacactcaaaccccagcctcagccagtcccagcctcctacaccacggcctccacttcttcaaggcctacctttaatgtgcaggtgaagtcagcccagcccagccctcattatatggctgccccttcatcaggacaaatttatggctcagggccccagggctataacactcagccagttcctgtctctgggcagtgtccacctccttcaacacggggaggcatggattatgcctacattccaccaccaggacttcagccggagcctgggtatgggtatgcccccaaccagggacgctattatgaaggctactatgcagcagggccaggctatgggggcagaaatgactctgaccctacctatggtcaacaaggtcacccaaatacctggaaacgggaaccagggtacactcctcctggagcagggaaccagaaccctcctgggatgtatccagtcactggtcccaagaagacctatatcacagatcctgtttcagccccctgtgcgccaccattgcagccaaagggtggccattcagggcaactggggccttcgtcagttgccccttcattccgcccagaggatgagcttgagcacctgaccaaaaagatgctgtatgacatggaaaatccacctgctgacgaatactttggccgctgtgctcgctgtggagaaaacgtagttggggaaggtacaggatgcactgccatggatcaggtcttccacgtggattgttttacctgcatcatctgcaacaacaagctccgagggcagccattctatgctgtggaaaagaaagcatactgcgagccctgctacattaatactctggagcagtgcaatgtgtgttccaagcccatcatggagcggattctccgagccaccgggaaggcctatcatcctcactgtttcacctgcgtgatgtgccaccgcagcctggatgggatcccattcactgtggatgctggcgggctcattcactgcattgaggacttccacaagaaatttgccccgcgatgttctgtgtgcaaggagcctattatgccagccccgggccaggaggagactgtccgtattgtggctttggatcgagatttccatgttcactgctaccgatgcgaggattgcggtggtctcctgtctgaaggagataaccaaggctgctaccccttggatgggcacatcctctgcaagacctgcaactctgcccgcatcagggtgttgaccgccaaggcgagcactgacctttagattcagtcacctgttcagccggcactgagaagaacgaacacaagaaaaagataagaaatactagagtaaaggccatcaaactacgcgatagtctctgttcttcatctgctattaaccttgccttagaaacacataaattatgagattttttttaaaagttgttaccaaatacacatttcacattgaatcatgtaggatcttgatgggcctttgttcccaaggacttccacatttttgcacagattatgctccatcccattcacttctgcattcctgtaacttttaatccctatgtttgtctcacttttcatctggttgaatggcttttcttagtgtggtatttgctgtcacatagtttttcctgggtgagtctgccaactcacaggtgcttttaggcttgaaatctccatcctatcatttccgttttgcctgtgactgtaaagagtagccattcttttcccatgtattgaagaggatattcttctcttgctttatactactcacgtccttggggagggaaatgcacaatttttttttgttaggctgtaaagaatttaagctgtaaattacataagttagaacaagcccaaatttaatttgcaaccatcagaattcagaatctatagtgaccagtgatcaaggctaattggaaaagagttatcggcccatagctaataagtagtgacagacaaccaagcttcaatatttttctaaagaaattacaggtgggatatgctagaaaaggcattttggggttatgtttaaaaaaacattattgtcccacaatattaccttaagatttttcttttccgcactacctgaacattgtaatacagacaaacttgatttcttctagaagataacattttcaatactgtcccacttctcatcttaaaaatattgtcatgtttattctaatatccaacacaactatcaaaattgcctttttctctagaggatgaaggctgtgaaaaaaccgttcaaattctcttctttttcttttttattaccaggtccattttgcctgacaattgcaaatcagagcatacaaaataaaactgtgcagttttgtttggtttactttcaaaagagtagaaagcttgaaaagattctgaaaccacagtttcattattctcataatccttctgcaactgaaattacatattgcaggagacattttcatatcatcaatgtgacatttacaccacactttcaaagacaatcactgaaacaaaaattgtctttatgagctaaaaatatgcagaatctctgcctagaatctttattcaaacttttattagccagtgaaacacttgcttgccaactgccaagccatacttattaagttcgaacatgtttcacttaaggagagacacctagcttagtcatggcaagttgccattttgtaaactaaggattttggactgagatttcttaaatctttcttcaaatctcccacaagtatatacttttaaattatggagtattttaagtctacaaaaaggtataaataataatataatgaattcctatatacctaatacccagtttaagacaccaaatataacaagtataattacatcctccaatgtaccgtttccttattccacagatatctttttcattattgtgaagtgatgttcagatttctagttttttttctagtttttaattttaacatcagaactgaaataaaaaattatggatacgtgttttgaattgcaaactattcctcaggaattccaattaaatttattttacttgaataggaatgatcataaaagtgattctttttttgtgactagaaattcttaagccgatggtcactatagctcatccttaatgtatggctcatttgcttttgtcactaaacggttttgtgttagaaccaccaaaattatagcttttaagagcttcctttgaccactgtctttttcttaccctagttctcttatctttgatcgtatatttctcataatgtgaaatatgatgagattcacttaggggcagcatgttagttttgggaggcaatgtcaactgtgtctctgaattcctgtcttccaaattgaagccagaccatgctgatgacctcaagtagcactgactatttgacaatagggctgataatgtaatcggcttgaattttgacttagtaactttttatgtaatactttcggagaaattctctttaggacaaagcagagagtccaatttattgagggatagattgtatctcttaaagtggtcatattattattaattttgccaaaagaagaagaatttattgaatatttatactataaaatgcagtaacattctacttgcttattacatttaaatccttgtgtaactgaatgtttacatgtcaagaggaaaagctgtaagaaaatgctgtcacagacccatccctgtggcatcgtcagcagaatactgcttgcttacaatctttattatgcattcttataacataacctcagagtatctttaccaaaggtttttaaagtaaatctctttttaagatagacttattcttttataataatgaatgtgcactcatacatatgtagaaacatttagatttagagttttttttttctttcacaaggtataataaggaaaggatcctacaatattttattctagggtttcttaaatatatgatttatattactgtcttttctattaatcatttgatttaaacaatgccaagtcactcttttttagttgcatgaaattttgcctgcaacagagagaaaaagattgtattactttaatgattataatcatactgtctgctgatataatatcataattgttgtggtttaaatacataaatagtagaaaaatcagagtctataacagaaagtttgtaaaaatatactgattttgaaaagtatcaggaatataaatatttggtaattctgtgtaacaagagagacatggaaaaggaaaaaaatccactatatcatgggctctgcagaacatatcaaaataggatttcttaaatttttcaacccccagaccatactgactcaacatggagtctcactggccaagaaaattgcctttaaaactcgaaaataaggccaggtgtggtgactcacacttgtaatcccagcaatttgggaggctgagacaggaggattgcctgaggccaggagtttgacaccagcctgggcaacatagtgagaccttgtctctacaaaaaataaaataaaataaaaaccaaattagccagacatggtggcatgcgcttgtttaaaaaaacaaataaataaataatcgactcaaaaataagtcatgtgtcccagcataaggcatcaggttgttagatgctggcatctctgcagctcaaagatgtgggttctttttcttgtcattaacacattgttatttctgtaggagcaacttctctgatcaaaattacttttctgggtatgtgctgattaagggggtggacttatcaacactataattgttccctatgaaagattccacagagatgtttatggtgaggtttaaaggatatgaaactctacatttaaacaagtattttatatttgggtacagaggaagaaagagagggctttttccatggggctatagtagagagttagtggaatatagacaggactctgaaaacacaacttccagccatttttttagttagtaaaaatcctattaatgtgaaccagccaggaataacagtgttatttctattggatatggtttgggcttctcttgtcaaatctgtgtcggctgccccctgatccttccattatcaagttttgaagggtgttggggaaattatggcagctgctagggagatcagggaaacactgatgtaacctcaaagcctctcaccattcctcttggcttggaaaggctttattttttcatatacatttctagaaatattgctattctaccttagtatttcacatttgtagttcaaacaagcgattgtccatctgttgcctagagctatagtacatgtgtgttatgaatgaaatatgacagcatgttccatacccctgctttagccatctgtgggaaaccagcaaactgaaaaagacacctctgcaaaatgtgcctcaagtccatttcttgggatcgctcgtttggtgcactctcgtgggagacaatcagagaacaacatatacttgtgccttattttcaaagaatctatttacactactatgaatattccactgaagagtcaatgatgtaaatgataaccaccaaatctcaaaaatatactcaccaaaaagtaaaaaagtaaaaaaaaaaaaaaaagaaagaaagaaaagaaagagagagaagtcaacttttcatcttaatatattctagtagtatttattttttccttgtcttggaagtatctcataggtctttaaatgagtaaaacatttttatgccagaaggtgatataatggatgttagtgttttttatttgattttacagtagttttagtcagataatgaggacagagacttcaacttgattctttaccaccattcagcatattttttaattgtcttcattgtatttgcttaatagtggtccagacaagttcaaaacttgttctcagtgaggcattaatatggtgcaaccatgaatatttcaggccaagttattcacttgacagataactagaatgaaacttttctcatgaggctgttgtttggttagcatagccttatttcaaaccttaaaaagttacctgactgaagctactatgacttggtaaggattcttcctctcttgctttcttcctcccttcctttcttcctcttccttcctcctcttcttattttctttcctactttccatcctacctattagtgttgctgtacttggattttttgtaaattaaatcaatgcattatgattttagggaattatgattatattcataaggggaaggctaccagaaaatatatgtggcatccataaaatcttcttttataggggcatattttttaggttgtatttattcgtaaagtgaaatgagataatagagtctttctgtttcatgttaatgaattttcatcagggactgaggtcatagattcttggaaaattcatttgtgactgatctagttttctcagctgtatgcaaagtaatctttcaaagactaggttaagattttttttttaagtctgaagcaatgtaaccccaaaaaattataattttaatgatggcattttattttattccattgcagcttgataactttccttatagcaaaggaataactattgtattttcagaattttaacacagattaacacttagcctgtaagactaataatatattgtaatagttgatactaaaatatttttcagcaggttggacagcaccagtttttcttagatcacagactacaggcagaatttcccttcaatccagaaaaaaggacactaatttccttttctatttaattttcctggcccttgtgcaaaaaattgtggactctatcttagttacaacatgcatgtcccttattttgtggagagctgtgtgaaagatgcgttttttttctttttttcttttttttttttttgagacggagtctggctctgtcacccaggctggagtgcaatggcacgatctcctctcactgcaagctccgcctcccaggttcacgccattctcctgtctcagcctcccgagtagctgggactacaggcgcctgccaccacgcccggctaatttttttgtatttttagtagagatggagtttcacagtgttagccaggatggcctcgatctcctgacctcgtgatccacccgcctcggcctcccaaagtgctgggattacaggcgtgagccaccgtgccccgcgtgtttttttctttagctgattgacaggtccccttcaaagttacaaaaaaaagtgctaatttttgctgttaaattctggttgttatttaattgacagaagtctcttgatgcacgaataaatatctctacatctagcctttgttaaaaataaaaattaatattctacaaacacctacatatactagagaggggtgaaacactgcagctaattcctttataatactttcagatgattgcattaagcctttcatgttatgtggcattgttaatttttcctagatacccatccacttaagggccagagaaatccttattcatttaactctggtgggcatttatgtaacatacccaaataaaaacgttattaaacagccacaatcgcattcagtcaacttggcactgaatgtagcttctaaaatcagttctctaccctacgaatggaatgttctaccaagaaagagaagcatcaccatgtcatcttgtgttctacaccactatagagagttacagttgcccccaaacacgaatgctattcccaaataaaatagaatcatgctttgggaggccaaggcgggccgatcacgaggtcaggagatcgagaccatcctggctaacacggtgaaaccccgtctctactaaaaaaaaaaaaaaatacaaaaaattagcctggctcagtggcgggcgcctgtagtcccagctactcaggaggctgaggcaggagaatggcgtgaacccgggaagcggagctttcagtgagccgagatagcgccactgcagtccggcctgggcgaaagagcgagactccgtctcaaaaaaaaaaaaaaaaaaataggatcatggcccttttaaagatctgaatcttctctgttattttcctgatgaatcaccatcccatatcttcttagtcctggccagtatgtagttgcgctcacatacgtctattctagctctgtagctccacaaaacaagtcttaagtccaaatctttgcctcttcatgtctgatatcaccaactcattcagcttttcttcacttattgacatagtgtcatgtcctatcactctctgctgcttctttaaacagtggacacaaacatattttctaattttcagtgtactcagtgaaacttggcagttcaccatgagtcaggctaggttgaaaggctttctttagggttgaaagtaaacgaaattggaatcacccaaagagaatttccccaaaaaacctcagacccagaagtgtaaaagctacagaaggatagaactcccatgtctacagacagttctgttactttttgttctgtactattttggatgttgccaaaatcaaattcatcctgaaaacaggaagcaagctaatgcatatgccatccatgagattcccacttctgggtcagttcatattccattcaaccttttccttttatccttgtcttcttcagaataagacatttttcctccatattttcatattaaatattaacactttataggttctactttaatatatggacactttacaggttatacataaatatttgctggttgattgatttcgagattcattcattctgtgctcaaatatttgtacctagagacgttacatgttagaaaaagtgagcagcttctttctctaatcatttaggagtccatatttttcttttctttttgttctcccaacatccttatctcttactcagctcttcaatttataattaccaaataatcactgttagagaatcagcccctaagtaactttgattctggccaactgtaataagatccaaccacttaaatctgtacttactcaataggaaggaatgtgacatcaggaagagtcattccagtgacattagtaagactttatggagtacataaaatttgataagaaatcttgagctgattctttgacttgatttagaagttgagaaaagagtatttaaggcacaacagggaaacatgggctatactcagagaagaccctctgcattggccaaaatatcatggattctggaaattccttcttaacagaaaaaaaaggcttccaaataatcaggctgaatgggaagaaaaaggcatagaggaagcctgaggaagtatttacttgcttttcccatctctttataattggaagagaagatgatctgccaaaatataacccagcatgcacagtatggacaggaagcagccctccatgaactttattatcacagaatatgagcattcttattgatccacagctacatcttctattcttgcagcaagggtacatgtcctttgaccctccacaaaagaacaagcaggacatctctattttcctattgagtctgagtccattattagaaaggacttcccagccatcttttctacttggtattaaaattcccttacagattcattgctaagtgccaattctttttttttcttttgagacggagtcttgctctgtcgcccaggctggagtgcagtggcgcaatctcggctcactgcaagctccgcttctcgggttcacgccattctcctgcctcagcctcccgagtagctgggactacagacgcccgccaccgcgcccagctaattttttttgtacttttagtagagacggggtttcaccgtggtctcgatctcctgacctcgtgatccgcccgcctcggcctcccaaagtgccaattctgactctacttaaacatcacctgtatcagggagctcattattccttgaggtcttacatttctttcagcacattttgttccaagctacacgactttaaaacagagccagcctttggggcatatgttctctttggtgccacacaaaacctgtagtacatgatacagtgttgcttcccccctccttttccttccatatatatttgttttgttttgggcattgcattacttttttgaatttttaagaatctctaaaattagtctgaaggatgttctgagggccagacattagaatttgtgagtttttttgttgctggttgtactttcctatttagaagacagaccgttctgacagttgttgtgtagcttcatgccttccccagtaactaacccatgaacagtacaccccttttatctgacttgttgataatgaccttaaaaatgttaggaaatgggccgggcgcggtggctcgtgcctgtaatccagcactttgggaggccgaggcgagcggatcatgaggtcaagagatcgagaccatcctggtcaacatggtgaaaccccgactctactaaaaaaaatacaaaaattagccgggcgtgttggcgggcgcctgtagtcccaactacttgggaggctgaggcaggagaatcacctgaacccaggaggcagaggttgcagtgagcagagattgcgccactgcactccagcctgggcgacagaacgagactccgtctcaaaaaaaaaaaaaaaaaaaaaaggttgggaaatattggtgtataatccccatgtctaacaaggaagaagtcaaaagcaaaagatagtggtattgccgaaaactcattatttctagttagttcatctgtggaaaaggatatcgttcttgaggagaggggttctattatgctatagttttctatggaaatgtacaaatgctttcctcattgctctggatgactatttagtttaaataatatacctttgtcatggggaagaccatgattgtggcttcttctaccccaactttgaatgagagagcactgtaagcagaaactgccatcagtctcctgggcaggacctggaggtaactttctgagctgtaaaatagtaattcctaagagagcttacaaactgcttccacacagaaaatagcgcagggaggacagttattagtacccctattctagaagagaaagctgaggctcaagccattaagtgacttgccaaaagctgtgacatagctgggaagtggcagatttggggatataaccaggtcttgcaagtccagtgctgtctccaaagtagccacgctcacagctgagaacaccttagaggacaatatcgacttcttacagactaccaagcccccagtcatccagggaaattcagagaccaattgactgccaggtggcaaatccacatgtgtactgcggtctttagagatcatttagagcttgcacacatctgtgtcttcttgtgggaaacctctaggtattctgtctgatcagcactgtgaggaagttggtgggaaaaggccactgataagaacaaacaatgggcagaaggaagcacattgcaataaatttccccagagagagttcctttacattccattcaccaaaaacctctctggaactgtcaggttcagaatatcaaccaagaccatatcatttagaattcattggcatgtagaggtgactcgattcctaaaagaagcctctctcccatgaaccacgatgtacgttccacagaggcagaaaccgccgtaggttagcaatgcattttagtctttctctccattcacatttactgagagcacaccacgtgcatgttgctgcaacaggcatttccgatagagccgatccatgagctaacaatgtctgaaaacaaatgttatggaactgttggcatttctgagatttggcctttgccatttgatagactttgcttcccaggatgctgtcattttgtgattttttataattacaaggaatttggtaccatgttgttttcaaaaaacctcctagaaagtctccatgtatgctctagaagttgctctacgtaacagttcagcaagcaagtgttccttctcttgagctgcgtccctcaggaagctgtacctttagggtgtgctttccactttttatttcctctcatttcactcctttcattgtttgctatatcctaaaatatgtgaagtgagagaaaaaatatcatttcttctcattaaatctcctgcattaaatctaagaatcctttaaaataatcacacctgataagtgttttatgcatttccctccctggagtgttatcatccatcaagccagtatcatcatccacctgcttattccttgggactaatgagagccaagttaaatagcaaatgacttctcaccccttcctagtcctcatgcctgaggaataagggcgacattaatgggagcgggagagtggtggctttggttgagatgcacgttcacagactagaaaagtgcctcacctccatggtgtatatgtgccaccttttcttaatccagtctatcattgttggacatttgggttggttccaagtctttgctattgtgaatagtgccgcaataaacataagtgtgcatgtgtctttatagcagcatgatttataatcctttgggtatatacccagtaatgggatggctgggtcaaatggtatttctagttctagatccctgaggaatctccacactgacttccacaatggttgaactagttcacagtcccaccaacagtgtaaaagtgttcttatttctccacatcctctccagcacctgttgtttcctgactttttaatgattgccattctaactggtgtgagatggtatctcatagtggttttgatttgcatttctctgatggccagtgatggtgagcattttttcatgtgtttcttggctgcataaatgtcttcttttgagaagtgtctgttcaatactatgcagccataaaaaatgatgagttcatgtcctttgtagggacatggatgaaattggaaatcatcattctcagtaaactatctcaaggacaaaaaaccaaacaccacatgttctcactcacaggtgggaattgaacaatgagaacacatggacacaggaaggggaacatcacactctggggactgttgtggggtggagggaggagggagggatagcattaggagatatacctaatgctaaatgacgagttaatgggtgcagcacaccagcatggcacatgtatacatatgtaactaacctgcacattgtgcacatgtaccctaaaacttaaagtataataataatgaaataaaattaaaaaaaaaaaagaaaagtgcctcacctccctgtgaggcttgatgaatattgtggccagtgagtggaaaatgattcttgtcgaatagacagagtattcccaccccaggaatggattaatagaagacacaatttgagcacttctcagaattatctagtatgcctgagtagagactcacatgggtggaatctgtgttgtctcatcagagggaataaaaagacaatgaggtggtaaatgtgaaaaaagcagccttttagaaaaacattattttcaaatacctttataaatcatctaatttatcttcacataatataaagaaaaaactaataaaaattttcgtatttcactttacataatatgttctcccatatttagggatcatacaattgtattgtcttcaaaacacacacacacacacatacacacacacacacacacacacacacaccccttccaagaaagctgatccttcagaaaataaatcttatttttaagcacttgggttttcaggccagaaaattaataaatcctaaacctgacccatttttgtaacagctaaaaaggagaagaaaaagctagttaaattttgtgtggatccatttatctcttaaaatatgccaaagcaatttgaggtgggggtggaaacaggtatttatctctcatgcgtgattctctctttatatttctatctgttgggaaaagggtaaagaactattcttggtcattattgatgtattgtgttgccactttgtatggtgcctgctgtgctttatcccgaggcatagcagtaatcgttactatcttgactctttccttcatcacaagagagtaaatatgaagtctgaatgtcgttcctcacccccaaattgtttaactctgcttccaaactagtttaagaaatgcaaaatgggaagagctagcttttcttagatacatttcttccttttttattctttcttgggagacgttaagtataaaagggaaaaagtcagttccttcttctctctctttctctttgggtgacagcaatgctcacttagtaattataaactggaaataggagagtagcttgagcaggttatgatatatctgcccaatgtgtttcattccttcaaacataaactttgagagtaaaagagatttttataatttaaatgccaacgacaggaatggcctcatgttttaactttcaaataataaatggggagttggtatttgggcagagtttgcattttactaatcctatatactttgagcttagtttttagaattgtgtcaaatacatcaacatatcaggattatagtgccaaaaatagttaaagtgccttggtcctccctctgtaggcagcaaattgaaactaacatgggaccatgccatccttctagcataatggagaagtctgaactgaggagtatctttgatgaaagacatttaggaccctagaaactaaatcttgtcaccaagactttatagtaaagtagtagcaaaattatttttaaaagactttcttccttttactacccatttcctctcttgggaaagctgatgagcaaattatccaagactcatttctttattaggcaaagtcagaatatttcccctctgaaaatctgaattatgccctcattctttttcaagaaatatctcaaagagcaaatagaattaaacatgacacttgattgtctgattatttggcatgtataaaattatcatgtggcttaatgtgccttaagtgaaaatttaaacttagacctgaaacctttacagttggatgtagcgttgagcttttgcatgttttctgtataataaaccacttttgttttgtttgttttgtcttttaacctacacctttatcattactctaacagatttagggcttctctttctctacagctaagtaagggaatatgtgcaattatgagacatacaaaaaaggaaagggaaaggactttctaagtagcaaatctgtgccatgaagtagatgtggcgtgaagatacagagcctgaggatagtaattttccctgagccacgcacacaggcttttatttcatgccttttctctttctgtgccgtcacctttgagaaaaacgattgcaccttctccaagtctgcctttttaacagctacagttaagttggcaagacttccccagctctgaatatagccatttgccgactccggcctctttgcgagactgactcaaatctgtgatcttctgttcagcatacacatcagcaaagtgagaagatgagcactaaatataggctctattaactttacttttagatttactgccttcaaaaagtgcctattctgagcaacataaacgttattccttacatatgtatgtacacacggtacccagagtcgtactgtgcagccttcaaaaacataccatcagaaagagtaggtgctgagataaggaaactttgccaaatgaaagaaagtcactcacttccaatatcccctctcaagcggctaccgtgaaacgggctgcaaacacattccctgagcatcccttgctgatacagcttctttatatttatatcctactggatggtagcatattgctaaggtttcctgtactctgcttcaagggaatgtaagctttatggcattgaaacatttagggaaaaaaaagatgtttaagagaattaatagagccgtagtctgtattaggatgtgtgtcatatgtgtgttctataaactaagcatcggtgggtttagagtgttaaagtgtcagcacattccttctccttttgtctctcaggctaacatgagagaaaatagaaaagtcttggctgtggggattggaagctcagggggccaaatgtccttgccagatccttagagcattactttgactcctaaaaatagtagtgtatgttatttgatggcttttgtttccatagttccatcactgacaaaactgtcaatactgttgatggagcagcagcatagcctagagtgatgcattcttacccagaggtggcaataggagagggtccatgtaaataggacgaggtagacagtgcatgattgtaggagaagggttgaagggaggacatgattccaaaaaagatcgttctcaatgtgtcgtctgactcaaccagctggcagattacacttgccaagtcgttccctttccttctaagtcagttggctccatattcacttgaatatgcctctgtttgggcaaagcaagatacctccacttaacctttatccaaggaagctcttggtgtcctcttggtcataaagttgtctcctacctaacccagttttaccaaatggaagtaaaaggggacaaactatggaagatggactccatgccattgcagtcagccaccattctcttttccatataaggagccccattacataagctacgggtgaggttggaacagctatgtttcataatttcaagagtgtgaccaccctgctctagtcatcatcattggatgaatccagttgactctttggcaaaagggtgatacttttcactaaaaatgcctactcttcctgttgatgttccttttctgtttttaccttgtccaatttccacactagtcattttttttattttttagaggatcagattttagcgctggaaaatgagttcaaaaatttcagtgtaatgtcataaggatgttgggatacagagattttttttttccttggaaacaaatggactgggaagaaacacagcatggctttgctctgagtttcaatctgatgattatgaccatggaagatagtcttatgtaaaggttaaatggtgtttacaagtggatagataaggcggagatggtgagaagccgggttttctctatgctaaatgtgtctactaagagcagcacttcctactagctaagcacaatcatagccccaccgtgatgagctgctagtctgaataacattccctgacttagggaaaggcacacaaaaacatataaagaatatgtctattttcatatgtgtgatactgacagagccatggtattcctaaaatataggtttctcttttttcttgtattcttagcaaattgcatttattcactacattacaaaccatcactgatgtatccaaaatagcacacatagttcagtatgaaaataagagaataaaatctgttataagcaagtgatttaggtattttcttttgtgtttatgcattatctgactatattaaaacctgtttttctatttaccttctatcagttttctctaccaattatgttttttcaatgctctataagaatgaatatggaaattatatttcttttttctgtaaaagagttgcaactactttattatatttagaaatccaataaacttcttattacattta

SEQ ID NO: 841 - DNA, 365 bp, HOMO SAPIENS
ccccaagtagctgatgttgtctagttgctaagatatattcatctattgactcctgctaccatctaaaaaatcaggagcctgacccagtgcaatcaatcttatttgcatttcaagaagcaatctagcaatttagaattttagaaattccactataaagaggttgtttgccgggtgggatggggcggtggtaatggagctgcaaagtatataaaagaaacatgctttgtccacgcttatcagtcaaattctttctttctatccatccctggagagagagagggagaggaagcttcttccatgccacatggagacaaacgggcttcagacatcttctagtgaaagaccaacgtataggaagcatcatt

SEQ ID NO: 842 - DNA, 1923 bp, HOMO SAPIENS
ctttcccggaggctggcagatgcgcgtggtgcggctgctgcggctccgggcggctctgacgctgctcggggaggtcccccgccgcccggcctcccggggtgtcccgggctcgcgcaggacgcagaagggcagtggagccaggtgggagaaggagaagcacgaagacggggtgaagtggagacagctggagcacaagggcccgtacttcgcacccccatacgagccccttcccgacggagtgcgtttcttctatgaaggaaggcctgtgagattgagcgtggcagcggaggaggtcgccactttttatgggaggatgttagatcatgaatacacaacaaaggaggttttccggaagaacttcttcaatgactggcgaaaggaaatggcggtggaagagagggaagtcatcaagagcctggacaagtgtgacttcacggagatccacagatactttgtggacaaggccgcagcccggaaagtcctgagcagggaggagaagcagaagctaaaagaagaggcagaaaaacttcagcaagagttcggctactgtattttagatggtcaccaagaaaaaataggcaacttcaagattgagccgcctggcttgttccgtggccgtggcgaccatcccaagatggggatgctgaagagaaggatcacgccagaggatgtggttatcaactgcagcagggactcgaagatccccgagccgccggcggggcaccagtggaaggaggtgcgctccgataacaccgtcacgtggctggcagcttggaccgagagcgttcagaactccatcaagtacatcatgctgaacccttgctcgaagctgaagggggagacagcttggcagaagtttgaaacagctcgacgcctgcggggatttgtggacgagatccgctcccagtaccgggctgactggaagtctcgggaaatgaagacgagacagcgggcggtggccctgtatttcatcgataagctggcactgagagcaggaaatgagaaggaggacggtgaggcggccgacaccgtgggctgctgttccctccgcgtggagcacgtccagctgcacccggaggccgatggctgccaacacgtggtggaatttgacttcctggggaaggactgcatccgctactacaacagagtgccggtggagaagccggtgtacaagaacttacagctctttatggagaacaaggacccccgggacgacctcttcgacaggctgaccacgaccagcctgaacaagcacctccaggagctgatggacgggctgacggccaaggtgttccggacctacaacgcctccatcactctgcaggagcagctgcgggccctgacgcgcgccgaggacagcatagcagctaagatcttatcctacaaccgagccaaccgagtcgtggccattctctgcaaccatcagcgagcaacccccagtacgttcgagaagtcgatgcagaatctccagacgaagatccaggcaaagaaggagcaggtggctgaggccagggcagagctgaggagggcgagggctgagcacaaagcccaaggggatggcaagtccaggagtgtcctggagaagaagaggcggctcctggagaagctgcaggagcagctggcgcagctgagtgtgcaggccacggacaaggaggagaacaagcaggtggccctgggcacgtccaagctcaactacctggaccccaggatcagcattgcctggtgcaagcggttcagggtgccagtggagaagatctacagcaaaacacagcgggagaggttcgcctgggctctcgccatggcaggagaagactttgaattctaacgacgagccgtgttgaaacttcttttgtatgtgtgtgtgtttttttcactattaaagcagtactggggaattttgtacaataaaaaaaaaaaaaaaaa

SEQ ID NO: 843 - DNA, 1402 bp, HOMO SAPIENS
ggggacgaagggaagctccagcgtgtggccccggcgagtgcggataaaagccgccccgccgggctcgggcttcattctgagccgagcccggtgccaagcgcagctagctcagcaggcggcagcggcggcctgagcttcagggcagccagctccctcccggtctcgccttccctcgcggtcagcatgaaagccttcagtcccgtgaggtccgttaggaaaaacagcctgtcggaccacagcctgggcatctcccggagcaaaacccctgtggacgacccgatgagcctgctatacaacatgaacgactgctactccaagctcaaggagctggtgcccagcatcccccagaacaagaaggtgagcaagatggaaatcctgcagcacgtcatcgactacatcttggacctgcagatcgccctggactcgcatcccactattgtcagcctgcatcaccagagacccgggcagaaccaggcgtccaggacgccgctgaccaccctcaacacggatatcagcatcctgtccttgcaggcttctgaattcccttctgagttaatgtcaaatgacagcaaagcactgtgtggctgaataagcggtgttcatgatttcttttattctttgcacaacaacaacaacaacaaattcacggaatcttttaagtgctgaacttatttttcaaccatttcacaaggaggacaagttgaatggacctttttaaaaagaaaaaaaaaatggaaggaaaactaagaatgatcatcttcccagggtgttctcttacttggactgtgatattcgttatttatgaaaaagacttttaaatgccctttctgcagttggaaggttttctttatatactattcccaccatggggagcgaaaacgttaaaatcacaaggaattgcccaatctaagcagactttgccttttttcaaaggtggagcgtgaataccagaaggatccagtattcagtcacttaaatgaagtcttttggtcagaaattacctttttgacacaagcctactgaatgctgtgtatatatttatatataaatatatctatttgagtgaaaccttgtgaactctttaattagagttttcttgtatagtggcagagatgtctatttctgcattcaaaagtgtaatgatgtacttattcatgctaaactttttataaaagtttagttgtaaacttaacccttttatacaaaataaatcaagtgtgtttattgaatggtgattgcctgctttatttcagaggaccagtgctttgatttttattatgctatgttataactgaacccaaataaatacaagttcaaatttatgtagactgtataagattataataaaacatgtctgaagtcaaaaaaaaaaaaaaaaaaaaaaaaaaaaaaaaaaaaaaaa

SEQ ID NO: 844 - DNA, 2058 bp, HOMO SAPIENS
gagaggcgcccaggcggcggcggcggcggcccagcttcttctttcctcgcacagccaggcggcccctgctcgagtcccgcgtcgccatggccgcggttcccgagttgctgcagcagcaggaggaggaccgcagcaagctgagatctgtatctgtggacctgaatgttgatccctcgcttcagattgacatacctgatgcgctcagtgagagagacaaagtcaaatttacagtgcacacaaagaccacactgcccacgtttcagagcccagagttttctgttacaaggcaacatgaagactttgtgtggctacatgacactcttattgaaacaacagactatgctgggcttattattccacctgctcctacgaagcccgactttgatggtcctcgagagaagatgcagaaactgggagaaggtgaagggtctatgaccaaagaagaatttgccaagatgaaacaagaactggaagctgagtatctcgctgtgtttaagaagactgtgtcctcccatgaagtctttcttcagcggctttcttctcaccctgttctcagtaaagatcgcaactttcatgttttcctggaatatgatcaggatctaagtgttaggcggaaaaatactaaagagatgtttggtggcttcttcaaaagtgtggtgaaaagtgctgatgaagtcctttttactggagttaaggaggtagatgacttctttgagcaagagaagaacttccttattaactattacaataggatcaaagattcttgtgtgaaagctgacaaaatgaccagatctcataaaaatgttgccgatgactatatccacaccgcagcctgcttacatagcctggctttagaagagcccacagtcatcaaaaagtacctattgaaggttgctgagctatttgaaaaactaaggaaagtagagggtcgagtttcatcagatgaagatttgaagctaacagagctcctccgatactacatgctcaacattgaagctgctaaggatctcttatacagacgcaccaaagccctcattgactatgagaactcaaacaaagctctggataaggcccggttaaagagcaaagacgtcaagttggctgaggcacaccagcaggagtgctgccagaaatttgaacaactttccgaatctgcaaaagaagaactgataaatttcaaacggaagagagtggcagcatttagaaagaatctaattgaaatgtctgaactggaaataaaacatgccaggaacaatgtctcccttttgcagagctgtattgacttgttcaagaataactgatatgccttcactcagaagaaaagaaatgaatgtgaaagaaagccaagcatcacttgcacttaaatcattaccacggaagatatattagcttcaactttagtttaaaattatgtgaataaatattttgatttctacaaatcttaacatttaaccatgttggtttaaaaatattattgcttgctacttggacataactaatttttccttgtgcatttaatacctctgggcagaatccaaatactgggttctcccgtagttcgtctttagttactaagaaagggtgtaggacacattagccttctggaaacaagtagaagccatcacctggcccatgtccctacaaacccatgattgtcagggaggtgccagttacagcaggtgattcagctacttgaggtcggtaacagaccttccattcctcactgaaggtggggtttgtgtttttgttttgccctgttactccactggtagtcatctggtgtttgtactataacaacagcaagaaaatctcatttatctttatatactctttgcacctcctttttttagtcgagatataaatatttgaggggagagaaatatctacaggtatatatggaaacaaataatgtggtctgctttataagatggccagatctacattaggaaaagtataagccccctccctaatggccgctggggggtgagggcggtgtgttgtatgtctttgggtgtttgtttttttataaagcatataataaaataatcgtgctactaa

SEQ ID NO: 845 - DNA, 2770 bp, HOMO SAPIENS
gttgggcggggcagggagttcgtagccgcctctgggtaactcgactcgggcggccaaacctccggaggccggggacggaaggcgggcccgcagcagatcctggatccggaatctcccgggcaggagcggaatctgtcccgaaccgggtctgtgaggaactcgcgaacttggattaggaaatcccggagcccggatcgacaaatcccggaacccggaattaagatcgccaagtcccggatcgcggagcacagagcacggagtggactcgacgcggagcccggagtccggatcgcggcaccgcgggacgggacggagcgatgtcgggccgaggcgcgggcgggttcccgctgcccccgctaagccctggcggcggcgccgtggctgcggccctgggagcgccgcctccccccgcgggacccggcatgctgcccggaccggcgctccggggaccgggtccggcaggaggcgtggggggccccggggccgccgccttccgccccatgggccccgcgggccccgcggcgcagtaccagcgacctggcatgtcaccagggaaccggatgcccatggctggcttgcaggtgggaccccctgctggctccccatttggtgcagcagctccgcttcgacctggcatgccacccaccatgatggatccattccgaaaacgcctgcttgtgccccaggcgcagcctcccatgcctgcccagcgccgggggttaaagaggaggaagatggcagataaggttctacctcagcgaatccgggagcttgttccagagtctcaggcgtacatggatctcttggcttttgagcggaagctggaccagaccattgctcgcaagcggatggagatccaggaggccatcaaaaagcctctgacacaaaagcgaaagcttcggatctacatttccaatacgttcagtcccagcaaggcggaaggcgatagtgcaggaactgcagggacccctgggggaaccccagcaggggacaaggtggcttcctgggaactccgagtggaaggaaaactgctggatgatcctagcaaacagaagaggaagttttcttcattctttaagagcctcgtcattgagctggacaaggagctgtacgggcctgacaatcacctggtggagtggcaccggatgcccaccacccaggagacagatggcttccaagtaaaacggcctggagacctcaacgtcaagtgcaccctcctgctcatgctggatcatcagcctccccagtacaaattggacccccgattggcaaggctgctgggagtgcacacgcagacgagggccgccatcatgcaggccctgtggctttacatcaagcacaaccagctgcaggatgggcacgagcgggagtacatcaactgcaaccgttacttccgccagatcttcagttgtggccgactccgtttctccgagattcccatgaagctggcagggttgctgcagcatccagaccccattgtcatcaaccatgtcattagtgtcgaccctaacgaccagaagaagacagcctgttacgacatcgatgtggaggtggacgacccactgaaggcccaaatgagcaattttctggcctctaccaccaatcagcaggagatcgcctcccttgatgtcaagatccatgagaccattgagtccatcaaccagctgaagacccagagagatttcatgctcagttttagcaccgacccccaggacttcatccaggaatggctccgttcccagcgccgagacctcaagatcatcactgatgtgattggaaatcctgaggaggagagacgagctgctttctaccaccagccctgggcccaggaagcagtaggcaggcacatctttgccaaggtgcagcagcgaaggcaggaactggaacaggtgctgggaattcgcctgacctaactgctcagggatctttcttcccagccctggagcctggagggagaccaccctctgggtccttgctggggccgcagacacgtaggctggggtgaggagtgtctgctgtcaccctctactctccagctttagtcttataaatgtagtgataggattccttgttgcttggtccccaaagccttatactttttgcattggctttaattgggttcagcagatgcctcctctgcccccctgcaggcaggcccaagtaggactgctggaggctgtgctttgacattgtaagacatttccgaaccaaaggctgctgggtttgcatgtttacagactccccctggggcgagggtcagagctggctctggggagctgggctaggaagaggaggtgcagcccagactcttcctagcctttctaaaccaaagttctttgccattcctacaagcccagccttgctgctggttttttcctttcctttgggtatttgcactattttgggagcaagttttctatgtgggagccactttttttgtacaggggtaagttgggggttttcagggagcctgttaggtgcctccttcttttctttcctcaatctatgcaagcggctctggccgccatcatctcctgggatgccagagggctgcctctccagcggcttgggccggggaggggacactccagttctctagcatggcctgaggtatggggtatgtgcatgtggaggccagggtaaggtgaatggggaggctgggaggactggtgttgccctttggagcttggtgaggagggtgggcctagggcttggcgagtgccacatctggcaggtttggaaatttccaaataaatccttttgtctattg

SEQ ID NO: 846 - DNA, 3415 bp, HOMO SAPIENS
agtacgccgcgcgccactcctgcacttccccacccccacgaccgaacctggcttcgctaacgccctcccagctccctcgggcctgacttccggtttcctcgcgcgtccctggcgccgagcccgcggacagcggcagccccttttccggctgagagctcatccacacttccaatcactttccggagtgcttcccctccctccggcccgtgctggtcccgacggcgggcctgggtctcgcgcgcgtattgctgggtaacgggccttctctcgcgtcggcccggcccctcctgcctcggctcgtccctccttccagaacgtcccgggctcctgccgagtcagaagaaatgggactccctccgcgacgtgcccggagcagctcccttcgctgtggaagcggcggtgtcttcgaagaaaccggaagcccgtggtgacccctggcgacccggtttgttttcggtccgtttccaaacactaaggaatcgaaactcggcggccttgggggcggccctacgtagcctggcttctggttgtcatggatgcactggtagaagatgatatctgtattctgaatcatgaaaaagcccataagagagatacagtgactccagtttcaatatattcaggagatgaatctgttgcttcccattttgctcttgtcactgcatatgaagacatcaaaaaacgacttaaggattcagagaaagagaactctttgttaaagaagagaataagatttttggaagaaaagctaatagctcgatttgaagaagaaacaagttccgtgggacgagaacaagtaaataaggcctatcatgcatatcgagaggtttgcattgatagagataatttgaagagcaaactggacaaaatgaataaagacaactctgaatctttgaaagtattgaatgagcagctacaatctaaagaagtagaactcctccagctgaggacagaggtggaaactcagcaggtgatgaggaatttaaatccaccttcatcaaactgggaggtggaaaagttgagctgtgacctgaagatccatggtttggaacaagagctggaactgatgaggaaagaatgtagcgatctcaaaatagaactacagaaagccaaacaaacggatccatatcaggaagacaatctgaagagcagagatctccaaaaactaagcatttcaagtgataatatgcagcatgcatactgggaactgaagagagaaatgtctaatttacatctggtgactcaagtacaagctgaactactaagaaaactgaaaacctcaactgcaatcaagaaagcctgtgcccctgtaggatgcagtgaagaccttggaagagacagcacaaaactgcacttgatgaattttactgcaacatacacaagacatccccctctcttaccaaatggcaaagctctttgtcataccacatcttcccctttaccaggagatgtaaaggttttatcagagaaagcaatcctccaatcatggacagacaatgagagatccattcctaatgatggtacatgctttcaggaacacagttcttatggcagaaattctctggaagacaattcctgggtatttccaagtcctcctaaatcaagtgagacagcatttggggaaactaaaactaaaactttgcctttacccaaccttccaccactgcattacttggatcaacataatcagaactgcctttataagaattaatttggaagagattcacgatttcaccatgaggacacttatctctttcagtggtcctcccaagaaattatttaacaaactgaaaggagattttgattaaaattttgcagaggtcttcagtatctatatttgaacacactgtacaatagtacaaaaaccaacatagttggttttctagtatgaaagagcaccctctagctccatattctaagaatctgaaatatgctactatactaattaataagtaaacttaaggtgtttaaaaaactctgccttctatattaattgtaaaattttgcctctcagaagaatggaattggagattgtagacgtggttttacaaaatgtgaaatgtctaaatatctgttcataaaaataaaaggaaaacatgtttcttcaaattgcataatggaacaaatggcaatgtgagtaggttacatttctgttgttataatgcgtaaagatattgaaaatataatgaaataaaagcatcttaggttataccatctttatatgctattgcgtttcaatatttaagatttaaagtgattttttggtcacagtgttttgttgataaaatttttttagaattgaagtttgaattctaagacttgaaacaacctgatcactgaagccaactttgtcccagcacattccttaagtcctaattgggaaaaaaaaaaaaaaaaatgaaatagttgaaaaactctggggtgtaaacaaatgattgtaaccctacacactattcaataagtagtagaaggagcatcacacagatttcagtctaatctgcccttctgtgggccataatataaacataaatgtgtgtaatgataaaaagtcattttcttcaaagagactacagctagctgcacattgtgtagagcagcttctaaattgttagactttgtgttgaaatgtaatattctatttattgagaaagtgatttaaaattattatttttaatcatagaaatcagggtttgggctgtattgatattgtcgatcatgaaatgtccacacttattctaagtggccaattatttggaaataaagaaggaaataaagatggcttcacatggaaatttaagttctttcagggtggagatttacttggttcatacaccttttgcctgaattaaagtatttcatgtaggaggacttttatcctttttgatagacagtttcatatatcttgaactcaatatctcagatctcttctactgtattactgaatagcatacatacatagacaatgttcgccattcactagatatttttttctattatcttacacttattcaagcttgtctgtgattaatggaattggtgtcagatgctggaatttattctgaccaatgaacacagctgactcaggggagtacaatctcctgccaagtaatagaaccaaacccaatatgcataaaagaaatacaatactccaggctttagctgaaggaagcaactacctgtgtaataacaaagcagcaaaaactatttctcatgtggctgcataggctgtatattatatctgatctctaatgtagcttactggtttgccttttttaaaaccaaaattggaaattttcctttgtaaagaaaaaaagtcttatgagataattgcttgattaatgttttgaacaataccaagaaattgtttaattaaaataaatatttttgtttgaaattgaaaaaaaaaaaaaaaaaa

SEQ ID NO: 847 - DNA, 3898 bp, HOMO SAPIENS
cggggaggctgagtccccaggagctggggaccccgagttgggggcggggcggctggggctacgcccgtgaagctgccccgccggctttcccggaccgcgagggggacagtgaggccgggaccccctccgcgcctttgcaccagccgtgaccccttgcaacgggggtacccagcggagctgcgcgctctcggcgcccccggagcctgcgccccgggccccttgcgcattttgcacgggggagactgaggctaggagtgcgaccctcagcccggggtcacacctcgtctggggcacggccaggtgggtggtagcctcagcctgcgagaccccctacccccgccccgtggtttcccgcaccgtggggccctgctctgaccacagactccgatggcagcggcggcgctgcgggaccccgcgcagggctgcgtgacctttgaggacgtgaccatttacttctcccaggaggagtgggtgctcctcgatgaggctcagagactcctgtactgcgatgtgatgctggaaaactttgcacttatagcctcgctgggacttatatctttcaggtcccacatcgtttcccagttggagatggggaaagagccctgggtgcctgacagtgtggatatgacatcagccatggccagaggggcttatggcaggcctggctctgatttttgccatggaacagagggcaaggacttaccttctgagcataacgtttctgtagaaggagtggcacaggacaggagtcccgaggcaactctgtgcccccagaagacctgcccctgtgacatatgtggcctacgtttgaaagacattttgcatttggctgaacaccagacaacacatcccaggcagaaaccatttgtgtgtgaggcatatgtgaaaggctctgagttcagtgcaaaccttccccggaaacaggtgcagcagaacgtacacaaccctatcagaacggaggagggccaggcttcccctgtaaagacctgcagagaccacacatcagatcagctttccacctgcagggagggtgggaaggactttgtggccacagcagggtttctgcagtgtgaggtcactcccagcgatggggagccgcacgaggccaccgaaggtgtggtggattttcacattgcactaaggcataacaagtgctgtgaatctggggatgccttcaataacaaatccactcttgttcagcaccagagaatccacagcagagaaaggccttatgaatgcagcaaatgtggaatcttcttcacttacgccgctgacctcactcaacaccagaaagttcacaatagaggaaaaccgtatgagtgctgtgaatgtggaaaattcttcagccagcactccagccttgttaaacatcgcagggttcacaccggtgaaagccctcacgtgtgtggtgactgtgggaaattcttcagccgaagctccaacctcattcagcataagagggttcacactggtgaaaagccatatgagtgcagcgactgtgggaagttcttcagccagcgttccaacctcattcatcataagagggttcatacgggcagaagtgcccatgagtgcagtgaatgtgggaaatctttcaactgcaactccagcctaattaaacattggagagttcacactggagaaagaccttacaagtgtaacgaatgtgggaaattcttcagccacattgccagcctcattcaacatcagatagttcacactggcgagcggcctcacgggtgtggtgagtgtgggaaagccttcagccgaagctctgacctcatgaaacatcagcgagttcacactggtgagcggccttatgaatgcaatgaatgtgggaagttatttagccagagctccagcctcaatagccatcggagacttcacactggtgaacggccttaccagtgcagtgaatgtgggaaattctttaaccaaagctccagcctcaataaccaccggagacttcacaccggcgagcggccttatgagtgcagcgaatgtgggaaaaccttcaggcagaggtccaatctgaggcagcacctgaaagttcacaaaccagacaggccttacgaatgcagcgaatgtgggaaagccttcaaccaaaggcctaccctcattcggcatcagaagattcacatcagagaaaggagcatggagaatgtgctccttccctgttcacagcacacaccagagataagctctgagaacagaccttatcagggcgctgtcaactacaagttgaaacttgttcatccaagtacccaccctggggaggttccctaggaatgctagctgtgttggaagctttctggagacaagttacattctcttactgtagagtttatcagcgttttttcactgctggggttgtgatagaagccatgtcagcaccacacactgcagctctccaaagagtgtgtccaccactccactgtgctcagggaaggcagacctctcctctctctttccaatccctaaagggaattaggagtagtctgaagccttgggaagatgtcattcccgccctgtatggctggtttagccatggacatgaccagcttttggctgtgaagacctgagcagggttttgccaacagcttgttctagagaaggtttccctttttctgggacattgttggtctcatgttatgcctgtgaaggatttgtccagccttcatgttactctacacaacaacttatctcctgtgtattgccctggttcatgtgatgataatggccttatgataaagccgcctttagtcttccatgttctgatcactgtgtggggtggttcaagagcagagttaagatctaccaaactgaaggggtctccagattatcttggaggggacaggaggatggcagagaaacaactgtcaatccagatttgacctcatttgcattgccaccaaggcctcctaggaaaaattgtaggaatttatgggtataatattgtggtctgaatggcgtgaatttttatcccgaggagggggcagttgtgacaacctccagtgcatgtgggaacagcatgaattgggtcccttattcccagggggtgccccatattccccaatactgtaaagcagatgctgtttagcacctgccaaggagccatatgccctgaagttcagcattaggcaggtatctcttaactgtaagacataccaggcccagctgggaccataatttgtacagaaacactggatgtgattaatagggagtaggcgagattatagcaaaccagcagaaatggaactctgctaaatgtgcatccgtgaatgctcccttgaatgtggctgtgcaggattcagggtttgcagaaattctcaggacctcagacctctgtcctatgactaatgttactggcagagcaaataatctaaaggttttggttttgtggattaccatctccgtgctgtgcatctgaaggccagtgctgtgctggcaggaaaatagggactgagaaaaagcagatcctatactatagggactgtagtatctatgacgtagccagccattctttgctcccaaggcaagaagaaagagatgacagagtcaatatagggttgccaaatcggattttctaaaatgagtaggaagttggatttttatgtgcaacagtttcttttaatgctttgttgatatgtgattgtcatgcaataattattcatatttggtaagttttgtacatatattatgtacactcagggaaccaataccataatcatgataatgaacgtatccatcacctgcaaagctacctcatgcccctttacattccctccttgccttccctaggaaaccgttgatttacattttttactttagatttgtttgccttttctagaattaacacaattggaatcataaagtatttatactctcaaaaaaaaaa

SEQ ID NO: 848 - DNA, 545 bp, HOMO SAPIENS
tgatggagtaggagtggggccctcaggcacttctggtaaagacattccacctgcaagcagcattttgagtaaagcactgctgtggtttgccgatttatggtccatttaatgttaggctaaagcacctttaatcatttttgttgttttaagataatgtatttgtgaagtggataaacactggaaatagggtgcttcttctggaaagttcagtgtaaaacacaaacaaggctttggcgggtttatctggctttataaacaagtctgaaaaatggatgaaagctaaatatataaagcagttggttgtctatcttttatcatttttactcagatctgtatttaacacttatttatttgttagtttttacattcaaaagaaatacactttgaactttggctaacattgtaggatattttttaattgtttctacatttttaaagcatgattcatcatttttgtaaacttagatcattttttaattgtcttttcttttccaatagaccagttaccactcatgtgtctgcagaacctctttattgtattccta

SEQ ID NO: 849 - DNA, 417 bp, HOMO SAPIENS
catattaaatcactgtactggcaatacataatgtacacatagcttgccgagctctatattatgatgccaggtaacccacagtgtggactccactgtatatatgaacatcacatgcataaatgttaagcacagatagcacatatggaaaaatttgaaatgagctaaggttaaagaagatgctaaagagcaggtaccaagaaatctcagaaagcggactgaagtgttaaataaagaatgtttggcttgggaagcaatctgggcttaaattgaatgcattttatttagtgactggaaatttttgaagttcaaaaattttttaaaaacagttatgttagaatagactctgtatctgaattcttgatactaatgaccttataacaagttgggtttgatcccattcacttgagccagttggtt

SEQ ID NO: 850 - DNA, 1865 bp, HOMO SAPIENS
cgcgagagggactttgtgttccgctgaccctcctcggggcgcttcctcccgtgccgcccttcccctcccccgccgcgtccttgcgaggcgcctcccattcggtgggaccgacccggggggatggagggggcacgcttctacaaccctcctgggaccccgaagagacgcccgcgtgcgacctgagacgccgccctcgccgagggcccatgggcgcgtccccacaggcgggcagtggacgtgagggcggcgagcggcggggccgcggcgtccaggagggccgcgctcgggctcggccccgcgcaggccgcgcgcgcgcgctcccgccgccgcccgggccgcgcccgccccgcctctaggcgccggccccggagcccggtccgcgagcagcggcggctgccggagggacgatgagctgcgcggggcgggcgggccctgcccggctcgccgcgctcgccctgctgacctgcagcctgtggccggcacgggcagacaacgcgagccaggagtactacacggcgctcatcaacgtgacggtgcaggagcccggccgcggcgccccgctcacgtttcgcatcgaccgcgggcgctacgggcttgactcccccaaggccgaggtccgcggccaggtgctggcgccgctgcccctccacggagttgctgatcatctgggctgtgatccacaaacccggttctttgtccctcctaatatcaaacagtggattgccttgctgcagaggggaaactgcacgtttaaagagaaaatatcacgggccgctttccacaatgcagttgctgtagtcatctacaataataaatccaaagaggagccagttaccatgactcatccaggcactggagatattattgctgtcatgataacagaattgaggggtaaggatattttgagttatctggagaaaaacatctctgtacaaatgacaatagctgttggaactcgaatgccaccgaagaacttcagccgtggctctctagtcttcgtgtcaatatcctttattgttttgatgattatttcttcagcatggctcatattctacttcattcagaagatcaggtacacaaatgcacgcgacaggaaccagcgtcgtctcggagatgcagccaagaaagccatcagtaaattgacaaccaggacagtaaagaagggtgacaaggaaactgacccagactttgatcattgtgcagtctgcatagagagctataagcagaatgatgtcgtccgaattctcccctgcaagcatgttttccacaaatcctgcgtggatccctggcttagtgaacattgtacctgtcctatgtgcaaacttaatatattgaaggccctgggaattgtgccgaatttgccatgtactgataacgtagcattcgatatggaaaggctcaccagaacccaagctgttaaccgaagatcagccctcggcgacctcgccggcgacaactcccttggccttgagccacttcgaacttcggggatctcacctcttcctcaggatggggagctcactccgagaacaggagaaatcaacattgcagtaacaaaagaatggtttattattgccagttttggcctcctcagtgccctcacactctgctacatgatcatcagagccacagctagcttgaatgctaatgaggtagaatggttttgaagaagaaaaaacctgctttctgactgattttgccttgaaggaaaaaagaacctatttttgtgcatcatttaccaatcatgccacacaagcatttatttttagtacattttattttttcataaaattgctaatgccaaagctttgtattaaaagaaataaataataaaataaaaagtctgtaaaaaaaaaaaaaaaaaa

SEQ ID NO: 851 - DNA, 4554 bp, HOMO SAPIENS
gagggcacgaagaggcaccgaccgtacccaggcgcaccggcaggagagcggcaccgtggctgccgcagcgcgcagaggctgtggaggggcttacggctcccagcccacgggtctcagacccaggggctgggcccccagcccccagtcccgatcccagctgggtcgagccatgctgcgctacctgctgaaaacgctgctgcagatgaacttgttcgcggactctctggccggggacatctccaactccagcgagctgctcttgggcttcaactcctcgctggcggcgctcaaccacaccctgctgcctcccggcgatccctctctcaacgggtcaagggtaggaccggaggacgctatgccccgcatcgtggagcagccgccagatctgctggtctcccgaggcgagcccgccacgttgccctgccgcgctgaaggccgaccccgacccaacattgagtggtacaagaacggggcgcgtgtggccactgtgcgggaggatccgcgtgcgcaccgcctgctgctgcccagcggcgccctcttcttcccgcgcatcgtgcacgggcgccgcgcgcggccggacgaaggtgtctacacttgcgtggctcgcaactacctgggggcagcagcgagcagaaacgcctcgctggaagtggcagtcctccgtgatgatttccggcagtctcctggaaacgtggtggtggcagtgggggagccagcagtactggaatgcgtgcccccccgcggccacccggagccttccgtgtcctggaggaaggacggtgcaagactcaaggaagaggaaggaaggatcacgatccgtggagggaagctgatgatgtcacatacactcaagagcgatgcaggcatgtatgtgtgcgtagcctccaacatggcgggagaacgggagagtgcggcagctgaagtcatggtactggagcgtccctcattcctgcgcagaccagtgaatcaggtggtcctggctgatgcccctgtgactttcctatgtgaggtgaagggggatcccccacctcgtctacgctggcgcaaggaggatggggaactgcccacaggcaggtatgagatccggagtgaccacagcctttggattgggcatgtgagtgccgaagatgagggaacgtacacctgtgtggcggagaacagtgtgggccgcgctgaagcatctggctccctcagtgttcacgtcccaccccagttggtgacccagccccaggaccagatggcagctcctggagagagcgtggctttccagtgcgagaccaaaggaaaccccccacctgccatcttctggcagaaggaggggagtcaggtcctgcttttccccagtcagtcacttcagccgacggggcgcttctcagtgtctccaagaggccaacttaacatcaccgcggtgcagcgtggggatgctgggtactacgtgtgccaggctgtcagtgtggctggcagcatcctggccaaggccctgctggagataaaaggagcctctttggatgggctgcctcctgtcatcctccagggaccagccaatcagacgctggtgcttggctcctccgtgtggctgccctgcagagtgactgggaaccctcaacccagtgtccgatggaagaaggatgggcagtggctgcagggggatgacctccagttcaagacaatggccaacggtaccctgtacatcgccaatgtgcaggagatggacatgggcttctacagctgcgtggccaagagttccacaggggaagccacatggagcggctggcttaagatgcgggaagactggggagtatcaccagacccccctacagaacccagttcccctccgggggctccctctcagccagtggtcactgagatcaccaagaacagcattaccctgacctggaagcccaacccacaaactggggctgcagtcacgtcttatgtgatagaggccttcagcccagcagctggcaacacatggcgtactgtggcagatggcgtgcagctggagacacacacagtcagcggtctgcagcccaataccatctacctgtttctggttcgagcagtgggagcctggggcctcagtgagcccagccccgtctctgagcctgtccgtacacaggatagcagcccctctaggccagtggaggacccatggagaggccagcagggactggcggaagtggctgtgcgcctgcaggagcccatagtcctgggaccccggaccctgcaggtgtcctggactgtggatggcccagtccagctggtgcaaggtttccgggtgtcttggagggtagcaggccctgagggaggaagctggacaatgttggacctacagtccccaagccagcaaagtactgtgctaagaggactccctccagggacccaaatccagatcaaggtgcaagcccaaggccaggaggggctgggggctgaaagcctctctgtgaccaggagcattcctgaggaggcccccagtggccccccacagggagtggcggtggccttggggggtgatggcaacagcagtatcactgtgtcctgggaacctccactcccctcccagcaaaatggggtcatcacggaataccagatctggtgcctgggcaatgagagccgctttcacctcaatcgatctgcagcaggctgggcacgctccgcaatgctccgaggactggtgcccggtctcctctatcgaaccctggtcgcggcggccaccagcgcaggcgtgggcgtgcccagtgccccagtgctggtgcagctgccgtccccgccggacctggagcccgggctggaggtgggcgcggggctggcggtgcggctggcgagggtgctgcgggagcccgccttcctcgcgggcagcggcgcagcctgcggggcgctgcttctcgggctctgcgccgccctctactggcgccggaaacagcgcaaagagctcagccactacacggcctcttttgcctacacaccggcagtgtccttcccgcactcagagggcctctctggagccagttccaggccacccatgggccttggccccgccccctactcatggctggcagattcgtggccccacccatctcgaagcccctcggcccaggaacccaggggaagctgctgccctagcaatcctgacccggacgacagatattacaacgaagcgggaatctccctgtatctagctcagacggccaggggcacggccgcccctggcgagggtcctgtctatagcaccattgacccagcgggggaggagctgcagaccttccatgggggcttcccccaacatccctcaggagatctgggtccctggagccagtacgctcctccagagtggagccagggggacagtggagccaagggaggcaaagtgaagcttctggggaaacctgtgcagatgccctctctgaactggccagaagccctgcccccacctcctccttcttgtgaactgagctgcctagaagggccggaggaggagctggagggcagctcagagccagaggagtggtgcccgccaatgcctgagagaagtcacctgacggagcccagctccagtggagggtgcctggtcaccccatcccgaagggaaaccccctctcccacaccttcctatggacagcagtccacagccactcttacaccctcacctcctgaccctccccagcccccaactgacatgccccatctccatcagatgcccaggagggtgccccttgggccgagttcccctctcagtgtatcccagcccatgctgggcatccgtgaagcgaggcctgctggcttgggtgctggccctgcagcctcaccccacctcagccccagtcctgcccctagcacagccagcagtgccccaggcagaacctggcaggggaatggggagatgactcccccacttcaaggaccccgtgctcgattccggaagaaacccaaggctcttccctacaggagggagaacagtcctggggacttgcccccaccacccttgccaccgccagaggaagaggcgagctgggccctagagctgagggcagcaggcagcatgtcctccctggagcgggagcgcagtggggagaggaaagcggtccaggccgtgcccctggcagcccagcgggtgctccacccagatgaagaggcctggctcccatacagcagaccaagcttcctgtcccggggccagggcaccagcacatgttccacggccggcagcaactcttccaggggctccagcagctctaggggctcccggggccctggccggagccggagtcggagtcagagccggagccagagccaaaggccaggacagaaacgccgagaggaaccaagatgacccttgttggggcattgagaatatcatgagtgccacggggaaggggagtagggatgtcttttcccccccagcagtgatgagtggggctagctgaagcccattggtttccacgatttcaattggctgagaaggcagagagctagctcctccctttctttctttttccacctgagacttgtttataaaaaacaaaacaataaaaagagtctgatcagagcccaggg

SEQ ID NO: 852 - DNA, 413 bp, HOMO SAPIENS
  misc_feature (56)..(61): n is a, c, g, or t
gaagtgccacatatcccaagtgattaccagtctaaatcatagacacagttctctgnnnnnnctgagatcaaacaggtcttcagcagtcagaacttaatttgcttgagaatttgtttgatttttctaggaattcaccattcaagtttctctctgactcatatattacatttctcggtagcataatttataaaatataaaactcatttggttgtgcattgcctaaagttgtaaattttttacctttttaagttccagtcccatcttttctcattactaacagatctaacaagaacaccagtcaaataaaaattgtcataggaagtttccagcatgcatatccccacccccatcaggatgtataggttgcctaggagtagtggctgagaaaatagaggaatcttctctgtacagct

SEQ ID NO: 853 - DNA, 501 bp, HOMO SAPIENS
gttacttatgggaacctcatctaaaaagcaaggatcctgatacctgcctcatattgtggcaaggatcaaatgagtcaaataagatgcttgtgaaagtgaggacaggatctatcctcaacacctagtgcaattctttttacacattaggtacttagtaatttgggttgaattgtgttgaactaacctggcggtataggcaaaatttggaagtttggttttcagaaagtcttgacttcctcttatctctaagtaattggcatgtcctctaattcatattttcccccctcatctgttgggtgaaatactgtttatcctttagtactaaaattaaaagttacctcattcttctagctagctgattttttttttaatctaggctaaatcatgaatacatttacatttaaataaaatattacagttgaaagtaaagggtcctttcattatctccacttccaattccagtaccctgtgtaaaggaaaacatatacatcttgcagacat

SEQ ID NO: 854 - DNA, 470 bp, HOMO SAPIENS
  misc_feature (339)..(339): n is a, c, g, or t
gctgtgctttagataccagataacaaatattgtttcccctgaagatatgacctactagaactactcacatatatagtccaataattactgacttaataggtatggtaaaatagctgataataagtcagactctcaagagtttctgtaccttgattattgacaaattcattgttttacatcctactaaagaacatgtgtgtggggagggggtggggaactggttcacaacataatctgaaggagatcaaacatctgtaaggacaggtacccagtgatgataatatatctgaaaacacaagccatttttattctttatcccaattaacttgaggtactctnatgatgaagcactcgattgcactatgacctccttgagtgatgtgcagcttggttcctctctcactttttgtttctttttaatatgcaaatgtgagtgtgcgatcttcagtgtgtctgcataagctaactta

SEQ ID NO: 855 - DNA, 5072 bp, HOMO SAPIENS
ggagctccatgccactccccgcctgggccactgctttgttttcttctaatgtttttcctctacctgggttggctgtttcttcattcatatttgagaagaatcacctcctaattaaatgtagcacttcgctctctccctacatgaaggctgtcttggttacccgactaggcaacgcgcattggtatcaaattaccgaaagtctacaccggagcagtcctcatatttacatacaaataactcaggggcttgcatttatgtcaccattctgtcctgctagaggcttgccagaggagtttttaatccaatcagaaggagctttaaaaggatgtctgcgaagtggtcaaaaggatcttaacctcaattaagtggggttttttaaaaagattttttggggggcctgaaattttgaaaatcttcgaactctgagtggggaaagatgtataattcctcaattgcctacgaggatatcaagatgctgagaggaattcagcggtggtgaagagagtggatacaaaccagggattggtttccttgagctgttttggaggttgattctaaatcactgcttaaggaattcctggaaacatcaggaaaacatttgatcatccaagcctagtggaaatggctttaccgcagagtgaagatgcaatgaccggggacacagacaaatatcttgggccacaggaccttaaggaattgggtgatgattccctgcctgcagagggttacatgggctttagtctcggagcgcgttctgccagcctccgctccttcagttcggataggtcttacaccttgaacagaagctcctatgcacgggacagcatgatgattgaagaactccttgtgccatccaaagagcagcatctaacattcacaagggaatttgattcagattctcttagacattacagctgggctgcagacaccttagacaatgtcaatcttgtttcaagccccattcattctgggtttctggttagctttatggtggacgcgagagggggctccatgagaggaagccgtcatcacgggatgagaatcatcattcctccacgcaagtgtacggcccccactcgaatcacctgccgtttggtaaagagacataaactggccaacccaccccccatggtggaaggagagggattagccagtaggctggtagaaatgggtcctgcaggggcacaatttttaggccctgtcatagtggaaatccctcactttgggtccatgagaggaaaagagagagaactcattgttcttcgaagtgaaaatggtgaaacttggaaggagcatcagtttgacagcaaaaatgaagatttaaccgagttacttaatggcatggatgaagaacttgatagcccagaagagttagggaaaaagcgtatctgcaggattatcacgaaagatttcccccagtattttgcagtggtttcccggattaagcaggaaagcaaccagattggtcctgaaggtggaattctgagcagcaccacagtgccccttgttcaagcatctttcccagagggtgccctaactaaaagaattcgagtgggcctccaggcccagcctgttccagatgaaattgtgaaaaagatccttggaaacaaagcaacttttagcccaattgtcactgtggaaccaagaagacggaaattccataaaccaatcacaatgaccattccggtgcccccgccctcaggagaaggtgtatccaatggatacaaaggggacactacacccaatctgcgtcttctctgtagcattacagggggcacttcgcctgctcagtgggaagacatcacaggaacaactcctttgacgtttataaaagattgtgtctcctttacaaccaatgtttcagccagattttggcttgcagactgccatcaagttttagaaactgtggggttagccacgcaactgtacagagaattgatatgtgttccatatatggccaagtttgttgtttttgccaaaatgaatgatcccgtagaatcttccttgcgatgtttctgcatgacagatgacaaagtggacaaaactttagagcaacaagagaattttgaggaagtcgcaagaagcaaagatattgaggttctggaaggaaaacctatttatgttgattgttatggaaatttggccccacttaccaaaggaggacagcaacttgtttttaacttttattctttcaaagaaaatagactgccattttccatcaagattagagacaccagccaagagccctgtggtcgtctgtcttttctgaaagaaccaaagacaacaaaaggactgcctcaaacagcggtttgcaacttaaatatcactctgccagcacataaaaagattgagaaaacagatagacgacagagcttcgcatccttagctttacgtaagcgctacagctacttgactgagcctggaatgagtccacagagtccatgtgaacggacagatatcaggatggcaatagtagccgatcacctgggacttagttggacagaactggcaagggaactgaatttttcagtggatgaaatcaatcaaatacgtgtggaaaatccaaattctttaatttctcagagcttcatgttattaaaaaaatgggttaccagagacggaaaaaatgccacaactgatgccttaacttcggtcttgacaaaaattaatcgaatagatatagtgacactgctagaaggaccaatatttgattatggaaatatttcaggcaccagaagttttgcagatgagaacaatgttttccatgaccctgttgatggttatccttcccttcaagtggaactggaaacccccacagggttgcactacacaccacctacccctttccagcaagatgattattttagtgatatctctagcatagaatctccccttagaacccctagtagactgagtgatgggctagtgccttcccaggggaacatagagcattccgcagatggacctccagtcgtaactgcagaagacgcttccttagaagacagcaaactggaagactcagtgcctttaacagaaatgcctgaagcagtggatgtagatgagagccagttggagaatgtatgtctgagttggcagaatgagacatcaagtggaaacctagagtcctgcgctcaagctcgaagagtaactggtgggttactagatcgactggatgacagccctgaccagtgtagagattccattacctcatatctcaaaggagaagctggcaaatttgaagcaaatggaagccatacagaaatcactccagaagcaaagacaaaatcttactttccagaatcccaaaatgatgtaggaaaacagagtaccaaggaaactctgaaaccaaaaatacatggatctggtcatgttgaagaaccagcatcaccactagcagcatatcagaaatctctagaagaaaccagcaagcttataatagaagagactaaaccctgtgtgcctgtcagtatgaaaaagatgagtaggacttctccagcagatggcaagccaaggcttagcctccatgaagaagaggggtccagtgggtctgagcaaaagcagggagaaggttttaaggtgaaaacgaagaaagaaatccggcatgtggaaaagaagagccactcgtaacagcgaacggtcagtcaaggatcataagtttttactgccagtattgagaaattcgtggaagaaatgtcagcaggaagtaaaaattcaccgagaagtgtgtgtgtgttcgctgcttccacacattaatggcatgattttttttatgcaaaaagaaaagaaaagaaaaccacccacattttaatttagcatgagccaatttacagagcatggaaatcactttcatttccggattggcgcgtgtgcaattagcaatgcagtgtatatacaagaagccatgctgttaacagtttatctcaagtaatttggtgtcatttacaaaaggaagaaattcctgccatcagaagggacagaaggagatggaatgatcaaatcacagagaaacactaaaattactaaatctacaacagctcgccttatttttcttggacccaaactgtcagggtataaacactatttgtttcttttttaaaacatcgatagttttgctgtaaataataacactgtataaattctaacagaaaaatagaataaaatgttgataaggcactgcctcttagaacacaaacagaatattgcaaatgcatttaacaaataggggtctcaagtgacttcaccctagaagaggagggagggattctgggtgggggtgactcttcactgattcttgtatattagcaattataatgtttgtatatgcaaaactgctagcttgattttaaaaaaaaacaaatctttaaaatctgctgcaaatttaaataattcccaaaatgaggaattctgtagttctgtgaaaaatttttttcttcagaatactaatattttgatgcatgtgtatcaccttattttgattaaatcttttccaattttgcaaacactacagtatactgcaacacaaaagattttatctgtaaacacaaagcccttcatctaatatttgttgctattgccaatttttcaatgaaatgacctaaaaacaacaaaaaaaaataacctatacggtagttgctttagggggtggggggatgctatctgttagtgcttaaaagggggtaaatgcttgccgctttagaggtggatggtgctcataaaaggccccagtcgggggtatttaaaaaggactgaacagaaatccttagctagtagaatggcagcacgctgtaaaattattactgtattgtgtactggctataagatgtagacacctttcagtaagccaatcatttgtaaccattctagcagtgtcatattaggttaataaggctgctgtgttttaaagggcatttttatttgggttttggtgaaattctttaatttgttgattatattcacataaaatcagcattcattgacacatagctctaatgacatatgtatgaaaaaccatacactggatgacctagtcgattatttaagcataaaataaattgtgttaaactcttcaccta

SEQ ID NO: 856 - DNA, 751 bp, HOMO SAPIENS
gtatctgtggtaaacccagtgacacgggggagatgacatacaaaaagggcaggacctgagaaagattaagctgcaggctccctgcccataaaacagggtgtgaaaggcatctcagcggctgccccaccatggctacctgggccctcctgctccttgcagccatgctcctgggcaacccaggtctggtcttctctcgtctgagccctgagtactacgacctggcaagagcccacctgcgtgatgaggagaaatcctgcccgtgcctggcccaggagggcccccagggtgacctgttgaccaaaacacaggagctgggccgtgactacaggacctgtctgacgatagtccaaaaactgaagaagatggtggataagcccacccagagaagtgtttccaatgctgcgacccgggtgtgtaggacggggaggtcacgatggcgcgacgtctgcagaaatttcatgaggaggtatcagtctagagttacccagggcctcgtggccggagaaactgcccagcagatctgtgaggacctcaggttgtgtataccttctacaggtcccctctgagccctctcaccttgtcctgtggaagaagcacaggctcctgtcctcagatcccgggaacctcagcaacctctgccggctcctcgcttcctcgatccagaatccactctccagtctccctcccctgactccctctgctgtcctcccctctcacgagaataaagtgtcaagcaagattttaaaaaaaa

SEQ ID NO: 857 - DNA, 1927 bp, HOMO SAPIENS
gtgtgtatttgtggccttcagctactctggatcaagtgtggcccagaaggttactcaagcccagtcatcagtatccatgccagtgaggaaagcagtcaccctgaactgcctgtatgaaacaagttggtggtcatattatattttttggtacaagcaacttcccagcaaagagatgattttccttattcgccagggttctgatgaacagaatgcaaaaagtggtcgctattctgtcaacttcaagaaagcagcgaaatccgtcgccttaaccatttcagccttacagctagaagattcagcaaagtacttttgtgctcttgctgtacggggaaaactcctagaaaggaatgggggatacgcggtctttccatccgataaactcatctttggaaaaggaacccgtgtgactgtggaaccaagaagtcagcctcataccaaaccatccgtttttgtcatgaaaaatggaacaaatgtcgcttgtctggtgaaggaattctaccccaaggatataagaataaatctcgtgtcatccaagaagataacagagtttgatcctgctattgtcatctctcccagtgggaagtacaatgctgtcaagcttggtaaatatgaagattcaaattcagtgacatgttcagttcaacacgacaataaaactgtgcactccactgactttgaagtgaagacagattctacagatcacgtaaaaccaaaggaaactgaaaacacaaagcaaccttcaaagagctgccataaacccaaagccatagttcataccgagaaggtgaacatgatgtccctcacagtgcttgggctacgaatgctgtttgcaaagactgttgccgtcaattttctcttgactgccaagttatttttcttgtaaggctgactggcatgaggaagctacactcctgaagaaaccaaaggcttacaaaaatgcatctccttggcttctgacttctttgtgattcaagttgacctgtcatagccttgttaaaatggctgctagcaaaccaatttttcttcaaagacaacaaacccagctcatcctccagcttgatgggaagacaaaagtcctggggaaggggggtttatgtcctaactgctttgtatgctgttttataaagggatagaaggatataaaaagatataggactctttttttactcctacaagtgatacactttgaaaatgatgttttgttccttttgactttctttaccttttgaagtagaaagtgggaaccaacaggttcacagcttcattcctcatgaggaaaataggccttgggagaagaagagcgggtgcccttttatctaaacatggaaggctctgctcaactgagcactagatttgctacaaaccagcatcatcttcttcctcctgtcctcacggcttgtcccaccctctatgttcacttcaggagccacactagagattctgcatggcgtggaggaggacaaagtttcagcactttctgcctctcctaatactttacaaatgagattacatttgaatttgctaatactttatgagcaggcaatgaggtttccaaaatctcatctaaatactctccaatctattagcaaaaatcagagtaaaatacagaggaaaggcactgctttctgttaattgatttaacatgcatgaattagctccctctgagttccaggcactatgctgagagtacaaagaagacacaagtctgctttcaagcaactcactgtgaaagtgtttttgaagggaggaacagaaatgagacccctatctttccctataaaaacaacatttttactgtcttttgcctgccaatctgtatttgaaaccattggacactgattctctggcctgggactttggcatgatggttttctgcctttcttctcagcctctgcctctattgcatttattaaactgcattgtgtgc

SEQ ID NO: 858 - DNA, 2220 bp, HOMO SAPIENS
gttaacgcccacgggctcgcgcggcgccgcctcctgggctcagttaccgcggacgccagtgccgggctccaggagacgcagggcgacgccacacgccggggtggccgactgggtcagcgcgggctgcgcctcctcgccatgggccccctctcggcgcggctgctaatgcagcgcgggcgccccaagagcgaccggctggggaagatccggagtctggacctgtcaggattggagctgctttccgagcacctggaccccaaactcctgtgccgcctgacgcagctgcaggagcttgacctgtctaacaaccacctggagacgctgccggacaacctgggcctgtcccacctgcgtgtcctccgctgcgccaacaaccagctgggggatgttactgccttgtgccagttccccaagctcgaggaactcagcctggagggcaaccccttcctgacggtcaatgacaacctgaaagtctcctttctcctgcccacgctccgtaaggtcaatggcaaggatgcgtcctcaacttactctcaggtggagaacctgaatcgggagctgaccagcagggtcacagctcactgggagaagttcatggccacactgggtcctgaagaggaggctgagaaggcccaggcggactttgtgaagtcggctgtcagggatgtccgctacgggcccgagtccctcagcgagttcacccagtggcgggtgcggatgatctctgaggagctggtggccgccagtaggacccaggtgcaaaaggctaacagcccagagaagcccccagaagctggagctgcccacaagcccagggccagactggcggccttgaaacggccagacgacgtcccactcagcctctctcccagcaagcgggcgtgtgcctccccgtcggcccaggtggagggcagccctgtggcaggctccgatggcagccagcctgctgtgaagctggagcccctgcacttcctgcagtgccacagcaagaacaacagcccccaggacctcgagacccagctgtgggcctgtgccttcgagccggcctgggaggagggggccacatcccagaccgtggccacgtgcggcggggaggctgtgtgcgtaattgattgccagacgggcatcgtgctccacaagtacaaggcacccggcgaggagttcttttctgtggcctggaccgctctgatggtggtcacacaggctggccacaagaagcgctggagtgtgctggcggctgcaggcctacggggcctggtccggctgctgcacgtgcgtgccggcttctgctgcggggtcatccgagcccacaagaaggccatcgccaccctgtgcttcagccccgcccacgagacccatctcttcacggcctcctatgacaagcggatcatcctctgggacatcggggtgcccaaccaggactacgaattccaggccagccagctgctcacactggacaccacctctatccccctgcgcctctgccctgtcgcctcctgcccggacgcccgcctgctggccggctgcgagggcggctgctgctgctgggacgtgcggctggaccagccccaaaagaggagggtgtgtgaagtggaattcgtcttctctgagggctccgaggcatctggacggagagtggatgggctggcatttgtgaatgaggacatcgtggcctccaaggggagcggcctgggcaccatctgcctgtggagctggaggcagacgtgggggggccggggcagccagtccacggtggcagtggtggtcctggcgcggctgcaatggtcgtccaccgagttggcctacttctcgctcagcgcctgccctgataaggggattgtgctctgtggggatgaggagggcaacgtgtggctctacgacgtcagcaacatcctgaagcagccacccctgctgccggcagccctgcaggcccccacacagatcctgaagtggccccagccctgggcccttggccaggtggtgaccaagaccatggtgaacacagtggtggccaatgcctccttcacctacctcaccgccctgacggactccaacatcgtagccatctgggggaggatgtagcctcacaccatcgcaaaggaccagggacacagctaactaacttattcagctttgggccgatgggggtgggggggggtctttcagtgaatatttttattaaactctactgtggacaaaaaaaaaaaaaaaaaaaaaaaa

SEQ ID NO: 859 - DNA, 4093 bp, HOMO SAPIENS
gtgagagagtgagcgagacagaaagagagagaagtgcaccagcgagccggggcaggaagaggaggtttcgccaccggagcggcccggcgacgcgctgacagcttcccctgcccttcccgtcggtcgggccgccagccgccgcagccctcggcctgcacgcagccaccggccccgctcccggagcccagcgccgccgaggccgcagccgcccggccagtaaggcggcgccgccgcccggccaccgcgcgccctgcgcttccctccgcccgcgctgcggccatggcgcggcgctgactggcctggcccggccccgccgcgctcccgctcgccccgacccgcactcgggcccgcccgggctccggcctgccgccgcctcttccttctccagccggcaggcccgcgccgcttaggagggagagcccacccgcgccaggaggccgaacgcggactcgccacccggcttcagaatggcagaagatgatccatatttgggaaggcctgaacaaatgtttcatttggatccttctttgactcatacaatatttaatccagaagtatttcaaccacagatggcactgccaacagcagatggcccataccttcaaatattagagcaacctaaacagagaggatttcgtttccgttatgtatgtgaaggcccatcccatggtggactacctggtgcctctagtgaaaagaacaagaagtcttaccctcaggtcaaaatctgcaactatgtgggaccagcaaaggttattgttcagttggtcacaaatggaaaaaatatccacctgcatgcccacagcctggtgggaaaacactgtgaggatgggatctgcactgtaactgctggacccaaggacatggtggtcggcttcgcaaacctgggtatacttcatgtgacaaagaaaaaagtatttgaaacactggaagcacgaatgacagaggcgtgtataaggggctataatcctggactcttggtgcaccctgaccttgcctatttgcaagcagaaggtggaggggaccggcagctgggagatcgggaaaaagagctaatccgccaagcagctctgcagcagaccaaggagatggacctcagcgtggtgcggctcatgtttacagcttttcttccggatagcactggcagcttcacaaggcgcctggaacccgtggtatcagacgccatctatgacagtaaagcccccaatgcatccaacttgaaaattgtaagaatggacaggacagctggatgtgtgactggaggggaggaaatttatcttctttgtgacaaagttcagaaagatgacatccagattcgattttatgaagaggaagaaaatggtggagtctgggaaggatttggagatttttcccccacagatgttcatagacaatttgccattgtcttcaaaactccaaagtataaagatattaatattacaaaaccagcctctgtgtttgtccagcttcggaggaaatctgacttggaaactagtgaaccaaaacctttcctctactatcctgaaatcaaagataaagaagaagtgcagaggaaacgtcagaagctcatgcccaatttttcggatagtttcggcggtggtagtggtgctggagctggaggcggaggcatgtttggtagtggcggtggaggagggggcactggaagtacaggtccagggtatagcttcccacactatggatttcctacttatggtgggattactttccatcctggaactactaaatctaatgctgggatgaagcatggaaccatggacactgaatctaaaaaggaccctgaaggttgtgacaaaagtgatgacaaaaacactgtaaacctctttgggaaagttattgaaaccacagagcaagatcaggagcccagcgaggccaccgttgggaatggtgaggtcactctaacgtatgcaacaggaacaaaagaagagagtgctggagttcaggataacctctttctagagaaggctatgcagcttgcaaagaggcatgccaatgcccttttcgactacgcggtgacaggagacgtgaagatgctgctggccgtccagcgccatctcactgctgtgcaggatgagaatggggacagtgtcttacacttagcaatcatccaccttcattctcaacttgtgagggatctactagaagtcacatctggtttgatttctgatgacattatcaacatgagaaatgatctgtaccagacgcccttgcacttggcagtgatcactaagcaggaagatgtggtggaggatttgctgagggctggggccgacctgagccttctggaccgcttgggtaactctgttttgcacctagctgccaaagaaggacatgataaagttctcagtatcttactcaagcacaaaaaggcagcactacttcttgaccaccccaacggggacggtctgaatgccattcatctagccatgatgagcaatagcctgccatgtttgctgctgctggtggccgctggggctgacgtcaatgctcaggagcagaagtccgggcgcacagcactgcacctggctgtggagcacgacaacatctcattggcaggctgcctgctcctggagggtgatgcccatgtggacagtactacctacgatggaaccacacccctgcatatagcagctgggagagggtccaccaggctggcagctcttctcaaagcagcaggagcagatcccctggtggagaactttgagcctctctatgacctggatgactcttgggaaaatgcaggagaggatgaaggagttgtgcctggaaccacgcctctagatatggccaccagctggcaggtatttgacatattaaatgggaaaccatatgagccagagtttacatctgatgatttactagcacaaggagacatgaaacagctggctgaagatgtgaagctgcagctgtataagttactagaaattcctgatccagacaaaaactgggctactctggcgcagaaattaggtctggggatacttaataatgccttccggctgagtcctgctccttccaaaacacttatggacaactatgaggtctctgggggtacagtcagagagctggtggaggccctgagacaaatgggctacaccgaagcaattgaagtgatccaggcagcctccagcccagtgaagaccacctctcaggcccactcgctgcctctctcgcctgcctccacaaggcagcaaatagacgagctccgagacagtgacagtgtctgcgacagcggcgtggagacatccttccgcaaactcagctttaccgagtctctgaccagtggtgcctcactgctaactctcaacaaaatgccccatgattatgggcaggaaggacctctagaaggcaaaatttagcctgctgacaatttcccacaccgtgtaaaccaaagccctaaaattccactgcgttgtccacaagacagaagctgaagtgcatccaaaggtgctcagagagccggcccgcctgaatcattctcgatttaactcgagaccttttcaacttggcttcctttcttggttcataaatgaattttagtttggttcacttacagatagtatctagcaatcacaacactggctgagcggatgcatctggggatgaggttgcttactaagctttgccagctgctgctggatcacagctgctttctgttgtcattgctgttgtccctctgctacgttcctattgtcattaaaggtatcacggtcgccacctggcattccttctgaccacagcatcattttgcattcaaattaagggttaagaaaagagatattttaaaatgagagtcacttgatgtgccattttaaaaaaaaaggcatattgctttttctaatgtggttatttctctgatttgcaaaaaaaaaaaaaaaaaaaatacttgtcaatatttaaacatggttacaatcattgctgaaaatggtattttcccccttttctgcattttgctattgtaaatatgttttttagatcaaatactttaaaggaaaaaatgttggatttataaatgctattttttattttacttttataataaaaggaaaagcaaattgatgacctcaaaaaaaaa

SEQ ID NO: 860 - DNA, 8761 bp, HOMO SAPIENS
gccgaggaggaagaggttgatggcggcggcggagctccgagagacctcggctgggcaggggccggccgtggcgggccggggactgcgcctctagagccgcgagttctcgggaattcgccgcagcggacgcgctcggcgaatttgtgctcttgtgccctcctccgggcttgggcccaggcccggcccctcgcacttgcccttaccttttctatcgagtccgcatccctctccagccactgcgacccggcgaagagaaaaaggaacttcccccaccccctcgggtgccgtcggagccccccagcccacccctgggtgcggcgcggggaccccgggccgaagaagagatttcctgaggattctggttttcctcgcttgtatctccgaaagaattaaaaatggccgagaatgtggtggaaccggggccgccttcagccaagcggcctaaactctcatctccggccctctcggcgtccgccagcgatggcacagattttggctctctatttgacttggagcacgacttaccagatgaattaatcaactctacagaattgggactaaccaatggtggtgatattaatcagcttcagacaagtcttggcatggtacaagatgcagcttctaaacataaacagctgtcagaattgctgcgatctggtagttcccctaacctcaatatgggagttggtggcccaggtcaagtcatggccagccaggcccaacagagcagtcctggattaggtttgataaatagcatggtcaaaagcccaatgacacaggcaggcttgacttctcccaacatggggatgggcactagtggaccaaatcagggtcctacgcagtcaacaggtatgatgaacagtccagtaaatcagcctgccatgggaatgaacacagggatgaatgcgggcatgaatcctggaatgttggctgcaggcaatggacaagggataatgcctaatcaagtcatgaacggttcaattggagcaggccgagggcgacagaatatgcagtacccaaacccaggcatgggaagtgctggcaacttactgactgagcctcttcagcagggctctccccagatgggaggacaaacaggattgagaggcccccagcctcttaagatgggaatgatgaacaaccccaatccttatggttcaccatatactcagaatcctggacagcagattggagccagtggccttggtctccagattcagacaaaaactgtactatcaaataacttatctccatttgctatggacaaaaaggcagttcctggtggaggaatgcccaacatgggtcaacagccagccccgcaggtccagcagccaggcctggtgactccagttgcccaagggatgggttctggagcacatacagctgatccagagaagcgcaagctcatccagcagcagcttgttctccttttgcatgctcacaagtgccagcgccgggaacaggccaatggggaagtgaggcagtgcaaccttccccactgtcgcacaatgaagaatgtcctaaaccacatgacacactgccagtcaggcaagtcttgccaagtggcacactgtgcatcttctcgacaaatcatttcacactggaagaattgtacaagacatgattgtcctgtgtgtctccccctcaaaaatgctggtgataagagaaatcaacagccaattttgactggagcacccgttggacttggaaatcctagctctctaggggtgggtcaacagtctgcccccaacctaagcactgttagtcagattgatcccagctccatagaaagagcctatgcagctcttggactaccctatcaagtaaatcagatgccgacacaaccccaggtgcaagcaaagaaccagcagaatcagcagcctgggcagtctccccaaggcatgcggcccatgagcaacatgagtgctagtcctatgggagtaaatggaggtgtaggagttcaaacgccgagtcttctttctgactcaatgttgcattcagccataaattctcaaaacccaatgatgagtgaaaatgccagtgtgccctccctgggtcctatgccaacagcagctcaaccatccactactggaattcggaaacagtggcacgaagatattactcaggatcttcgaaatcatcttgttcacaaactcgtccaagccatatttcctacgccggatcctgctgctttaaaagacagacggatggaaaacctagttgcatatgctcggaaagttgaaggggacatgtatgaatctgcaaacaatcgagcggaatactaccaccttctagctgagaaaatctataagatccagaaagaactagaagaaaaacgaaggaccagactacagaagcagaacatgctaccaaatgctgcaggcatggttccagtttccatgaatccagggcctaacatgggacagccgcaaccaggaatgacttctaatggccctctacctgacccaagtatgatccgtggcagtgtgccaaaccagatgatgcctcgaataactccacaatctggtttgaatcaatttggccagatgagcatggcccagccccctattgtaccccggcaaacccctcctcttcagcaccatggacagttggctcaacctggagctctcaacccgcctatgggctatgggcctcgtatgcaacagccttccaaccagggccagttccttcctcagactcagttcccatcacagggaatgaatgtaacaaatatccctttggctccgtccagcggtcaagctccagtgtctcaagcacaaatgtctagttcttcctgcccggtgaactctcctataatgcctccagggtctcaggggagccacattcactgtccccagcttcctcaaccagctcttcatcagaattcaccctcgcctgtacctagtcgtacccccacccctcaccatactcccccaagcataggggctcagcagccaccagcaacaacaattccagcccctgttcctacacctcctgccatgccacctgggccacagtcccaggctctacatccccctccaaggcagacacctacaccaccaacaacacaacttccccaacaagtgcagccttcacttcctgctgcaccttctgctgaccagccccagcagcagcctcgctcacagcagagcacagcagcgtctgttcctaccccaacagcaccgctgcttcctccgcagcctgcaactccactttcccagccagctgtaagcattgaaggacaggtatcaaatcctccatctactagtagcacagaagtgaattctcaggccattgctgagaagcagccttcccaggaagtgaagatggaggccaaaatggaagtggatcaaccagaaccagcagatactcagccggaggatatttcagagtctaaagtggaagactgtaaaatggaatctaccgaaacagaagagagaagcactgagttaaaaactgaaataaaagaggaggaagaccagccaagtacttcagctacccagtcatctccggctccaggacagtcaaagaaaaagattttcaaaccagaagaactacgacaggcactgatgccaactttggaggcactttaccgtcaggatccagaatcccttccctttcgtcaacctgtggaccctcagcttttaggaatccctgattactttgatattgtgaagagccccatggatctttctaccattaagaggaagttagacactggacagtatcaggagccctggcagtatgtcgatgatatttggcttatgttcaataatgcctggttatataaccggaaaacatcacgggtatacaaatactgctccaagctctctgaggtctttgaacaagaaattgacccagtgatgcaaagccttggatactgttgtggcagaaagttggagttctctccacagacactgtgttgctacggcaaacagttgtgcacaatacctcgtgatgccacttattacagttaccagaacaggtatcatttctgtgagaagtgtttcaatgagatccaaggggagagcgtttctttgggggatgacccttcccagcctcaaactacaataaataaagaacaattttccaagagaaaaaatgacacactggatcctgaactgtttgttgaatgtacagagtgcggaagaaagatgcatcagatctgtgtccttcaccatgagatcatctggcctgctggattcgtctgtgatggctgtttaaagaaaagtgcacgaactaggaaagaaaataagttttctgctaaaaggttgccatctaccagacttggcacctttctagagaatcgtgtgaatgactttctgaggcgacagaatcaccctgagtcaggagaggtcactgttagagtagttcatgcttctgacaaaaccgtggaagtaaaaccaggcatgaaagcaaggtttgtggacagtggagagatggcagaatcctttccataccgaaccaaagccctctttgcctttgaagaaattgatggtgttgacctgtgcttctttggcatgcatgttcaagagtatggctctgactgccctccacccaaccagaggagagtatacatatcttacctcgatagtgttcatttcttccgtcctaaatgcttgaggactgcagtctatcatgaaatcctaattggatatttagaatatgtcaagaaattaggttacacaacagggcatatttgggcatgtccaccaagtgagggagatgattatatcttccattgccatcctcctgaccagaagatacccaagcccaagcgactgcaggaatggtacaaaaaaatgcttgacaaggctgtatcagagcgtattgtccatgactacaaggatatttttaaacaagctactgaagatagattaacaagtgcaaaggaattgccttatttcgagggtgatttctggcccaatgttctggaagaaagcattaaggaactggaacaggaggaagaagagagaaaacgagaggaaaacaccagcaatgaaagcacagatgtgaccaagggagacagcaaaaatgctaaaaagaagaataataagaaaaccagcaaaaataagagcagcctgagtaggggcaacaagaagaaacccgggatgcccaatgtatctaacgacctctcacagaaactatatgccaccatggagaagcataaagaggtcttctttgtgatccgcctcattgctggccctgctgccaactccctgcctcccattgttgatcctgatcctctcatcccctgcgatctgatggatggtcgggatgcgtttctcacgctggcaagggacaagcacctggagttctcttcactccgaagagcccagtggtccaccatgtgcatgctggtggagctgcacacgcagagccaggaccgctttgtctacacctgcaatgaatgcaagcaccatgtggagacacgctggcactgtactgtctgtgaggattatgacttgtgtatcacctgctataacactaaaaaccatgaccacaaaatggagaaactaggccttggcttagatgatgagagcaacaaccagcaggctgcagccacccagagcccaggcgattctcgccgcctgagtatccagcgctgcatccagtctctggtccatgcttgccagtgtcggaatgccaattgctcactgccatcctgccagaagatgaagcgggttgtgcagcataccaagggttgcaaacggaaaaccaatggcgggtgccccatctgcaagcagctcattgccctctgctgctaccatgccaagcactgccaggagaacaaatgcccggtgccgttctgcctaaacatcaagcagaagctccggcagcaacagctgcagcaccgactacagcaggcccaaatgcttcgcaggaggatggccagcatgcagcggactggtgtggttgggcagcaacagggcctcccttcccccactcctgccactccaacgacaccaactggccaacagccaaccaccccgcagacgccccagcccacttctcagcctcagcctacccctcccaatagcatgccaccctacttgcccaggactcaagctgctggccctgtgtcccagggtaaggcagcaggccaggtgacccctccaacccctcctcagactgctcagccaccccttccagggcccccacctgcagcagtggaaatggcaatgcagattcagagagcagcggagacgcagcgccagatggcccacgtgcaaatttttcaaaggccaatccaacaccagatgcccccgatgactcccatggcccccatgggtatgaacccacctcccatgaccagaggtcccagtgggcatttggagccagggatgggaccgacagggatgcagcaacagccaccctggagccaaggaggattgcctcagccccagcaactacagtctgggatgccaaggccagccatgatgtcagtggcccagcatggtcaacctttgaacatggctccacaaccaggattgggccaggtaggtatcagcccactcaaaccaggcactgtgtctcaacaagccttacaaaaccttttgcggactctcaggtctcccagctctcccctgcagcagcaacaggtgcttagtatccttcacgccaacccccagctgttggctgcattcatcaagcagcgggctgccaagtatgccaactctaatccacaacccatccctgggcagcctggcatgccccaggggcagccagggctacagccacctaccatgccaggtcagcagggggtccactccaatccagccatgcagaacatgaatccaatgcaggcgggcgttcagagggctggcctgccccagcagcaaccacagcagcaactccagccacccatgggagggatgagcccccaggctcagcagatgaacatgaaccacaacaccatgccttcacaattccgagacatcttgagacgacagcaaatgatgcaacagcagcagcaacagggagcagggccaggaataggccctggaatggccaaccataaccagttccagcaaccccaaggagttggctacccaccacagcagcagcagcggatgcagcatcacatgcaacagatgcaacaaggaaatatgggacagataggccagcttccccaggccttgggagcagaggcaggtgccagtctacaggcctatcagcagcgactccttcagcaacagatggggtcccctgttcagcccaaccccatgagcccccagcagcatatgctcccaaatcaggcccagtccccacacctacaaggccagcagatccctaattctctctccaatcaagtgcgctctccccagcctgtcccttctccacggccacagtcccagcccccccactccagtccttccccaaggatgcagcctcagccttctccacaccacgtttccccacagacaagttccccacatcctggactggtagctgcccaggccaaccccatggaacaagggcattttgccagcccggaccagaattcaatgctttctcagcttgctagcaatccaggcatggcaaacctccatggtgcaagcgccacggacctgggactcagcaccgataactcagacttgaattcaaacctctcacagagtacactagacatacactagagacaccttgtagtattttgggagcaaaaaaattattttctcttaacaagactttttgtactgaaaacaatttttttgaatctttcgtagcctaaaagacaattttccttggaacacataagaactgtgcagtagccgtttgtggtttaaagcaaacatgcaagatgaacctgagggatgatagaatacaaagaatatatttttgttatggctggttaccaccagcctttcttcccctttgtgtgtgtggttcaagtgtgcactgggaggaggctgaggcctgtgaagccaaacaatatgctcctgccttgcacctccaataggttttattattttttttaaattaatgaacatatgtaatattaatagttattatttactggtgcagatggttgacatttttccctattttcctcactttatggaagagttaaaacatttctaaaccagaggacaaaaggggttaatgttactttaaaattacattctatatatatataaatatatataaatatatattaaaataccagttttttttctctgggtgcaaagatgttcattcttttaaaaaatgtttaaaaaaaaaaaaaaactgcctttcttcccctcaagtcaacttttgtgctccagaaaattttctattctgtaagtctgagcgtaaaacttcaagtattaaaataatttgtacatgtagagagaaaaatgactttttcaaaaatatacaggggcagctgccaaattgatgtattatatattgtggtttctgtttcttgaaagaatttttttcgttatttttacatctaacaaagtaaaaaaattaaaaagagggtaagaaacgattccggtgggatgattttaacatgcaaaatgtccctgggggtttcttctttgcttgctttcttcctccttaccctaccccccactcacacacacacacacacacacacacacacacacacacacacactttctataaaacttgaaaatagcaaaaaccctcaactgttgtaaatcatgcaattaaagttgattacttataaatatgaactttggatcactgtatagactgttaaatttgatttcttattacctattgttaaataaactgtgtgagacagaca

SEQ ID NO: 861 - DNA, 9675 bp, HOMO SAPIENS
actcggctcaaacatggctgcgctgagagctctattgctttgggcgccgggagcaggaggtactccgcgaatgagaacattgagaatgtgttcggcataactcatttctttgtatctccctgcactctgtgctgggaaaatgaatcatccatttggaaaagaggaagctgcttcgcagaagcagctttttggatttttctgcgaatgcctgcggaggggagaatgggagctggcacaggcatgtgtacctcagctacaggagggacaaggggatatcccaaagagggtagaagacatacttcaggcattggtggtgtgtccaaatctgctgagatgtgggcaggacatcaaccctcaaagagtagcctgggtctggcttcttgtactggagaaatggttggcccgggaaaagaagttactcccagttgttttccggagaaagcttgagtttcttttattgtcagaagacctccaaggtgacattccagagaacatcctcgaggagctgtatgagaccttaacacagggtgcagtaggccacgtgcctgacggaaatccaaggagggagagctggactcctcgtctcagctccgaagctgtctctgtgctctgggatctcctgaggcagtctccccagccagcacaggccctgctggagctcctgcttgaggaggatgacggtactggcctctgtcactggcctctgcagaatgcactggtggacctcattcgaaaggcattgcgggctttgcagggccctgattcggtgccccctggggtagtcgatgccatctatggagccctgcggactctgcgttgccccgcagaaccacttggggttgagttgcatctcctgtgtgaggaactactagaggcctgcaggaccgaggggagtcccctgcgggaggagcggctgctcagctgcctgctgcacaaggccagccggggcctgctgtccctgtatggccatacctatgcagagaaggtcacagaaaagccaccgagggctacagcctcgggaaaagtctcaccggatcatctagatcctgagcgggcaatgctagccctgttctccaatcccaacccagccgaggcttggaaagtggcctatttctactgcctgagcaacaacaaacacttcctcgagcagattctggtaacagcactaacattgttgaaagaagaagacttcccaaatcttggctgcctacttgatagagaattcaggcccctcagttgcctgcttgtactcctgggctggacacactgccagagcctagagtcagccaagaggctgctccagaccctgcacaggacccagggcccaggctgtgatgagctcctcagggatgcctgtgatgggttgtgggctcacctggaggtcctggagtggtgcatacagcagagcagcaaccccataccaaagagagatctgttgtatcatttacacggtggagacagccactcagtgctctacactctccatcaccttacaaaccttccagccctcagggaggaagatgttctcaagctcttacagaaagtgccagccaaggacccccagcaagagcctgatgcagttgatgctccagtccctgagcacctgagccagtgtcagaacctgacactctaccagggcttctgtgccatgaagtatgccatctatgccctctgtgtaaactcacaccagcactcccagtgccaggactgcaaagacagcctctctgaggacctggcctcagctacagagccagcgaatgactctctctcctccccaggtgctgcaaatctcttctcaacttacctggccaggtgtcaacagtatctgtgcagtattcctgactctctgtgcctggagcttctggaaaacatcttctcattgcttctcatcacctctgctgatcttcacccagagcctcacttgcctgaggactatgctgaggatgatgacattgaggggaagagcccctcaggtttgaggtccccatcagagagccctcagcacatagcacatcctgaaaggaagtcagaacggggttccctgggagtcccaaagacccttgcttatacaatgccaagccatgtgaaggcagagccaaaagacagttacccagggcctcataggcacagctttttggacttaaaacactttactagtggtatcagtggatttctggctgatgaatttgcaataggggccttcctcaggcttctccaagagcaactggatgagatcagtagccgcagcccccctgagaagccaaagcaagaaagtcagagctgctcaggaagcagagatggactgcagagccgcctgcatcgactttccaaggttgtctctgaggcccagtggagacacaaggtggtgacaagcaaccatcgttcagaggagcaaccttcccgaagataccagcctgccacacgtcaccccagtctccgccggggtcgtcggacaagaaggagccaggcagatggccgagacagaggttcaaacccatccctggaaagtacaagtagtgagctgagcacaagtacgtcagagggaagtctgagtgccatgtctggccggaatgagctgcacagtagattgcacccccatcctcaaagttcactcatccccatgatgttctccccacctgagtcactgctggcatcctgcatccttcgcgggaacttcgcagaagcccatcaggtgctgttcacgttcaacctgaagtcctcacccagttcaggggaactgatgttcatggagcgctaccaggaagtgatccaagaactggcccaagtagagcacaagattgaaaaccagaactcagatgcgggtagcagcaccattcggagaactggcagtggccgctcaactctacaggccattggcagcgctgcagcagcaggaatggtgttttactctatctctgacgtgactgacaagctgctcaacacctctggagaccccatccccatgctccaggaggacttttggataagcacggctctagtggagcccactgctcccctgagagaggttctggaagacctcagtccccctgccatggctgcatttgacctagcttgctctcagtgccagctctggaaaacctgcaagcagcttttggagacagccgaacggcgtttgaatagtagccttgaaaggcggggtcgacggatagaccacgtactcctaaatgctgatggcattcgaggttttccagttgttcttcagcaaatcagtaagagtctcaattatctgcttatgtcagccagtcaaaccaaatcagagagtgtggaagaaaagggaggaggccctccacggtgcagcatcactgaactgcttcagatgtgctggcccagcctaagcgaggactgtgttgccagccacaccaccctctcccagcagctagatcaggtccttcagtcactgagagaggcactagagctgccagagcccaggactcctccactgtcttccctggtggagcaggcagcccagaaagctccagaggcagaggcccaccctgtgcagatccagactcagctcctccagaagaacctgggcaaacagaccccatcaggcagcaggcagatggactacttgggcaccttcttcagttactgcagcacccttgctgcagttctccttcaaagtttgagctctgagcctgatcatgtggaggtcaaggtaggaaatccctttgttctgctgcaacagagctcttcccaactggtgtcacatctcctgtttgagagacaagttcccccagagagactggcagcccttctggcccaagagaatctcagcctaagtgtgccacaggtcatcgtcagctgctgctgtgagccccttgctctttgctcatcccggcaaagccagcagacctcctccctcctgactcgtctgggtactctggcccagctacacgcctctcactgcctggatgacctcccactttctacaccgagctccccgaggacaactgagaaccctacattggaaagaaagccctactcctccccaagggactcatcactcccagccctcacctcctctgccttggcctttcttaagtcacgctcaaagctcctagctacggtggcctgcctgggggcttccccgaggttaaaggtcagcaaacccagcttgtcatggaaggaacttcgtggccgcagggaggtgcctctggctgcagagcaggtagcccgggagtgtgagcgccttctggaacaattccctctgtttgaggccttcctcctggctgcctgggagcccctgcgagggtctttgcagcaggggcagagtctggcagtgaatctctgtggttgggccagtctttctaccgttctcctgggcctacattctcccattgccctagatgtactgagtgaggcttttgaggaatccttggtggccagagattggtcccgggcccttcagctcactgaagtgtacgggcgagatgtggacgatttgagcagcataaaggatgcagtcctgagctgtgctgtggcatgtgacaaagaaggttggcaatacctgtttcccgtgaaggatgcatctctgagaagtcggctggccctacagtttgtggacaggtggcccctggagtcatgcctggagattctggcctactgcatttcagacacggctgtccaagaaggactaaagtgtgagctacagaggaagctggcggagctgcaggtgtatcagaagattctgggtttgcagtctcccccagtgtggtgtgactggcagaccttgaggagctgttgtgttgaggacccatcaactgtcatgaacatgattctagaagcacaggagtatgaactgtgtgaagagtggggctgcctgtaccccattccaagagaacatttaatcagccttcatcaaaagcatcttctccaccttctagaaagaagagatcatgacaaggctctgcaactcctgcgaagaatccctgaccccaccatgtgccttgaagtgacagagcaatccctcgaccagcacactagcttggccacttctcacttcttggccaactacctcaccacccacttctatggacaactgactgctgtccgacaccgtgaaatccaggcgctgtatgtgggatccaagattctgctgaccctgcctgagcagcaccgggccagctattcccacttgtcctctaaccccctgttcatgctggagcagctgcttatgaacatgaaggtggattgggccactgtggctgtgcagactctccagcagctgctggttggacaggagattggcttcactatggacgaggtggactcactgctttccagatacgcagagaaagccctggactttccataccctcagagggagaaacgatcagattctgtgattcacctccaagaaattgtccaccaggctgcagatcccgagaccctccctagatcaccatcagcagagttctctcctgctgctcctcctggtatctccagtatacattcccctagtctaagggaaaggagtttcccaccaacccagccctcacaggaatttgtgcccccagcgacaccccctgccaggcaccagtgggtaccggatgagactgagagtatctgcatggtctgctgcagggagcacttcaccatgtttaacaggcgtcatcattgtcgccgctgtggccggctagtgtgcagctcctgctccactaagaaaatggtggttgaaggctgcagagagaaccctgctcgtgtgtgtgatcagtgctatagttactgcaacaaagatgtaccagaggagccttcagaaaaaccagaagctctagacagctccaagaatgaaagccctccatactcgtttgtggtgagagtccccaaagcagatgaggtggaatggattttggatctcaaagaggaggaaaatgagctggtgcggagtgaattttactatgagcaggcccccagcgcctccttgtgcattgccatcctgaatctgcaccgggacagcattgcctgtggtcaccagctgattgagcactgctgcaggctctccaagggcctcaccaacccagaggtggatgccgggctgctcacggacatcatgaagcagctgctgttcagcgccaagatgatgttcgtcaaagccggccagagccaagacttggctctttgtgacagctacatcagcaaggtagatgtgctgaatattttagttgctgctgcctatcgccacgtgccatctttggatcagatcttgcagccagctgcagtaaccaggctaaggaaccagcttttggaagccgagtactaccaactgggcgttgaggtctccacaaagactgggcttgataccaccggggcgtggcatgcttggggcatggcctgcctcaaagccgggaacctcactgctgcacgggagaagttcagtcgctgtctgaagcccccatttgacctcaatcagctgaatcatggctcaaggctggtgcaggatgtggttgagtacctagagtccacagtgaggccctttgtatccttgcaagatgacgattactttgccaccctgagggaactggaagctacccttcggacgcagagcctttctctggcagtgattcctgaagggaaaatcatgaacaacacctactaccaggaatgcctcttctacctgcacaactatagcaccaacctggccatcatcagcttctacgtgaggcacagctgcctgcgggaagctcttctgcaccttctcaacaaggagagtcctccagaagtttttatagaaggcattttccaaccaagctataaaagtgggaagctacacactttggagaacttgctagaatccattgatccaaccttggagagctggggaaagtacttgattgctgcctgccaacatttacagaagaagaactactaccacattctgtatgagctgcagcagtttatgaaggaccaagttcgggccgccatgacctgtattcggttcttcagtcacaaagcaaagtcatatacagaactgggagagaagctctcatggctacttaaggccaaggaccacctgaagatctacctccaagaaacatcccgcagctctggaaggaagaaaaccacattcttcagaaagaagatgactgcagctgatgtgtcaaggcacatgaacacacttcagctgcagatggaagtgaccaggttcttgcatcggtgcgaaagtgctgggacctctcaaatcaccactttgcctctgccaaccctgtttggaaataaccacatgaaaatggatgttgcctgcaaggtcatgctgggagggaaaaatgtagaagatggttttggaattgctttccgtgttctgcaggacttccagctggatgctgccatgacctactgcagagctgcccgccagttggtggagaaagagaagtacagtgagatccagcaactgctcaaatgtgtcagtgagtcaggcatggcagccaaaagtgacggggacaccatcctcctcaactgcctggaagcgttcaagagaattccgccccaggagctggagggcctgatccaggcaatacacaatgatgacaacaaggttcgggcctacctgatatgttgcaaactgcgttctgcctacttgattgctgtgaagcaagaacactcacgggccacagcccttgtccagcaggtgcagcaggccgccaagagcagcggggatgcagtagtgcaagacatctgtgcccagtggcttctgacaagccacccccggggtgcccatggcccaggctccaggaagtgaccttgggcagtggggccaggaacacgtggcctgagagctgggcaacagcagtgatggcgatgccctccacctctttcctccagtggagtgggacttctctggctctgccctaggttggaaagagttggattggaccctacttgccttcccgggcaaggataggacctttcacgcaagtgccatgtttctctaaaattgtggaatctatgtgtgtttgtctggagatggccagttctttctacctcagagtgagtgagtgagtatgtgtgcacacacgtgtgcatgttcctgtgcgctgatgtttacgcccaagcatttctgaacaaatgaaactcttctccatttaaaagaggcactttactttagacttgccactctgaaaaccttccctgcgttttggttcttgacccgggttgtcctgtttgtatagtcccccctctgtggacgtgctttagtagctcctcttacctagagggcttttacagagaattagagcaacaccaaaaggattgcctcttttccttccttcccattccaaaattcagagatggctttggggcaagtgctacctgtggaataaacctgttttccaggtgtctcttctcccaagcacaagaagtcctggagtctttggaaggtagtctgaatagaagggttttcaggtgcaggcatctgaaagctgtgggtatgtgtataaatgatcaggtctgtgaggctaacacgggcaagagggaaagaaaggctaaccatccaaacagggatacaggggaggcggtggggggtggtggggggagcgggtgctcacaagcacagagctgcctgttgtgaatgtccctgctgcaaagttggtgggtgagagaatgggacttcctctttgagagtctggggagagaaaaggtggccaggatcctaggactgaatgactcgattttacctatttgagctgcagtcctgtttgcgctccttgaattggttaggaagctgcttccttttccctcctgcttcccttcagtctcttcaggaccacaggatggatatgcagacatgtggggtcattgggaagggagtgcgcttcttttctctgtcttagaaaagggagtcaagggttggctttggaattgggcctctggacagagtcagaatgagggaataatgaataggtcacatctggttggtggaaaactaggtgaagtgcttctttaatatgcactgtcttgtcttcccacgcaagatgtgacaatgtttgagaaaaggtgtgtcatactcagtgacttcaatttgcaaatgtggggcctaaagaaagctctgcagctctgaacctctcactggccagagctcagcctattggtcccatccatgatgctgagacaaacagaaactggaagctgaagtcagtgtctctggtgctcagaaaccctgtggatttccctctgaaccaagatttttagtagtaaaataaacaactcatggacatctgtcagatgagaagttttggtcctgttagagaggagaaagactgtaatgaaactactagacccatttgggctaaagtttggcttttccttccttgagtcatagaacgtatccatctcccaggaaatgtccttctctggcgtctgcttgcccttctgagtctgccttttttgcactgaacataagcactttatactaatgggtcacaaatcttgcagcccttaatttgggataagaccagattttcctgacattttcctctaactcattgaactatcaaattataggcaaccactgactagactgatatgagatgaggctaaaagcctttgaacaccacgctgtagtctccaacagaaaaacaccaccaaaacagatacccatgttgaggggttgaatgttttactacaaacaagccacaataaagtgtctatcaacatgtt

SEQ ID NO: 862 - DNA, 2005 bp, HOMO SAPIENS
tttcctctcagggggcagcaggaagtgaggagaaagggctgggatgggaggcgggagcggatgggagggaatggggtttatcaagtcctcggcgagctgcccaacgggcagcagctggcgcaagtagcctagctggagaggctcaccccaggaaggagggaggccaccgacctactgggccgacggactcccacacagttcctgagctggtgccaggcaggtgacacctcctgcagcccccagcatgcgggcaggcccaggccccaccgttacattggccctggtgctggcggtgtcatgggccatggagctcaagcccacagcaccacccatcttcactggccggccctttgtggtagcgtgggacgtgcccacacaggactgtggcccacgcctcaaggtgccactggacctgaatgcctttgatgtgcaggcctcacctaatgagggttttgtgaaccagaatattaccatcttctaccgcgaccgtctaggcctgtatccacgcttcgattctgccggaaggtctgtgcatggtggtgtgccacagaatgtcagcctttgggcacaccggaagatgctgcagaaacgtgtggagcactacattcggacacaggagtctgcggggctggcggtcatcgactgggaggactggcgacctgtgtgggtgcgcaactggcaggacaaagatgtgtatcgccggttatcacgccagctagtggccagtcgtcaccctgactggcctccagaccgcatagtcaaacaggcacaatatgagtttgagttcgcagcacagcagttcatgctggagacactgcgttatgtcaaggcagtgcggccccggcacctctggggcttctacctctttcctgactgctacaatcatgattatgtgcagaactgggagagctacacaggccgctgccctgatgttgaggtggcccgcaatgaccagctggcctggctgtgggctgagagcacggccctcttcccgtctgtctacctggacgagacacttgcttcctcccgccatggccgcaactttgtgagcttccgtgttcaggaggcccttcgtgtggctcgcacccaccatgccaaccatgcactcccagtctacgtcttcacacgacccacctacagccgcaggctcacggggcttagtgagatggacctcatctctaccattggcgagagtgcggccctgggcgcagctggtgtcatcctctggggtgacgcggggtacaccacaagcacggagacctgccagtacctcaaagattacctgacacggctgctggtcccctacgtggtcaatgtgtcctgggccacccaatattgcagccgggcccagtgccatggccatgggcgctgtgtgcgccgcaaccccagtgccagtaccttcctgcatctcagcaccaacagtttccgcctagtgcctggccatgcacctggtgaaccccagctgcgacctgtgggggagctcagttgggccgacattgaccacctgcagacacacttccgctgccagtgctacttgggctggagtggtgagcaatgccagtgggaccataggcaggcagctggaggtgccagcgaggcctgggctgggtcccacctcaccagtctgctggctctggcagccctggcctttacctggaccttgtaggggtctcctgcctagctgcctagcaagctggcctctaccacaagggctctcttaggcatgtaggaccctgcagggggtggacaaactggagtctggagtgggcagagcccccaggaagcccaggagggcatccataccagctcgcacccccctgttctaagggggaggggaagtccctgggaggccccttctctccctgccagaggggaaggagggtacagctgggctggggaggacctgaccctactcccttgccctagatagtttattattattattattttggggtctcttttgtaaattaaacataaaacaattgcttctctgcttggattttgt

SEQ ID NO: 863 - DNA, 6206 bp, HOMO SAPIENS
gctcctggtctggtacaatggggaagacaaccctgagatagcagctgcgattgaggaagagcgagccagcgcccggagcaagcggagctcccccaagagccggaaagggaagaaaaaatcccaggaaaataaaaacaaaggaaacaaaatccaagacatacaactgaagacaagtgagccagatttcacctctgcaaatatgagagattctgcagaaggtcctaaagaagacgaagagaagccttcagcctcagcacttgagcagccggccaccctccaggaggtggccagtcaggaggtgcctccagaactagcaacccctgcccctgcctgggagccacagccagaaccagacgagcgattagaagcggcagcttgtgaggtgaatgatttgggggaagaggaggaggaggaagaggaggaggatgaagaagaagaagaagatgatgatgatgatgagttggaagacgagggggaagaagaagccagcatgccaaatgaaaattctgtgaaagagccagaaatacggtgtgatgagaagccagaagatttattagaggaaccaaaaacaacttcagaagaaactcttgaagactgctcagaggtaacacctgccatgcaaatccccagaactaaagaagaggccaatggtgatgtatttgaaacgtttatgtttccgtgtcaacattgtgaaaggaagtttacaaccaaacaggggcttgagcgtcacatgcatatccatatatccaccgtcaatcatgctttcaaatgcaagtactgtgggaaagcctttggcacacagattaaccggcggcgacatgagcggcgccatgaagcagggttaaagcggaaacccagccaaacactacagccgtcagaggatctggctgatggcaaagcatctggagaaaacgttgcttcaaaagatgattcgagtcctcccagtcttgggccagactgtctgatcatgaattcagagaaggcttcccaagacacaataaattcttctgtcgtagaagagaatggggaagttaaagaacttcatccgtgcaaatattgtaaaaaggtttttggaactcatactaatatgagacggcatcagcgtagagttcacgaacgtcatctgattcccaaaggtgtacggcgaaaaggaggccttgaagagccccagcctccagcagaacaggcccaggccacccagaacgtgtatgtaccaagcacagagccggaggaggaaggggaagcagatgatgtgtacatcatggacatttctagcaatatctctgaaaacttaaattactatattgatggtaaaattcaaactaataacaacactagtaactgtgatgtgattgagatggagtctgcttcggcagatttgtatggtataaattgtctgctcactccagttacagtggaaattactcaaaatataaagaccacacaggtccctgtaacagaagatcttcctaaagagcctttgggcagcacaaatagtgaggccaagaagcggagaactgcgagcccacctgcactgcccaaaattaaggccgaaacagactctgaccccatggtcccctcttgctctttaagtcttcctcttagcatatcaacaacagaggcagtgtctttccacaaagagaaaagtgtttatttgtcatcaaagctcaaacaacttcttcaaacccaagataaactaactcctgcagggatttcagcaactgaaatagctaaattaggtcctgtttgtgtgtctgctcctgcatcaatgttgcctgtgacctcaagtaggtttaagaggcggaccagctctcctcccagttctccacagcacagtcctgcccttcgagactttggaaagccaagtgatgggaaagcagcatggaccgatgccgggctgacttccaaaaaatccaaattagaaagtcacagcgactcaccagcatggagtttgtctgggagagatgagagagaaactgtgagccctccatgctttgatgaatataaaatgtctaaagagtggacagctagttctgcttttagcagtgtgtgcaaccagcagccactggatttatccagcggtgtcaaacagaaggctgagggtacaggcaagactccagtccagtgggaatctgtcttagatctcagtgtgcataaaaagcattgtagtgactctgaaggcaaggaattcaaagaaagtcattcagtgcagcctacgtgtagtgctgtaaagaaaaggaaaccaaccacctgcatgctgcagaaggttcttctcaatgaatataatggcatcgatttacctgtagaaaaccctgcagatgggaccaggagcccaagtccttgtaaatccctagaagctcagccagatcctgacctcggtccgggctctggtttccctgcccctactgttgagtccacacctgatgtttgtccttcatcacctgccctgcagacaccctccctttcatccggtcagctgcctcctctcttgatccccacagatccctcttcccctccaccctgtcccccggtattaactgttgccactccgccccctcccctccttcctaccgtacctcttccagccccctcttccagtgcatctccacacccatgcccctctccactctcaaatgccaccgcacagtccccacttccaattctgtccccaacagtgtccccctctccctctcccattcctcccgtggagcccctgatgtctgccgcctcacccgggcctccaacactttcttcttcctcctcttcatcttcctcctcctcttcgttttcttcttcatcttcctcctcttctccttctccacctcctctctccgcaatatcatctgttgtttcctctggtgataatctggaggcttctctccccatgatatctttcaaacaggaggaattagagaatgaaggtctgaaacccagggaagagccccagtctgctgctgaacaggatgttgttgttcaggaaacattcaacaaaaactttgtttgcaacgtctgtgaatcaccttttctttccattaaagatctaaccaaacatttatctattcatgctgaagaatggcccttcaaatgtgaattttgtgtgcagctttttaaggataaaacggacttgtcagaacatcgctttttgcttcatggagttgggaatatctttgtgtgttctgtttgtaaaaaagaatttgcttttttgtgcaatttgcagcagcaccagcgagatctccacccagataaggtgtgcacacatcacgagtttgaaagcgggactctgaggccccagaactttacagatcccagcaaggcccatgtagagcatatgcagagcttgccagaagatcctttagaaacttctaaagaagaagaggagttaaatgattcctctgaagagctttacacgactataaaaataatggcttctggaataaagacaaaagatccagatgttcgattgggcctcaatcagcattacccaagctttaaaccacctccatttcagtaccatcaccgtaaccccatggggattggtgtgacagccacaaatttcactacacacaatattccacagactttcactaccgccattcgctgcacaaagtgtggaaaaggtgtcgacaatatgccggagttgcacaaacatatcctggcttgtgcttctgcaagtgacaagaagaggtacacgcctaagaaaaacccagtaccattaaaacaaactgtgcaacccaaaaatggcgtggtggttttagataactctgggaaaaatgccttccgacgaatgggacagcccaaaaggcttaactttagtgttgagctcagcaaaatgtcgtcgaataagctcaaattaaatgcattgaagaaaaaaaatcagctagtacagaaagcaattcttcagaaaaacaaatctgcaaagcagaaggccgacttgaaaaatgcttgtgagtcatcctctcacatctgcccttactgtaatcgagagttcacttacattggaagcctgaataaacacgccgccttcagctgtcccaaaaaacccctttctcctcccaaaaaaaaagtttctcattcatctaagaaaggtggacactcatcacctgcaagtagtgacaaaaacagtaacagcaaccaccgcagacggacagcggatgcggagattaaaatgcaaagcatgcagactccgttgggcaagaccagagcccgcagctcaggccccacccaagtcccacttccctcctcatccttcaggtccaagcagaacgtcaagtttgcagcttcggtgaaatccaaaaaaccaagctcctcctctttaaggaactccagcccgataagaatggccaaaataactcatgttgaggggaaaaaacctaaagctgtggccaagaatcattctgctcagctttccagcaaaacatcacggagcctgcacgtgagggtacagaaaagcaaagctgttttacaaagcaaatccaccttggcgagtaagaaaagaacagaccggttcaatataaaatctagagagcggagtggggggccagtcacccggagccttcagctggcagctgctgctgacttgagtgagaacaagagagaggacggcagcgccaagcaggagctgaaggacttcaggaacttcctgtagaaaagcccccaaaacaaaacaaaccttaattgactaaaaagtattgcatgctcaacttaggataagcactacggcaaaggatacgaaatctaccaagcttgcaagaccagttgaagctgactcaaaaatcctaacattcagctgattgccggcaggcttagagtcaggcatctgctgcttcggtgggggcccaacgcgcatgctgggcgcccgggtgattgagatccaaagagaagggcactgtaagacaggccagatgaactggctcctcgtcatgggactggtacctcagatctgagcatggcccttgtttttggcacgtagcagagaaaggattgatttgaacttaaccttgcaaagcaagttgcctgttttagcagtagtttgttgtaggtttcagggatgacagatttggatgcactcatttaaaacgttttggtcacatatcagctcttgatgcctttcttttaaattaattatagacagagagaggcatttagctgatctcttacccctggtatttcttttttttgttgttttcgtttttttaaatcacaagtagattgccagcgtaatggagaggaaaccagattggatatggactcttttttatgcctattctggtgttgcgtttgtatatccaaatggacgttatcctctcagattcttatctggcactaatttataactattatattatcagagactatgtagcaatatatcagtgcacaggcgcatcccaggcctgtacagatgtatgtctacacgtaagtataaatgaatttgcataccaggttttacacttgcatctctaatagagattaaaaacaacaaattggcctcttcctaagtatattaatatcatttatccttacattttatgcctccccctaaattaatgactgagttggtggaaagcggctaggttttattcatactgttttttgttctcaacttcaaaagtaatctacctctgaaaaatttgtagtttaatatttgtttggtgaatttgtgccactttaatccttccactatcattcccattttgttacatttctgttatggggactttatgttgaaatattgtataaagcatttgtagcaatttaaaaataaaatatttaaaattatttaaattgttttggacgcttcaattgtattatatgtgatttacatttcactttttttgttggcgttgttaacccggagagtgctcctgtattgaactttgctgttagttattttattgcttctttttggagagtgctataaaagactattctaatgaaaacattaaaatttacaatttgacatacaaaaaggggttgtccattgattttaaccaatgtagcactgagagagagagaggttaattatagatagacaagagtggtgtttgttgtttttcccctcccagcattgaaatcattggggcttgtcagatgtattaaaaaaagatttgttgtgctattgctgcaaacacttaataactagaggagaatttaaacaatgcattttatattattgtaaccaataaaaaactttctaaacaaaaaaaaaa

SEQ ID NO: 864 - DNA, 2099 bp, HOMO SAPIENS
atgcgcagtcctcctgccgtcccgcccctccctttccagagcccccagttccttagaaaccaggcggcgcgttcccggtggcggcgccctggactcccgggcccgcgcatccccgccagccttccttaaggcggatgggtggcccccgagaccccgtcggacccatggtttccagtgcagcgcggagtgggcgatgccagcgtgccaggagccatgtctgaccaggacgtttggaagatcatatccatgccagaggctcttgtgaggagatgagttggtaaagagagaggctgggatgaagatgctgccaggagtgggcgtgtttgggactggcagctccgcccgagttctggtcccactgctgagggcagaagggttcactgttgaggccctgtgggggaagactgaggaggaggcgaagcagcttgctgaggagatgaacatcgccttctacaccagccggactgatgacatcttgctgcatcaagatgtggatctggtgtgcatcagcatcccccctccactcacccggcagatatccgtgaaggctctaggtattgggaagaatgtggtttgcgagaaggcagcaacatcggtggatgccttccggatggtgacagcctcgcgctactacccgcagctcatgagcctggtagggaacgtgctgcgcttcctgcctgccttcgtgcgcatgaaacagctgatttcggaacactatgtgggagcggtgatgatctgtgatgcccgcatctactcaggcagcctgctgagccccagctatggctggatctgtgatgagctcatgggcggcgggggcttgcacaccatggggacctacattgtggacctgctgacccacctgaccggccggagagccgagaaggtgcacgggctgctcaagacattcgtgaggcagaacgctgccatccgtggcatccggcacgtcactagcgatgacttctgtttcttccagatgctcatgggtgggggtgtgtgtagcacagtgacactcaacttcaacatgccaggcgcctttgtgcatgaagtcatggtggtaggctctgcaggacgcctcgtcgcccggggagccgacctctatgggcagaagaactctgccacgcaagaggagctgctcttgagggactcgctggcagtgggcgcaggactgcctgagcaggggccccaggatgtcccgctgctgtacctgaagggcatggtctacatggtgcaggccttgcgccagtccttccaggggcagggcgaccgccgcacctgggaccgcacccctgtctccatggccgcctccttcgaggatgggctgtacatgcagagcgtggtggatgccatcaagaggtcgagccgatccggggagtgggaggctgtggaggtgctgacggaggagcccgacaccaaccagaacctgtgtgaggcacttcagcggaacaacctatgagcctgcacctgggctccttgccacagggcagagggaccagggaggggaacaggagccagacatgacagggacttggccctagcagagacagtgtctttcatttaatgagtctgggtgaagccagaggtggctctgggacttcgccccctccagtggctcatctgctcctcagacttgcagggtggcaaatgttcctgttgccaggttaccacggtgtgcacagggcagagctgccgccaggcctcctcatggtgatgccagtgagtcggaccaggaaaggctcaccctggggagcccttcagcctgatccgcagtcctaacagggtgagaaagcacaagaggggccagctcggctgaggcctgaggagaaatgatgagaagttttgtttcgttcttgggctggggcatctcaggaacagtgagggcaacaagctgtccctcagggaccctcacctgccctcccatgtgaccaggcccttcccaggtggggactggggcttgctttattaagtgagctcttgggcttttgaagtaggacagagggccctggtttggcagagaggaggcaagggagggctttagaacatctgagaaatgttaataaataattcagaaaataggaaaaaaaaaaaaaaaaaaaaaaaaa

SEQ ID NO: 865 - DNA, 2501 bp, HOMO SAPIENS
gggctgcttcttatttatgatcagatcaagggtataaggtgtcagtgggggcagccagcagtcataggccagagaggggcgactgcccgtcccaagggcttgtcacagggtaagtaaccgacagactgggaaaggaaggaggcaatcttcagccactcggtcactcattctaaattcactctcattttttgggcatctattgtgcaagccctgtggacttaaaaagagaaataagacgccgtccctgccctcgggagctcccggcgcatctgccccaacaactcgctgaagccgcctgcaggacgcctgagtgaggacaaggtgtctcactcagaaaatttgcttgattcttcctggcaagtgggacagggtgagcttcccggaggaggggaccttcgagctgtgtagcggggaaggtaggagagcgatgagagcgcccggaagggacaagcattcggggagactgaagcgcattcaacaacatatttattgagcacctactacgtccaggcactgttacatcggtgatgtaacaaaagccgacaaaaaccctcaccccgagcgcaggcaccgcagagggcgatgacgacccgagaagatgccgaacgcaggccaggagggggctctggggaaaagcaaaggcaggggaggttgcccatcggggagcctcgcgtccctgggccctccgtactctgcacatatgcagaggcccccacccgtcctgtaaccgcaaactgcttggcgtgacttggccagcggagggaggagcccaggctgcaggacaagcaggagtcagggtccctgcagttgctggggaaagtggactcttctggtagctgcttttacagcccctgccctcagaggccccccaggtgggaagggcctgcctcctaggcagtgggtggtcaccgaggactgactttgaacccggggcaagggagccccagaaggctggaggcctgcacacggcactggaagaaacaaactgcaaaggctgtccctcagggctatctccacagccaccggaatgcggcctggaatatccaaacctgtcagcccacctgcacccagccagacagcgaccattctagctgcttccccggaggcctgctgacccagagaggtgtcaaaaagctgaagcacaacagacagacctcccacagactcagcagggagttggaggacagtcggcacaccagcagctgtagcccatcacctcccccctccccattcacctggtatgcagcacttaagggcttgctgaagccccagcaaagcagaggcccacctgagagcttggaaacacacctatgccccagaccaccgcaatcgcaatctccagtcagccctggccaccacagtgaactgcctaagtgccccagatgactgagtcacaagccagggctgggaagcactgcatgaaaggcggccttctctagacaaggctggacacacccctgcaaggcctgtctcctaggagctgggatgaaactctggacgatgtgctgggaacaaagaaaacccacatggtaaaggctcgcttttccttgggaatctgcaatgcttacagaacgggaaaggctgaaagccgcccacagtgccgcacctgggcctgagggctggtgtacccaccctctcccggaggaaacaagacccgtgaccagactcaaaaccacctcacaccctcacaatccttacagaatattcaaagactggcacttcaaccttacaacctgagcacgtctaaatgcctaacacaataccaagcacactgtatgccacgcttttaaaaggtagagatcttaaaaaaacaaaaaacactacctcgggtatgaagacagattttatgatgccagtcatttccagaggggctgcccgctgtggcacagcaccacctggtggccaccccaacccatgcacctccccccatcccagtaccctgacagcaagccaatgaaagaggtgttaatatggctattttccaactgaggaaacaggcaaaagtgtagtcatttctccaagtcagtcaagttagcgagtggtagatgtgctataccttgttgcacccattttgggacctgtttgaatggcatgccccaccatcgctcccacatctgccagttatgtttaaccccacgtgctatttccatcatggcctccccacatcttattttcaaacaggctgaaaacagatggcctcatttgccgactgagatcatgctcaagattagggatgcaccgggcacggaggctcatgcctgtaatcccagcactatgggaggctgaggcaggcagtgaaaccctgtctctactacaaatacaaaaattggccaggcgtggtgatgtgtgcctgtaatcccagccactcgggaggctgaggcaggacagtcgcttgaacccaggaggcggaggtggtagtgagctgatatcgcaccactgtgctccaggatgagccacagagcaagactccgtctcaaagaaagaaaaaaaaaaaaaaaaaa

SEQ ID NO: 866 - DNA, 1616 bp, HOMO SAPIENS
ctccctgtgttggtggaggatgtctgcagcagcatttaaattctgggagggcttggttgtcagcagcagcaggaggaggcagagcacagcatcgtcgggaccagactcgtctcaggccagttgcagccttctcagccaaacgccgaccaaggaaaactcactaccatgagaattgcagtgatttgcttttgcctcctaggcatcacctgtgccataccagttaaacaggctgattctggaagttctgaggaaaagcagctttacaacaaatacccagatgctgtggccacatggctaaaccctgacccatctcagaagcagaatctcctagccccacagacccttccaagtaagtccaacgaaagccatgaccacatggatgatatggatgatgaagatgatgatgaccatgtggacagccaggactccattgactcgaacgactctgatgatgtagatgacactgatgattctcaccagtctgatgagtctcaccattctgatgaatctgatgaactggtcactgattttcccacggacctgccagcaaccgaagttttcactccagttgtccccacagtagacacatatgatggccgaggtgatagtgtggtttatggactgaggtcaaaatctaagaagtttcgcagacctgacatccagtaccctgatgctacagacgaggacatcacctcacacatggaaagcgaggagttgaatggtgcatacaaggccatccccgttgcccaggacctgaacgcgccttctgattgggacagccgtgggaaggacagttatgaaacgagtcagctggatgaccagagtgctgaaacccacagccacaagcagtccagattatataagcggaaagccaatgatgagagcaatgagcattccgatgtgattgatagtcaggaactttccaaagtcagccgtgaattccacagccatgaatttcacagccatgaagatatgctggttgtagaccccaaaagtaaggaagaagataaacacctgaaatttcgtatttctcatgaattagatagtgcatcttctgaggtcaattaaaaggagaaaaaatacaatttctcactttgcatttagtcaaaagaaaaaatgctttatagcaaaatgaaagagaacatgaaatgcttctttctcagtttattggttgaatgtgtatctatttgagtctggaaataactaatgtgtttgataattagtttagtttgtggcttcatggaaactccctgtaaactaaaagcttcagggttatgtctatgttcattctatagaagaaatgcaaactatcactgtattttaatatttgttattctctcatgaatagaaatttatgtagaagcaaacaaaatacttttacccacttaaaaagagaatataacattttatgtcactataatcttttgttttttaagttagtgtatattttgttgtgattatctttttgtggtgtgaataaatcttttatcttgaatgtaataagaatttggtggtgtcaattgcttatttgttttcccacggttgtccagcaattaataaaacataaccttttttactgcctaaaaaaaaaaaaaaaaaaaaaaaaaaaaaaaaaa

SEQ ID NO: 867 - DNA, 2696 bp, HOMO SAPIENS
agcttcgagggaccgcccggaaagacacaacgcgcgtggaaggcgccgggcgtccagtctcgggagagattagaagtggcgctcctgcccagcgccggcaatccaggggaatccgcggccatcgcggatccaccaggggtgaggcggcactgagcacaagtgtgaggctctcgggagctacgcctccgcttccccagtgccacccgtttttacctcaggcggttctgaccgccatcgtttcaacctggagaggtgagccctcccctaccgacgcacttcccttccccggcaggaaggagggcgctgacccagcgggcgcacgcccctgactgcgcatgcgccgggtgcgccgttcgtcagcggcgagtggcctcgcggcgccggattcgtcgctccgccaagagtgcgcctgcgcggtcgctggggctcgcacttcagcttcccctcccccggcgccctctggggctccgagcccggcgggaccatgttcaccagcaccggctccagtgggctctacaaggcgcctctgtcgaagagccttctgctggtccccagtgccctctccctcctgctcgccctcctcctgcctcactgccagaagctctttgtgtatgaccttcacgcagtcaagaacgacttccagatttggaggttgatatgtggaagaataatttgccttgatttgaaagatactttctgcagtagtctgcttatttataattttaggatatttgaaagaagatatggaagcagaaaatttgcatcctttttgctgggttcctgggttttgtcagccttatttgactttctcctcattgaagctatgcagtatttctttggcatcactgcagctagtaatttgccttctggattcctggcacctgtgtttgctctgtttgtaccattttactgctccataccaagagtccaagtggcacaaattctgggtccgttgtccatcacaaacaagacattgatttatatattgggactgcagcttttcacctctggttcctacatctggattgtagccataagtggacttatgtccggtctgtgctacgacagcaaaatgttccaggtgcatcaggtgctctgcatccccagctggatggcaaaattcttttcttggacacttgaacccatcttctcttcttcagaacccaccagcgaagccagaattgggatgggagccacgctggacatccagagacagcagagaatggagctgctggaccggcagctgatgttctctcagtttgcacaagggaggcgacagagacagcagcagggaggaatgatcaattggaatcgtctttttcctcctttacgtcagcgacaaaacgtaaactatcagggcggtcggcagtctgagccagcagcgccccctctagaagtttctgaggaacaggtcgcccggctcatggagatgggattttccagaggtgatgctttggaagccctgagagcttcaaacaatgacctcaatgtcgccaccaacttcctgctgcagcactgatagtcccaggccaacactgggaccggaccggcagccgagtgacagtgcgtggtccccaccatcagatcagcccggggaccgagcatctctggtgctgatgttcttgtgggaagagggaggttccaccgcacccctgccctcaaccgcaagactgttgccgttttagtgtggagataagtttgccattacattagcatgtattttctatctatattttttattgggcattttccctaggttggagagtcagcactcgttttgaatgtgtttaaaatgcattaaaatggaagatttctgcaggcagttgaatggcactccagatggggaattgctgtaaccctcttactgtaacatgtcatctcctgcgtcgtgatggggagagggtaatgttacttcacaaaggacatgtcagatccttcttcatggacttttttagttactgttttttctctcaaacttgttttcgaatctcctgggagtgagggagaaacagggagctgaatcctcccccaagctgttccaggccagaggactctgcagtaccttctcctacatctagtaacaaagaatggtgataaccatgcactggttcaaggttctggagttctccatgaaacttgggttaattttgctcagagtatccagagttagccactaggctgcgggtgaaatgggatggagaagaacaacagcaggcttcctggagccacatgggctgactagggcactctgtggctggcctggcatgggctcagcccaggaagaggagaaacgatcccttgcctgcccctccctgtggcagggctaactgcctggccctcctggctcgcagccagccagccccctggcagcaggttctcctcagggcttgggtcttcaacctgtggcgacaggaggcagggcagactgtggaggacaggatgcaggtcagggagagggaaggcaggggtggaccgccatgagcatgaaaagacccgaagcaagttgactcttgcaatgtgcaactgttatgttctgcaaaatgagcaacgatgtatcaaattgatgcaaatttagatgttgatacttacaataaagtttttaatgtgttttactcttcagtatttttctatcagacttgtacaaataaagccttgttccaggctatacatatttaccagtcaaaaaaaaaaaaaaa

SEQ ID NO: 868 - DNA, 4184 bp, HOMO SAPIENS
gtgtgtgagagtccagccttgggccagagtgccgggtctaggcctggaagcgcgaggcgggcatttcggaagagagtggcgcggcgtggggcgccgcgagggcactacgagcccaggaactgccgcgccggcccgattttccgcggctgtataaggactagcgcttcggtagccggggagctggagggaacctgatttgagatcaattcttggagaacacaaagaagtgtgatggattgaaccagctgccctttgaccctgctaacaacaacgagcccctgcagtttggtagtgccagtggccctctggtcacagaaggcctcattgagaatggaggggaatcaagcaagaaaagaaagagaacaaatactccttcagaaatgatgacagagctaagttcacagttgaggaccacacaatgcaaagagattttagatggctgtgggtctacgaaataggctatgcagccgataacagtagaactctgaacgtggattccactgcaatgacactacctatgtctgatccaactgcatgggccacagcaatgaataatcttggaatggcaccgctgggaattgccggacaaccaattttacctgactttgatcctgctcttggaatgatgactggaattccaccaataactccaatgatgcctggtttgggaatagtacctccaccaattcctccagatatgccagtagtaaaagagatcatacactgtaaaagctgcacgctcttccctccaaatccaaatctcccacctcctgcaacccgagaaagaccaccaggatgcaaaacagtatttgtgggtggtctgcctgaaaatgggacagagcaaatcattgtggaagttttcgagcagtgtggagagatcattgccattcgcaagagcaagaagaacttctgccacattcgctttgctgaggagtacatggtggacaaagccctgtatctgtctggttaccgcattcgcctgggctctagtactgacaagaaggacacaggcagactccacgttgatttcgcacaggctcgagatgacctgtatgagtgggagtgtaaacagcgtatgctagccagagaggagcgccatcgtagaagaatggaagaagaaagattgcgtccaccatctccacccccagtggtccactattcagatcatgaatgcagcattgttgctgaaaaattaaaagatgattccaaattctcagaagctgtacagaccttgcttacctggatagagcgaggagaggtcaaccgtcgtagcgccaataacttctactccatgatccagtcggccaacagccatgtccgccgcctggtgaacgagaaagctgcccatgagaaagatatggaagaagcaaaggagaagttcaagcaggccctttctggaattctcattcaatttgagcagatagtggctgtgtaccattccgcctccaagcagaaggcatgggaccacttcacaaaagcccagcggaagaacatcagcgtgtggtgcaaacaagctgaggaaattcgcaacattcataatgatgaattaatgggaatcaggcgagaagaagaaatggaaatgtctgatgatgaaatagaagaaatgacagaaacaaaagaaactgaggaatcagccttagtatcacaggcagaagctctgaaggaagaaaatgacagcctccgttggcagctcgatgcctaccggaatgaagtagaactgctcaagcaagaacaaggcaaagtccacagagaagatgaccctaacaaagaacagcagctgaaactcctgcaacaagccctgcaaggaatgcaacagcatctactcaaagtccaagaggaatacaaaaagaaagaagctgaacttgaaaaactcaaagatgacaagttacaggtggaaaaaatgttggaaaatcttaaagaaaaggaaagctgtgcttctaggctgtgtgcctcaaaccaggatagcgaataccctcttgagaagaccatgaacagcagtcctatcaaatctgaacgtgaagcactgctagtggggattatctccacattccttcatgttcacccatttggagcaagcattgaatacatctgttcctacttgcaccgtcttgataataagatctgcaccagcgatgtggagtgtctcatgggtagactccagcataccttcaagcaggaaatgactggagttggagccagcctggaaaagagatggaaattctgtggcttcgagggcttgaagctgacctaaatctctttgcctaacaacttgggatcctgaagataaatatgtgttggacaagcatagaaagtgatttatatttttaatggttttcaagtggaagttcctttgaatttgtcagttcattcctggaaaatcttttgagttaaaataaggatcctaggacagcacctcgaactacaggccctaaagagaaattgcctcaaaccacaagtgctgtaacttcctcccctttctgtcaattggttgtctttaaatattgcaaaagtcctgatgctaaacagtatttggagtgttttcagtgtctgtactactgttgtagaccttggtatttttttaaacactgttaactgaaatgttttgatgatttgtatgtgatttgtgtttctaaacttctctttacattaatgttgttactggtgaaaggcatgagagcagcactaagtcctctgtgtaactgccattgtctttccaatccccagtagaccagtaaataaataacacatcagtgtcttctagaaggtgcctgaccaggttcaccttttaaacgacaaagcatggtttgtggctttttgcaaaattactatgaaccaaaagttgacaaatgttccaaagttattttctctaacatatcacattaaagatctgtttcagaattgtaaaaagtacatctagatgtgtttacagaaagcaagtatccagtatgactggcatgtgttcatgctattcagaatcacttgtaaatagtctgcttttaaaggagggcatgttcagttttctgtgaattaaaatatgctcatgtgtgggcacacacgcacaaacacacacacgcacgcacacagtggcagaagggatttatattaatattctttcccctctggccttcttacagtctgttggtccctttgcttctgttgtcagtgtgttgaattgcaaaccgagtactgctgtaaatactatgtttacttcatgctgaatgtttgcaaagacttgatataagtattaatagtaatgaatcaatgaataaataatgagctagggtttgtgaggctttctacaaataggtcagctccacctggagtgcgaattgccagagacaccttggtagtgcccatcggcaaatcgcaatggcagcatgtgagtggaccattcagaaacttctgcttggtggaaagtaaacagagaggatggaggtttggggcgaatgtcctgaggcagagatggtctttattgtgtgtggtggtggttgtggtatttataataatgcaagcataccctcccttgagtctcaattgaagataaaagaatgtactgagcaagcaaagccaatggagagtatttcacaaaaatactttgtaaatgagatgccagtagtgttcaaagttgtatttttaaaagataaatattcctttttatacctcagttttgtgtcctgtttttaatgacttacgctctaagtaatccattagtagttatctcagttccttcctttgggttactagaatgttggaaaaagatgccaagtctgtcttgacaactggaaacagggttccacagcagcccattcgtgctgaaaactggcttccccctgaagcaccctgctgtggcaccagcaggaagctcaggttaattttacactagcttgctcactgatgcatctctcatcaatgctacggaaggctttgattcatcagtctcgggctcttggaatacctaattttaataatatctatgaaatcaagggaaactttccatttacagttatttcttgtttaaataaactaaattaatttttaggggagagcagtaggaaaaagagctaatgcatgcggggtttaatacctaggtgatgggttgaggtgcagcaaaaccaccatggcacacgttcacctatgtaacaaacctgcacatcctgcacatgtaccccggaacttacttaaaa

SEQ ID NO: 869 - DNA, 365 bp, HOMO SAPIENS
gattgagctgagtgcgtggctggagacaccacacaacacggacccttgctaaggcatctagtccacccgcttgttatgtagagggtgaaatgaagcccaaaacagtcaatcgtgaactctaagccgatcaggtgggaaagccggcatctctagaatgaaaacctaaggctgcttctcccactttgcctgagcaaatatagtgagattacacagcaaggcatgtgtaaattgccagtgcctatttctcagaaccagatttggtgatcgcaaagactgacgtggccctctaggtgtgcctatactgcaccagaagagcaagccgagaaagcagtgctcaaacctagagcattcaacctttcataccg

SEQ ID NO: 870 - DNA, 1637 bp, HOMO SAPIENS
gaggcgaaccggagcgcggggccgcggtcgccccgaccagagccgggagaccgcagcacccgcagccgcccgcgagcgcgccgaagacagcgcgcaggcgagagcgcgcgggcgggggcgcgcaggccctgcccgccccttccgtccccacccccctccgccctttcctctccccaccttcctctcgcctcccgcgcccccgcaccgggcgcccaccctgtcctcctcctgcgggagcgttgtccgtgttggcggccgcagcgggccgggccggtccggcgggccgggggatggcgctgctggacctggccttggagggaatggccgtcttcgggttcgtcctcttcttggtgctgtggctgatgcatttcatggctatcatctacacccgattacacctcaacaagaaggcaactgacaaacagccttatagcaagctcccaggtgtctctcttctgaaaccactgaaaggggtagatcctaacttaatcaacaacctggaaacattctttgaattggattatcccaaatatgaagtgctcctttgtgtacaagatcatgatgatccagccattgatgtatgtaagaagcttcttggaaaatatccaaatgttgatgctagattgtttataggtggtaaaaaagttggcattaatcctaaaattaataatttaatgccaggatatgaagttgcaaagtatgatcttatatggatttgtgatagtggaataagagtaattccagatacgcttactgacatggtgaatcaaatgacagaaaaagtaggcttggttcacgggctgccttacgtagcagacagacagggctttgctgccaccttagagcaggtatattttggaacttcacatccaagatactatatctctgccaatgtaactggtttcaaatgtgtgacaggaatgtcttgtttaatgagaaaagatgtgttggatcaagcaggaggacttatagcttttgctcagtacattgccgaagattactttatggccaaagcgatagctgaccgaggttggaggtttgcaatgtccactcaagttgcaatgcaaaactctggctcatattcaatttctcagtttcaatccagaatgatcaggtggaccaaactacgaattaacatgcttcctgctacaataatttgtgagccaatttcagaatgctttgttgccagtttaattattggatgggcagcccaccatgtgttcagatgggatattatggtatttttcatgtgtcattgcctggcatggtttatatttgactacattcaactcaggggtgtccagggtggcacactgtgtttttcaaaacttgattatgcagtcgcctggttcatccgcgaatccatgacaatatacatttttttgtctgcattatgggacccaactataagctggagaactggtcgctacagattacgctgtgggggtacagcagaggaaatcctagatgtataactacagctttgtgactgtatataaaggaaaaaagagaagtattataaattatgtttatataaatgcttttaaaaatctaccttctgtagttttatcacatgtatgttttggtatctgttctttaatttatttttgcatggcacttgcatctgtgaaaaaaaa

SEQ ID NO: 871 - DNA, 4304 bp, HOMO SAPIENS
cttgggcgttggaccccgcatcttattagcaaccagggagatttctccattttcctcttgtctacagtgcggctacaaatctgggatttttttattacttctttttttttcgaactacacttgggctcctttttttgtgctcgacttttccaccctttttccctccctcctgtgctgctgctttttgatctcttcgactaaaatttttttatccggagtgtatttaatcggttctgttctgtcctctccaccacccccacccccctccctccggtgtgtgtgccgctgccgctgttgccgccgccgctgctgctgctcgccccgtcgttacaccaacccgaggctctttgtttcccctcttggatctgttgagtttctttgttgaagaagccagcatgggtgcccagttctccaagaccgcagcgaagggagaagccgccgcggagaggcctggggaggcggctgtggcctcgtcgccttccaaagcgaacggacaggagaatggccacgtgaaggtaaacggcgacgcttcgcccgcggccgccgagtcgggcgccaaggaggagctgcaggccaacggcagcgccccggccgccgacaaggaggagcccgcggccgccgggagcggggcggcgtcgccctccgcggccgagaaaggtgagccggccgccgccgctgcccccgaggccggggccagcccggtagagaaggaggcccccgcggaaggcgaggctgccgagcccggctcgcccacggccgcggagggagaggccgcgtcggccgcctcctcgacttcttcgcccaaggccgaggacggggccacgccctcgcccagcaacgagaccccgaaaaaaaaaaagaagcgcttttccttcaagaagtctttcaagctgagcggcttctccttcaagaagaacaagaaggaggctggagaaggcggtgaggctgaggcgcccgctgccgaaggcggcaaggacgaggccgccgggggcgcagctgcggccgccgccgaggcgggcgcggcctccggggagcaggcagcggcgccgggcgaggaggcggcagcgggcgaggagggggcggcgggtggcgacccgcaggaggccaagccccaggaggccgctgtcgcgccagagaagccgcccgccagcgacgagaccaaggccgccgaggagcccagcaaggtggaggagaaaaaggccgaggaggccggggccagcgccgccgcctgcgaggccccctccgccgccgggcccggcgcgcccccggagcaggaggcagcccccgcggaggagcccgcggccgccgcagcctcgtcagcctgcgcagccccctcacaggaggcccagcccgagtgcagtccagaagcccccccagcggaggcggcagagtaaaagagcaagcttttgtgagataatcgaagaacttttctcccccgtttgtttgttggagtggtgccaggtactggttttggagaacttgtctacaaccagggattgattttaaagatgtctttttttattttacttttttttaagcaccaaattttgttgttttttttttttctcccctccccacagatcccatctcaaatcattctgttaaccaccattccaacaggtcgaggagagcttaaacaccttcttcctctgccttgtttctcttttattttttattttttcgcatcagtattaatgtttttgcatactttgcatctttattcaaaagtgtaaactttctttgtcaatctatggacatgcccatatatgaaggagatgggtgggtcaaaaagggatatcaaatgaagtgataggggtcacaatggggaaattgaagtggtgcataacattgccaaaatagtgtgccactagaaatggtgtaaaggctgtcttttttttttttttttaaagaaaagttattaccatgtattttgtgaggcaggtttacaacactacaagtcttgagttaagaaggaaagaggaaaaaagaaaaaacaccaatacccagatttaaaaaaaaaaaaacgatcatagtcttaggagttcatttaaaccataggaacttttcacttatctcatgttagctgtaccagtcagtgattaagtagaactacaagttgtataggctttattgtttattgctggtttatgaccttaataaagtgtaattatgtattaccagcagggtgtttttaactgtgactattgtataaaaacaaatcttgatatccagaagcacatgaagtttgcaactttccaccctgcccatttttgtaaaactgcagtcatcttggaccttttaaaacacaaattttaaactcaaccaagctgtgataagtggaatggttactgtttatactgtggtatgtttttgattacagcagataatgctttcttttccagtcgtctttgagaataaaggaaaaaaaaatcttcagatgcaatggttttgtgtagcatcttgtctatcatgttttgtaaatactggagaagctttgaccaatttgacttagagatggaatgtaactttgcttacaaaaattgctattaaactcctgcttaaggtgttctaattttctgtgagcacactaaaagcgaaaaataaatgtgaataaaatgtacaaatttgttgtgtttttttatgttctaataatactgagacttctaggtcttaggttaatttttaggaagatcttgcatgccatcaggagtaaattttattgtggttcttaatctgaagttttcaagctctgaaattcataatccgcagtgtcagattacgtagaggaagatcttacaacattccatgtcaaatctgttaccatttattggcatttagttttcatttaagaattgaacataattatttttattgtagctatatagcatgtcagattaaatcatttacaacaaaaggggtgtgaacctaagactatttaaatgtcttatgagaaaatttcataaagccattctcttgtcattcaggtccagaaacaaattttaaactgagtgagagtctatagaatccatactgcagatgggtcatgaaatgtgaccaaatgtgtttcaaaaattgatggtgtattacctgctattgtaattgcttagtgcttggctaatttccaaattattgcataatatgttctaccttaagaaaacaggtttatgtaacaaagtaatggtgttgaatggatgatgtcagttcatgggcctttagcatagttttaagcatcatttttttttttttttttgaaagtgtgttagcatcttgttactcaaaggataagacagacaataatacttcactgaatattaataatctttactagtttacctcctctgctctttgccacccgataactggatatcttttccttcaaaggaccctaaactgattgaaatttaagatatgtatcaaaaacattatttcatttaatgcacatctgttttgctgtttttgagcagtgtgcagtttagggttcatgataaatcattgaaccacatgtgtaacaactgaatgccaaatcttaaactcattagaaaaataacaaattaggttttgacacgcattcttaattggaataatggatcaaaaatagtggttcatgaccttaccaaacacccttgctactaataaaatcaaataacacttagaagggtatgtatttttagttagggtttcttgatcttggaggatgtttgaaagttaaaaattgaatttggtaaccaaaggactgatttatgggtctttcctatcttaaccaacgttttcttagttacctagatggccaagtacagtgcctggtatgtagtaagactcagtaaaaaagtggatttttaaaaataactcccaaagtgaatagtcaaaaatcctgttagcaaactgttatatattgctaagtttgttcttttaacagctggaatttattaagatgcattattttgattttattcactgcctaaaacactttgggtggtattgatggagttggtggattttcctccaagtgattaaatgaaatttgacgtatcttttcatccaaagttttgtacatcatgttttctaacggaaaaaaatgttaatatggcttttttgtattactaaaaatagctttgagattaaggaaaaataaataactcttgtacagttcagtattgtctattaaatctgtattggcagtatgtataatggcatttgctgtggttacaaaatacttcctctgggttataataatcatttgatccaattcctattgcttgtaaaataaagttttaccagttgatataatcaaaaaaaaaaaaaaa

SEQ ID NO: 872 - DNA, 399 bp, HOMO SAPIENS
  misc_feature (73)..(73): n is a, c, g, or t
  misc_feature (77)..(77): n is a, c, g, or t
  misc_feature (100)..(100): n is a, c, g, or t
  misc_feature (115)..(115): n is a, c, g, or t
  misc_feature (120)..(120): n is a, c, g, or t
  misc_feature (151)..(151): n is a, c, g, or t
  misc_feature (187)..(187): n is a, c, g, or t
  misc_feature (216)..(216): n is a, c, g, or t
  misc_feature (235)..(235): n is a, c, g, or t
  misc_feature (242)..(242): n is a, c, g, or t
gaatgctgccagtatttgagcgaaagtatctgtgttttggtcactgttttgctgtgaatgctgtgtttatgangctncctagcagttttcaccctttccntgcaactcagcacantcccntggggcggagtcaggtcatgggctgcaaccntggagagtttatggcaaacagaagcccctgttaccntcatccaatggagataacccttgctgccntaggagatgtgctgtatantcttccnaggtcttgtttttcttgatagactcatggtagcttttacatcatttccatttgcgaatgaaactcagttgacccttgaacaacatgagcttgaactgcatgggtccacttacatgcagattattttcaatcaatatatttcggagattttcaacaac

SEQ ID NO: 873 - DNA, 5212 bp, HOMO SAPIENS
agagtcgcgggtgcgcgcgccggcggcggatccgcagttaaaatggtccgagcgggacccggcctttccccggccgctccgctgactgactgagccggctggccgggcccggactggtcgcctagccggcaggctcgctcgctccctccctcgcgtccccaaagctcgcgcccatcgttctcccggcttccctgggcaaagcatgtagcccccgtcgggcactccggcggcccgcagctgacgcccaccccccaccgtcgcgtgtgtgcccgtgtgtgcgtgtgtgtgcgcaggaagggcgacccctccgggggccgagccagcgagcggcctgccccgctgccgggagcccgcctctctgggtctccctccctcccgtcccggtccccctcctcggggccttctatatgggccaccttctctcgaaggagccgcgtaaccgcccgagccagaagaggcctcgctgttgcagttggtgccgccgccggcgccctctcctcaggctgccccgccggaccccagccaaggtgccccctcagccggcggcgccccggagccgggactgcttcttccgcgggccctgcatgctctgcttcatcgtgcacagtcccggcgcgcccgcccccgccggcccagaggaggagccgccgctctcgccgccgccgcgggacggggcctacgctgccgcctcctcctctcagcacctggcgcggcgctacgcggccctggccgccgaggactgcgccgctgctgcccgccgcttcctgctatcctcggccgccgccgccgccgccgctgccgcctcggcttcgtcgcccgcctcctgctgcaaagagttggggctggctgcggccgccgcctgggagcagcagggccgaagtctcttcctggccagcttggggccggtgcgcttcctggggccgcccgccgccgtgcagctcttccgggggccgacaccgtcaccggccgagctccctacgccccccgaaatggtgtgcaagcggaagggggccggggtccccgcctgcaccccctgcaagcagccccgctgcggcggcgggggctgcggcggcggcggcggcggcggtggcgggggagggcctgcggggggaggcgcttcgccgccccggccccccgacgccggctgctgccaggccccggagcagcccccgcagccgctctgccctccgccctcttctcccacctccgaaggtgcccccaccgaagctggcggggacgctgtccgagccgggggcaccgcccccttgtccgcccagcagcagcatgaatgtggcgacgcggactgtcgggagtcccccgaaaacccctgcgactgtcacagggagccgccccccgaaaccccagacatcaaccagctgccgccgtccatcctgctcaagatattttccaatttgtcactggatgagcgttgcctttccgcatcattggtttgcaagtactggcgtgacctttgtttagacttccagttttggaagcagctggatcttagtagtcgtcagcaggtcactgatgaattgttggaaaaaattgcatcaagaagtcagaatataattgaaatcaacatttctgattgtcgcagtatgtctgataatggcgtatgtgttttagcatttaaatgtcctggacttcttaggtatacagcctacaggtgtaaacagctttctgacacctctattattgcggttgcctctcactgtcctttacttcagaaagtgcatgtaggcaaccaggacaaactcactgatgaaggactcaagcagctgggctcaaaatgcagagaactcaaagatattcatttcggccagtgttacaagatctcagatgaaggcatgatcgtcatagctaagggctgtctgaaattacaaaggatatacatgcaggaaaacaaattagtgacagatcagtcagtgaaagcatttgctgaacactgtcctgagcttcaatatgtaggcttcatgggttgttcagtcacttctaaaggagtcattcacctaaccaagctaagaaacctttccagcttggacctacgtcatatcactgaactggataatgaaaccgtgatggaaattgtcaagaggtgcaaaaatcttagctctctcaatctctgtctgaactggatcataaatgacaggtgtgtggaggtcattgcaaaggaaggacaaaacctgaaagagctatatttggtgtcctgtaaaatcacagattatgcactgatagccattgggcgatacagcatgacaatagagactgtggatgtcggatggtgtaaagaaatcacagaccaaggagccaccctgattgcacagagcagcaagtctctgagatatttggggctgatgagatgtgataaagtcaacgaagtgacggtggaacagctggtgcagcagtacccccacatcaccttcagcaccgtcctgcaggactgcaagaggaccttggagagagcctatcagatgggctggacccccaacatgtctgccgcctcctcctagcgctcctgcctcgcctagtccactgggatcattcagcagagcagaggagaattgtacatttggggagctgatctctcggaagggttttaactgtcacctgtctgtgtgtgttcaagtatgtgtatttgtgtcttgtttgcatactgcataccaaaagtgcagttgtcatttgttcccaagtgagctggctttttttcttagaaattaaagattatgaaagccacaaactttttagtttttaacttcaaaggcttctttctctttaaaaaaaaattatttttaatatagagtcaaaaaattggatgtattattttgagcttctaattgctgccacttggagatgtccaagtaagaaggccttctttttacatgggatgaattgtgcacttctactgatgatgactacagcagaagtgatgttatacgtacaggcacttacactctctcacatattcacacgtgtgcacatctacaccagggctctgatctactctagatcgtttcctgacagagaagccttcttccaggccactaaggtagcatgttatccactgtggcactgcctaactccgtgtatcctcgggtggccaacttgctatctggtgggtgacttggggactagaaagaataaagccttttctaaatttgttatatagaggcaacagtctgaactctcctggccagctcacgaaagttaattatacattattctacaaatgcattctgttgagcactaaatattttagttggttttatgttaacattgtgttagcttttatttcctggatagtaactggtcaggatatattttaatgatatttgaaactaatcttagcattgaagccaccaatgtaattaatggtgtgcagttattttaaaaactacagatcatttcattattttcttaattttggtaattattaaagtctatttctgagatacgagagggtagtcacattaatagaagattcatgagtgagatataagtagacaatctttctactgttgttgctctttttgctttgctttgggttcttgaacaggttttttggatatatgcatgttgtcattttggactagttctcatgctactgcaaagatctattgctagctaatatatgagttaagaaagaaaattagaaaatctgttcattgaaattctgtttacacttgtcagaaataagcatttctttgtttaattaaggattgccagcttcagttaagacaagacctatcagtaaatgaatatatgttttgatttaacacatctttacaattaattcataatagggactcaggctcaaataactgttcctgtgtctagatttataatgaggacatcagggagcctttttaagctaaagagtgattatctttcacagtagaactagaaacaaaaccctaacttgtgaagttgctatttatttttccctgagtgaatataactgttatttggtctttaacagatatactgaggtttgagtttcactttctttaagtctcacattgctaacatgacattagctgtaagaaacaagatagctttacatttgaatgccatttactgatttctaatgattctctttttttgtaaacaactgtttcctttgattatgtcaacatgtttctgatgtggcatttttgttttaatcccaatcggttaggaaaatctagtcagtaagcgccatgagtattcttcccataactaaatgggtttctaatttaatttgaagggaataaaatttgtgtaagaaaaaagctgtttaacattaataaactatatttcttcttacacattgaactgtatcattttcatatccacttccccaccactgaaatatcttatttcacaatattttaactgatttttaatccaaaactaatttataagacagtatgtatagtaatagtagcttgagtgaatatgcaaaagtttaatttttatatatgtcatactatattttaaatagttaaaaaagacaaaagaagggagagccatctatgatatagatggtaccatttcagttcaaagttgtaataacctttggagtgttacagtttggttgtcaaatggtttcagaatgtataattgatttttttaaatgttgcattgtttgaatctaaagtacagcactataacatgctttagcttgggggggtgggggtggggtggggacttgcacttattctctaaaatgttgactaatccagaaagcctgatgcaacataatctggaaaactgctttggtacatttgtagaaatccgtagaaataccatatccagcctcaaagcattaatctcaaaaaaaaaaaaaaaaaaaaaaaaaaacagccagaaaaaagcatcaccttgagtggtcctgtgatggttgttgaatgtgttctcattagatgctttgaaatgaggcttaaaataatttttctgggcaatatagagtttcttttttttgcttagaatgtcataaatacatgtgaacacgtttaatgcagggctttttattctctccaaaatgtcaacagtattttcagaataaagactatgaaatatattgctgtagtggaaaattctggtcctttgtctttaatgtctttttgagtggataaagaaaattcacccggtttgtagtttctatatttccgtgaatctttgaccttgcagtgggttgcaataaaagagaaacaaaacaaaaaaaaaaaaa

SEQ ID NO: 874 - DNA, 3110 bp, HOMO SAPIENS
gcggaagtggagctaccgccaccgccgccgccgattccggagccggggtagtcgccgccgccgccgccgctgcagccactgcaggcaccgctgccgccgcctgagtagtgggcttaggaaggaagaggtcatctcgctcggagcttcgctcggaagggtctttgttccctgcagccctcccacggcagagtctccagagatttgggccgctacaaaaagtgcattttgcccattcggctgtggatagagaagcaggaagagcactggacttggagtcagggaatgacaatggataaaagtgagctggtacagaaagccaaactcgctgagcaggctgagcgatatgatgatatggctgcagccatgaaggcagtcacagaacaggggcatgaactctccaacgaagagagaaatctgctctctgttgcctacaagaatgtggtaggcgcccgccgctcttcctggcgtgtcatctccagcattgagcagaaaacagagaggaatgagaagaagcagcagatgggcaaagagtaccgtgagaagatagaggcagaactgcaggacatctgcaatgatgttctggagctgttggacaaatatcttattcccaatgctacacaaccagaaagtaaggtgttctacttgaaaatgaaaggagattattttaggtatctttctgaagtggcatctggagacaacaaacaaaccactgtgtcgaactcccagcaggcttaccaggaagcatttgaaattagtaagaaagaaatgcagcctacacacccaattcgtcttggtctggcactaaatttctcagtcttttactatgagattctaaactctcctgaaaaggcctgtagcctggcaaaaacggcatttgatgaagcaattgctgaattggatacgctgaatgaagagtcttataaagacagcactctgatcatgcagttacttagggacaatctcactctgtggacatcggaaaaccagggagacgaaggagacgctggggagggagagaactaatgtttctcgtgctttgtgatctgttcagtgtcactctgtaccctcaacatatatcccttgtgcgataaaaaaaaaaaaaaaaaaaaaaagagaatcgtacgtcgactttcgatttttcacagcctcagcctaggaaaaatggttcatgggataaacagctggtatttgtatctaaaactcagattggtcacataaatgccacggcattccgaagttttgattttgattaacattgacaggattactgtgtgtttaattttttaaaaactgaacactgtgattatggggttttgtaatttagcagaactcttactggtagaaaaaatagacctgaattatgtgtaactttttggaaggtttaatctgatatcaaaataatcattgaaatacaattccattgtaaagttgtacagaaagttatagagattatattgtgatgctggaacttggagtgagacacacatcatttggcatttgagttgaatggtaattcacagtaatgctgccgttgttcgggacttaaagacacttgacctgtttgggctgttgccacttaaaagttcatgaccacaaatgtccacagtgtcttcctctgaggaaactcgaatcctgaaatggaaattctttgtggcagataactggcttatgacaccttgaaaagttcaagtgctcatataacacaccacactgaaccccctttcctacagcaatatgttcactatgttaccaatttgcaacttgtgcttcaatagtggaatctactttcattgttaacactgagctaaagaaaaaaagccgtgtgttttatgaatgaccttatctgtttcctggataatacctttaagaataatgtcctgagtcaggcgtggtggtgcgtgcatctagtcccaactatttgggaggctgaggcaggaggatcgcttgagcccaggagtttaaagctgcagtgccctgtggttgcacctgtgaataactgcactccagcctgggcaacatagcgagacctcatctccaaaaaagaaaacaaaaaacaaaaaaaggaatgatgttctgtagagatggcctttcacttgaggagtactcagttttcaggttcttcctagctcggggcttttaaattttgaaatctaaacattctttcccaccatcctttttgactgttgaccttggttttctcttctaagtttctgtccctctgcttccttactttttttcctttttgaattctatctttatctgtcttttgttcactttttaatgctatatatgggcaggggtgagagacattactgagcaccttggtgagcaagcctggctttaaagattggagaagagcttctggcaccagaaccctgtcttcctccagttctcaacacggtgttgctcttcagtcataccggaatctgaatcaaaaaagtatttttaaatatccatgatttctccctgtattgaggctagccctgatcatgctttttgtgcctgtcaccaggtctcccaagtgcactcatccaggtcagtgctcagatgtgtttaaggagaccctatattcagggaagttgcgtgaacactgcagtggggagaattgagaatagtcaggcctatcagtctcacagaatcacccctctacctttgatattccacttagctgtagagtccatctgtttgtccatctgctgaaatgagaaaagaaaaatttatgcactgatttaaaacaaaccaaaaaaaaagaaaaaaacaaaaaaaaaaatccctcctttctagctgaacaaaaatgtgcagttaatacttggcgcttgaaaatgcagtagtgaatgtggaaccaagcctgtctgtatatctggtagctcttttcttgctttgttttttcttaccagtattctgcctaacgtttgcttctgtgatggttatattgcctagcaagcacacccgtggttgtgaaaatagtatagcaaaaaagaaaaatccccggttattgatgtactagatttgtgtatgtcttttaaacagttctagtttcaccttacacagaataatcaggaaaagtgtaaaaattcaaaagtgaaataaaaattttatcagttaaaaaa

SEQ ID NO: 875 - DNA, 4018 bp, HOMO SAPIENS
ttcctccacttcctggactgcgcgaccggaggcctagcgggcgcgcgcccgcaccatcgactcgccaacgagagaaggtcctggggcacggacaccgacgggttgcgactgtgacgtgaggtgttctcgcgcgcgctagcgcgcgtctccgggtgccgctgacgggcgtgcgcgcttgtgcggagccggaggtgggggccgaaccagccaaggttgcgggggccgcagagccggacgaagacggagggcggagccggcttcgggactgcggagactacacaccgagcgagcgcctgggcccgaagggagcgatgctgtggttccagggcgccattccggccgccatcgcgacggccaaaaggagcggcgcggtcttcgtggtgttcgtggcaggtgatgatgaacagtctacacagatggctgcaagttgggaagatgataaagttacagaagcatcttcaaacagttttgttgctattaaaatcgataccaaaagtgaagcctgcctacagttttcacaaatctatcctgtagtgtgtgttccatccagtttctttattggagacagtggaattcccttggaagtaatagcaggaagtgtttctgcagatgaacttgttacaagaattcacaaggtccgacagatgcatttgctaaaaagtgaaacatcagtagcaaatggcagtcagtcagaaagttcagtgtctactccatctgcgtcatttgaacctaacaacacttgtgaaaactctcagtccagaaatgcagagctttgtgagataccacccacttctgatacaaagtcagatactgcaacaggaggagaaagtgcaggccatgccacttcctctcaggagcctagtggatgctcagatcagagacctgcagaggacctcaacatccgagtggaaagactaacaaaaaaacttgaagaaaggagagaagagaaaagaaaagaggaagaacagagagaaattaagaaggaaattgagaggagaaaaactggaaaagaaatgttggattataaaagaaaacaagaagaagaattaacaaaaagaatgctggaggaaagaaacagagagaaagcagaagatagggcagctcgagaacgtataaaacagcagattgcattggaccgtgcagagagagctgctcgttttgcaaagacaaaggaagaagtagaggctgccaaagctgctgccttgctagcaaaacaggcagaaatggaagtcaagagggaatcttatgcaagagaaagaagcactgttgcaagaattcaattccgtcttcctgatggttcttcctttacaaatcagttcccttctgatgctcctctagaagaggcaaggcagtttgctgcacagactgttggcaacacttacggtaatttttcgttagcaaccatgtttcccaggagggaatttaccaaagaagattataaaaagaagttactggatttggaacttgccccaagcgcttcggtggtactgttgccagcaggaagaccaactgcatccattgtacactcttccagcggagacatttggaccttgttgggaacagtgctttatccattccttgccatctggagattaattagcaatttcttgtttagtaatccgcctcccacacagacttcagtgagagtaacatcgtcagaacccccaaaccctgcatcatctagcaaatcagaaaaaagggaaccagtgagaaaaagagtgctggaaaaacgtggagacgactttaaaaaggaggggaaaatttatagattaaggactcaagatgatggtgaagatgaaaacaacacttggaatggaaattccactcaacagatgtagtgtgacaagtataatatgtgcaataatcattgtttctcttatgatttaattcaactaaaattctactggagaagtgggactgctttatattttccaactggtctataaaatgtctctttattcctgcttagtgggtgtgggttgaaggtgtttaactcagaaaagtaaagacaggaaataactctctgctaggtccttgcttatatggcaaccactgctagaaccctaaaagaaccaaaaatctgccacagcctgcctccatcagcttcttatttagtatttcatatgcccattagccctatgcttcagatgacacgttttgtttagagctactttgctccaagactcttaagcccaaagtaactggtatgtcactgagtaacttgactcggtgtcagagcattttaactagccactcagatgagaatttatgtttaacttctctttttactcatcagctgcaagcaaaatcttgtagtttttaatcttaaacactgaataaaaaaactttcccctaaattggaatgatcttagttttgctttgagttttgttatctagcatctttttgttgcacagggctctattgaggtcctatgtctctgatttttttttttccccagtattgccctggagctgtctctggaaagtagctggcgaggttaccttaactatcactgaagaaagaaattttctgacacactgatggcatgtgacttgtctcctaagtcagtgaggcatcactttgtttgcataaagtatacggtttgttaaggcctttgttcttgtgagatgcaaaacagctgctagtctgcaacctagttttccctctcacctttaactgacgttttgtcctcaataattacacaaggacctagagtacctataggacaaaaagtatagaataaaaatatgcctttagtcatttggtttttcttaaaaagttgagattcttaatctgacttacatgttactttatccgtatgtctttgttagtggagaccgctaaactaatgatgtttgaaaacagttcctctgttttagattggaagatagcactctagagtggacatacggaaagactgtgactttattttgtaatgggaggaagaaattttctcagagcaaactttctattttttacctgtgaaataacagtgactttttaaaatggtgacagtgttggcaaggaaacagcaacacaggctgcgctgttggtaggagtgaaaaccagtataattcttctgaaaaacatttatcagaaacttaaaatatttcataccgtttgatccagtagcttcttctaaatcataaatgcagacaatgtttaggtaaagacatactcattaagtgttatttattttactcaagaactggaaaccaactaaatgccttctatagaagtaatttttgatgaggagaaatggtacaatactaattaacaacttggtttaacatgtttactgagcatctgttaagtgttgggggaaaaagcagcaggatccagagctataggtacagtgtgatctcagctttgcaaacacattttctacatagatagtactaggtattaatagatatgtaaagaaagaaatcacaccattaataatggtaagattggtttatgtgattttagtggtatttttggcacccttatatatgttttccaaactttcagcagtgatattatttccataacttaaaaagtgagtttgaaaaagaaaatctccagcaagcatctcatttaaataaaggtttgtcatctttaaaaatacagcaatatgtgactttttaaaaaagctgtcaaataggtgtgaccctactaataattattagaaatacatttaaaaacatcgagtacctcaagtcagtttgccttgaaaaatatcaaatataactcttagagaaatgtacataaaagaatgcttcgtaattttggagtaggaggttccctcctcaattttgtatttttaaaaagtacatggtaaaaaaaaaaattcacaacagtatataaggctgtaaaatgagaattctgccccctcacctcttaccccagtactattctccagaggtaatctattaacaatttcttatgtaattttcagaaaatttgtatgcgtatataagcaaatatgtaatctttattttttaaataaatgggatcatattatatattctaaaa

SEQ ID NO: 876 - DNA, 4487 bp, HOMO SAPIENS
gaggggcggagccccggcccggaggtctgtcatgctgttcccgctccaggtggccgctgtaacctcttcggtccgcgacgatcctctagagcactgtgtgtctccccggacgcgagcccgctcccctgaaatctgcaaaatggctgataatttggatgaatttattgaagagcaaaaagccagattggccgaagacaaagcagagttggaaagtgatccaccttacatggaaatgaagggaaagttgtcagcgaagctttctgaaaacagtaagatactgatctctatggctaaggaaaacataccaccaaatagtcaacagaccaggggttccttaggaattgattatggattaagtttaccacttggagaagactatgaacggaagaaacataaattaaaagaagaattgcggcaagattacagacgttatcttactcagggcattacacaagggaaaagaaagaaaaattttctatctacgagtgaaacagatccatctactttgggagtttctcttcctattggtgagaggttatctgctaaggaaaggttgaaacttgaacgtaacaaagaatacaatcagtttctcaggggtaaggaagaatccagtgaaaagttcaggcaggtggaaaagagtactgagcccaagagtcagagaaataaaaaacctattggtcaagttaagcctgatctaacttcacaaatacagacatcttgtgaaaattcagagggtcctagaaaagatgtcttaactccttcagaggcatatgaagaacttctgaaccaaagacgactagaggaggacagataccgacaactagatgatgaaatcgaattaaggaatagaagaattattaaaaaagcaaatgaagaagtgggcatttccaacctaaaacatcaaaggtttgcaagcaaggctggcattccagatagaagatttcacagatttaatgaggatcgtgtttttgatagacggtatcatagaccagaccaagatcctgaagtaagtgaagaaatggatgagaggtttagatatgaaagtgattttgatagaagactttcgagagtgtatacaaatgacaggatgcacaggaacaaacgagggaatatgcctcctatggaacatgatggggatgttatagaacagtcaaacataagaatttcatctgctgaaaataaaagtgctccagacaatgaaacatccaaatctgctaatcaagatacctgtagtccttttgcagggatgctctttggaggtgaagatcgagaacttattcagagaaggaaagagaaatacagactagaactgttggaacaaatggctgagcaacagaggaacaagagacgagaaaaagatttagaactcagggttgcagcgtctggagcacaagaccctgagaaatcgcctgatagactaaagcagtttagtgtggcaccaagacactttgaagagatgataccacctgaaagacccagaatagctttccagacacctctccctcctttatctgccccatctgtcccacccatcccatcagttcatcctgttccttctcaaaatgaagatttgcgcagtggactcagcagcgcccttggtgaaatggtgtctcccaggattgcacctctgcctccacctcccctactaccacctttggctactaactatcgaactccttatgatgatgcatactatttttatgggtccaggaatactttcgatcccagtcttgcttattatggttcaggaatgatgggcgtacagcctgcagcttatgttagtgctcctgtcacccaccaactagcacaacctgttgtgaatacggttggacagaatgaactgaagattacaagtgatcaagtgataaattcaggattgatttttgaagataaaccgaaaccttccaaacagtcacttcagtcttaccaagaggctttgcagcagcagattcgggaaagagaagaaagaaggaagaaagaacgtgaagaaaaagaagaatatgaagctaaattagaagctgaaatgagaacatataatccctggggaaaaggtggaggtggtgctcctctcagggatgcaaaaggaaatctgataactgatttgaataggatgcacagacaaaatatagatgcctaccataacccagatgcaagaacatatgaagataaaagggctgttgtatctctagacccaaatttagccacttcaaatgctgagaacctagaagatgctgcaaataaaagctcaggtcatatgcaaacacagagctctccttttgctcggggaaatgtatttggtgagcctccaactgaacttcagattaaacagcaagaattatacaagaattttcttcgtttccagattgaggaaaagaaacaaagagaggaagcagagcgagagagactgagaattgcagaagaaaaagaagaaagacggcttgcagaacagagggcacgaattcagcaggagtatgaagaggaacaggaaaagaaaagagagaaagaggaggagcaaaggctaaaaaatgaagagcatattcggttagctgaagaaagacaaaaagaagcagaaagaaagaagaaagaagaagaagaaaaatataacctgcaacttcagcactactgtgaaagagacaatttgattggggaagaaacaaagcacatgagacagccttctcctatagttcctgctcttcagaacaaaattgcaagcaaactccaaagacctccttcagttgacagcatcatacgttcctttattcatgaaagttccatgtccagggcacagtcacccccggtacctgccaggaaaaatcagctccgtgcagaagaggagaaaaaaaatgtaattatggaattatcagaaatgagaaaacagcttcgtagtgaagagaggcgtctacaagagcgattgctacacatggacagtgatgatgaaattcctatcaggaaaaaggaaaggaatcccatggatatatttgatatggctagacatcggttgcaagctcctgtcagaagacagtcccctaagggcttagacgctgccacttttcagaatgttcatgattttaatgagctgaaagatagagattcagaaacacgagttgatctgaaatttatgtacctggatcctccaagagatcatcacaccttagagattcagcagcaagccctgctaagagagcagcagaagaggctgaacagaataaaaatgcaggaaggtgccaaagttgacttagatgccatcccaagtgctaaagtacgagagcaaagaatgcccagagatgacactagtgatttcttgaaaaactcattattggaatctgatagtgcttttattggggcttacggtgagacatatcctgccattgaagatgacgtcctccctccaccatcacagttgccctctgcacgggagcgcaggaggaacaaatggaaaggactagacattgatagcagtcgtcctaatgtagcaccagatggtctctctctaaaatctatatccagtgtaaatgttgatgagcttagagtgagaaatgaggaacgaatgcgaagactgaatgaatttcacaataaacctattaatacagatgatgagagttcactggttgaccctgatgacatcatgaaacacataggggatgacggatcaaactctgtagcaactgagccctggctccgccctggcacttcagaaacgctgaaacgtttcatggcagagcagctgaaccaggagcagcagcagattcctggaaaaccaggcactttcacttggcagggcctgtcgactgcacatggttaaaataaacctgtactggacccagtagtgccttttaaggtgaaaggaatggtaaatctgtacctttaatatgtcctacttttggcccctacctgaaagttactttttttccatcatctgtatataaaattatttttatcatgatgtatattatgtacataaataaaaggccatgattattgatttatataatagaattgtatagattatttttgcacagttttgtcataaattagggtggtaatgaactggattgaactactatatgtgcattatattgaattctgcttgtcattaagataaggtgaataagtgtcttaaacgtcctgtaaaaccggactcccctttgttacatgcacattttccattgttacctcgatgcaaaagaattcatttagtaggtacatctattgtagctgtgattattccagtttctgtgtgatgcaatcaaatgtcctattaattaattattatttcatgtcatttgtagctactgatacagcagaaatgaagggaactgtaattacttgtatttttgtaagccatacgttaaatgtttgttacatcatctttctgcttctatttttatgccaatgaaggcatttgtcttgttactaattacatgatgtaactacttcttgatataaataaatttttattttaattactaaaaaaaaaaaaaaaaaaa

SEQ ID NO: 877 - DNA, 500 bp, HOMO SAPIENS
taactctgtacccttatttcttactccaaagtaaggccttccactcaaggcacatacaaagctagaatgaagttgagtgtattatccaactatttaacttattgaacatataattgacaatgtctaccaatatagccactattcctgagctagatttccacaaaacattccacgatttcccttaatggtggttgagtgatacattgaataaatattgtactgtaggataaatttctgtaagaaagtgtcttcaaagattttgggtttgaggtatatattctttcatgttttgcagtgaaggtgtgtttttcttccaatagttcttagtttacattttctttcattggaagttcatcactgttaggcgttatcttgagtattataacaaagcaaatccacaagtattcaatataagattaggaaaaaaattcctgcgatactttgttgtcaaacacttgccactgatagacgttattttagcttttaaggcctgtcacatt

SEQ ID NO: 878 - DNA, 3432 bp, HOMO SAPIENS
cgggtgtgatcgagtggcctcgcctcatcgcctagcgcccccctcagtcgccgccgcctccgcccgccggccatgtcccccggccgccgccgccgccgcccgagcgcggcgctcccgcggccccgcgcgcagtgagcgcgggcccgtcttgccgttcgcccgccccagggcccccttgttctccgcgccgccgccgccgccatgttgggtttggagctgcagcggagccgccgccgccgccgcgggtgagggaggccgagagcggagcccgccccgccccggggcccagggagcggggccgcctcggagcccggcctctccccgccagccgccttcccggcccgccgtgcagccagcgagccagcgagcgagcaagcaagcaagcaccggaccccggccgcgccttcagctacggcccgagcgagcccgccgccgccgggcccggccacagcctgcagcggagcccacgagaggcagcgccatggcggagcagacctactcgtgggcctattccctggtggattccagtcaagtgtctacatttctgatttccattcttcttatagtctatggtagtttcaggtcccttaatatggactttgaaaatcaagataaggagaaagacagtaatagttcttctgggtctttcaatggcaacagcaccaataatagcatccaaacaattgactctacccaggctctgttccttccaattggagcatctgtctctcttttagtaatgttcttcttctttgactcagttcaagtagtttttacaatatgtacagcagttcttgcaacgatagcttttgcttttcttctcctcccgatgtgccagtatttaacaagaccctgctcacctcagaacaagatttcctttggttgctgtggacgtttcactgctgctgagttgctgtcattctctctgtctgtcatgctcgtcctcatctgggttctcactggccattggcttctcatggatgcactggccatgggcctctgtgtcgccatgatcgcctttgtccgcctgccgagcctcaaggtctcctgcctgcttctctcagggcttctcatctatgatgtcttttgggtatttttctcagcctacatcttcaatagcaacgtcatggtgaaggtggccactcagccggctgacaatccccttgacgttctatcccggaagctccacctggggcccaatgttgggcgtgatgttcctcgcctgtctctgcctggaaaactggtcttcccaagctccactggcagccacttctccatgttgggcatcggagacatcgttatgcctggtctcctactatgctttgtccttcgctatgacaactacaaaaagcaagccagtggggactcctgtggggcccctggacctgccaacatctccgggcgcatgcagaaggtctcctactttcactgcaccctcatcggatactttgtaggcctgctcactgctactgtggcgtctcgcattcaccgggccgcccagcccgcccttctctatttggtgccatttactttattgccactcctcacgatggcctatttaaagggcgacctccggcggatgtggtctgagcctttccactccaagtccagcagctcccgattcctggaagtatgatggatcacgtggaaagtgaccagatggccgtcatagtccttttctctcaactcatggtttgtttcctcttagagctggcctggtactcagaaatgtacctgtgtttaaggaactgccgtgtgactggatttggcatttaaagggagctcgtttgcaggagagaggtgctggagccctgtttggttccttctcttcctgcggatgtagaggtggggccccttccaagagggacaggcctctccccagcgcgccttcctcccacgtttttatggatctgcaccagactgttaccttctgggggagatggagatttgactgtttaaaaactgaaaacagcgaggagtctttctagaacttttgaacactaaaaggatgaaaaaaattagcaaaccgaagtttcttcaatgacccctcgagaactttgggaccagtttcctataggggactcagtttcagagaactgagacagaagctcttctgtcgttatattcttctttcctttttttggatttattaaatattttctgtggtgtgaagtgacttattaaatccacagacattgagtgacttcttacaacatccacataagaatttgttgtaatgagttcatgtccacccagatgttgtgttggcagtgaacaagggcacggtttttatacatacgtacatatatatatataaacacacacatagatatatatgaataaacaaaaatgaaatcctgctaagatcacgctgtgtagctgacaggggcttgctgtcgttttgagcatgtcgagcagtttactgtggcttccttgtatatggataagctgctgtccttccccttcacaactgaccccgcagttacaaactagtatagcatttgtgctgattgatgatagactcatggacttcaggagcccttacttggttttgatcagtgtagcaaattagggatgaagagttcaaaccttttggccctttctttcttttctaggcttctccctcgcagggtgttccgtagtttcttctcgagccaatgcatgtattatagcagcaggtgtctttgtgctttctcatcatagtaacgtactacttgtaaatacatttttctattttctatttttttgtatttttttttttgacattttgtttcattggtgtgctgtatattttccatgccctcactcctttaagaaaaaaaaaaaggaaaaaagcaacacaatcctgtccttgctgttgtgattatagtcttggtttacctgtggtgacaaccgggtgttggggacacatgtcaaatgcccctctgagatgggccctaaattccagtaactggggaaagaaccagctgctgtgtcctgagagcctggccctgtgctgtggtctctgctgcaagcccagatttctgggagtaactagtgttaggtctgctgacctttacctaagcagcccctgcctggtaagaaggtgcccattgttcagaggcaaagagaagcctgcggttggcatgaggatgcctgacaacaaaggctggagaagggccctgagttccagcctctccccaagggtccccgccccagtggctgcctctgtcttgacctgtgtaatgaattagtgtgctgtgtcactgtggcttgaagtcactgtggatcgagctcacagggggcacccatcctgttgtcaacagagtctgaagcagtcagggtgttggattcctctgttgttgtcatcaattcctgctgaggggtttctggggttttgtttttaataaatgactcctttgtaaaaaaaaaaaaaaaaaaaaaaaaaaaaaa

SEQ ID NO: 879 - DNA, 5255 bp, HOMO SAPIENS
caatcgcgccctcccagcgccggggacgcggcgcccgcgctcccgcccgagcccggggaaacggagacaaggaggcgccgccgccccctccccgcggctgcgccccagccctgcgcccgcagcatgcccgccgccgggccgagcgccgccctcccccaggagctcgaggaggcgacgccgctgccggccgcgggaccgcggctgcgagggtagcggggccggagccgggccccccgaggcgccgcgcggcgggcggagagggaggaggagcaggcatcctccgcggcgcgcgggcggcggccctgctgcccggcgcgcccatggcccggccgcagggagaatgcaagctgctctccacgcgctcggcgtcccccggagccgctcgcgtcgccgccgccccctagccgccagcgctcggccgctggctgcgctaggacccgcggccgccggccgccgagcgcgggagggcaggcaggggcaggagccggagggcccggggcgcggcgcggcatgtagctgcgggctcccgcgtccgcgtgaggctgtcggcccggggccccgccatggctgggatggacagtggcaacctgaagaccgcgaggctgtggcgggacgccgccctgcgtgccaggaagctgcggagcaacctgcgccagctcacgcttaccgccgccggggcctgccccggggccggggccgacgcgctcgagtcccccgcctccccccagctcgtgctgccggccaacctcggggacattgaggcactgaacctggggaacaacggcctggaggaggtacccgaggggctggggtcggcgctgggcagcctgcgcgtcctggtcctgcgcaggaaccgcttcgcccggctgcccccggcggtggccgagctcggccaccacctcaccgagctggacgtgagccacaaccggctgaccgccctgggcgcggaggtggtgagtgctctgagggagctgcggaagctcaacctcagccacaaccagctgcccgccctgcccgcccagctgggcgctctcgctcacctggaggagctggatgtcagctttaaccggctggcgcacctgcctgactccctctcctgcctctcccgcctgcgcaccctggacgtggatcacaaccagctcactgccttcccccggcagctgctgcagctggtggccctggaggagctggacgtgtccagcaaccggctgcggggcctgcctgaggatatcagtgccctgcgtgccctcaagatcctctggctgagtggggccgagcttggcacgctgcccgccggcttctgcgagctggccagtttggagagcctcatgctagacaacaacgggctgcaggctctgcccgcccagttcagctgcctgcagcggctcaaaatgctcaacctctcctccaacctcttcgaggagttccctgccgcgctgctgcccctggctggtctggaggagctctaccttagtcgcaaccagctcacctcggtgccatcccttatctcgggcctgggccggcttctcaccttgtggctggataataaccgcatccgctacctgccggactccatcgtggagctgaccggcctggaggagctcgtgctgcaggggaaccagatcgcggtgctgcccgaccactttggccagctctcccgggtgggtttgtggaagatcaaagacaacccactgatccagcccccctacgaggtctgcatgaaggggatcccctacatcgcagcctaccagaaggaactggctcattcccagccggcggtgcagccccggctcaagctgctcctgatggggcataaggctgcaggaaagactttgctgcgccactgcctcaccgaggagagagtggagggatgcccaggaggaggggacaaggagaagtgctacccaccgtcacctccccctgtgagcaagggcatcgaggtgaccagctggacggccgatgcctcccggggcctgcggttcatcgtgtatgacttagctggggatgaaagttatgaggtgatccagcccttcttcctgtccccaggggccctatacgtgctggtggtcaacttggccacctatgagcctcgccactttcctaccaccgtgggctccttcttgcatcgggtcggggcgagagtgccccacgcggtggtgtgcatcgtgggcacccacgcagacctgtgcggagagcgtgagctggaggagaaatgtctggacattcaccgccagatcgccctgcaggagaagcacgacgcggagggactgagccgcttggccaaggtggtggacgaggcactggcccgggacttcgagctgcgctctgccagcccccacgcagcctactatggcgtttcggacaagaaccttcgacggcgcaaggcccattttcaatacctgctcaaccaccggctgcagatcctctcccccgtgttgcctgttagctgcagggacccgcgccacttacgacgccttcgggacaagttgctgtcagttgctgagcaccgagagatcttccccaacttacacagagtactgcctcgatcctggcaggtgctggaggaactgcatttccagccacctcaggcccagcgactgtggctaagctggtgggactcggcgcgcttgggcctgcaggcgggtctgaccgaggaccgactgcagagtgccctctcctacctgcatgagagcggcaagctactctactttgaggacagtccggctctcaaggagcacgtcttccacaacctcacccgcctcatcgacatcctcaatgtcttcttccagagggatccctctttgctgctgcataagctgctcctagggaccagtggagagggcaaggcggagggggaaagctccccgcccatggcgcggtccacccccagccaggaactgctccgggccacccagctccatcagtatgtggagggctttctgttgcatgggctcttgccagctcatgtcattcggttgctgcttaagcctcatgtccaggcccagcaggacttgcagctgttgctggagctgctggagaagatgggactctgttactgcctcaataaacccaagggcaagcctttgaatgggtccacagcttggtacaagttcccatgctatgtgcagaacgaggtgccccatgcagaagcctggattaatgggaccaacctagctgggcagtcttttgtggctgagcagttgcagattgaatatagctttccttttacttttccacttgggttgtttgcacgctacagtgtccagatcaacagccatgtggtgcacaggtcggatggtaaatttcagatctttgcctatagagggaaagttcctgtggttgtgagttacagacctgccaggggagtcctgcagccagacaccctgtccattgctagccatgcatcattaccaaatatatggaccgcatggcaagccataacccccttggtggaggaactgaatgtcctacttcaggaatggcctggactgcactacaccgtgcacattctctgttctaagtgccttaagagaggatcgcccaatccacatgcttttccaggggagttgctgagtcagcccagaccggaaggagtggcagagatcatttgccccaagaacggcagcgagcgagtaaatgttgccttggtttacccacccacgccgactgtgatcagcccctgttccaagaagaatgttggtgaaaagcacagaaaccagtgacgtttgtggctgtggaatttccatggagaaaagagagcatctgaacacctggaccatcttttgcacctggcagaccctctgcactcaccccagcgtgttctgtgaacttgagtgacaacgcgtgcttgcagggtgctttttggacgactggggaagaggtggggagggggtggtggggggaagcatggacgagaacatggagcaaatgttttacaacctgaacctcagaactgtgatcctccaaggagcgcgctacttgaagaaaagaaaaaaaaaaaaaaaaagtcgaatggcttctcagggattttgttttccgtgcacatataagccatagttacagtacaggtggcagtatttagagcactcagatttcagttctgttaaatgtgaaagagggatcgactgacgttcattgctgttccataactagtgtaaaatatgtatatgtttatctttatttttataatatgcaaatacatttaaatttatacagtttgaagcttctagcgttagttcacactgggtgcaatattctgcatgagaactgtgccaagatggggctgatttcttattttagtataagacttttttgttttttctttattctttaatcctcttcacattaaaaaaaaaatctctctgttagcccatggattaagtgttggttcatagagattgccaataatcagaaagaaccttaaatgtgcatttaagacagtgtcccttcccttcttttcaatgaaggtccctgcctatataaatcatctggcacgctggtgggaaatcctttgctcttccaacgtgttattagtgctgggcagagatggggcacactcaggggccaaagaggacaaaaagtccatgcaaaacttgagtcttttaatggcttaagataatcaggagtcagttctgaatcttacaaagtgctctgcttaataagtaccttacttagcagagcactttgcaaacatattacttattagcagagctctttgtagaccttccacatctggctgtcagatcttaaggttgtgaatttaggctccagttacattcactggagagcataatcccacacgggttatttataaatacagagcctctgattggacggtctcctgccaagaactagtaatacccttgttttaaaatcttcacaaggtaaaacttaaaaagccaaccaaacaaattgctctccattctacttttaattgggccaaacagcatatgctacagtagtaacatgtttttcggagagtgtaaaaaactctgtttacatttgcctcctccgtgggttgatcgaaaatgtataaaactgactgcttctcgccagcctcagacaagaagagtgagttgctggtactcgctactcttttacttcttttgtaaagtattgactcttggaaggctacagtatacaaagtctcaacatgttttttaaaagaaataaggagcaagcgactgccctgctagaaatcacaaaccgatttttgtagaatattttgtgccccaggcattaatttcactgactcc

SEQ ID NO: 880 - DNA, 3214 bp, HOMO SAPIENS
gtgctcgcgccaacccctacgccccagcgcgccttctccacccacgcacgggcctcggacgcatttccagccccggcgttggttgtggatgctggacatccaccgcctccaggcagtttcgccgtcacaccgtcgccatctgtagccaaagcaaaacatatcctaactgagactttgcagctcttgtggccactctgggctcaccgggaacatgagtggaagagcccgagtgaaggccagaggcatcgcccgcagccccagtgccacagaagtggggcgcatccaagcctcgccattgcctagatctgttgatcttagtaacaatgaagcatcctctagcaatggcttcttgggaacaagcaggatctcaaccaacgataaatatgggatatcttctggtgatgctggaagtaccttcatggaaagaggtgtgaaaaacaaacaggactttatggatttgagtatctgtaccagagaaaaattggcacatgtgagaaattgtaaaacaggttccagtggaatacctgtgaaactggttacaaacctctttaacttagattttccccaagactggcagctataccagtaccatgtgacatatattccagatttagcatctagaaggctgagaattgctttactttatagtcatagtgaactttccaacaaagcaaaagcattcgacggtgccatcctttttctgtcacaaaagctagaagaaaaggtcacagagttgtcaagtgaaactcaaagaggtgagactataaagatgactatcaccctgaagagggagctgccatcaagttctcccgtgtgcatccaggtcttcaatatcatcttcagaaagatcctcaaaaagttgtccatgtaccaaattggacggaacttctataatccttcagagccaatggaaattccccagcacaaattatccctttggcctgggtttgccatttctgtgtcatattttgaaaggaagctcctgtttagtgctgatgtgagttacaaagtcctccggaatgagacggttctggaattcatgactgctctctgtcaaagaactggcttgtcctgtttcacccagacgtgtgagaagcagctaatagggctcattgtccttacaagatacaataacagaacctactccattgatgacattgactggtcagtgaagcccacacacacctttcagaagcgggatggcaccgagatcacctatgtggattactacaagcagcagtatgatattactgtatcggacctgaatcagcccatgcttgttagtctgttaaagaagaagagaaatgacaacagtgaggctcagctcgcccacctgatacctgagctctgctttctaacagggctgactgaccaggcaacatctgatttccagctgatgaaggctgtggctgaaaagacacgtctcagtccttcaggccggcagcagcgcctggccaggcttgtggacaacatccagaggaataccaatgctcgctttgaactagagacctggggactgcattttggaagccagatatctctgactggccggattgtgccttcagaaaaaatattaatgcaagaccacatatgtcaacctgtgtctgctgctgactggtccaaggatattcgaacttgcaagattttaaatgcacagtctttgaatacctggttgattttatgtagcgacagaactgaatatgttgccgagagctttctgaactgcttgagaagagttgcaggttccatgggatttaatgtggactaccccaaaatcataaaagtacaagaaaatccagctgcatttgttagagctatacagcaatatgttgatcctgatgttcagctggtaatgtgcattctgccttctaatcagaagacctattatgattccattaaaaaatatttgagctcagactgcccagtcccaagccaatgtgtgcttgctcggaccttgaataaacagggcatgatgatgagtatcgccaccaagatcgctatgcagatgacttgcaagctcggaggcgagctgtgggctgtggaaatacctttaaagtccctgatggtggtcggtattgatgtctgtaaagatgcactcagcaaggacgtgatggttgttggatgcgtggccagtgttaaccccagaatcaccaggtggttttcccgctgtatccttcagagaacaatgactgatgttgcagattgcttgaaagttttcatgactggagcactcaacaaatggtacaagtacaatcatgatttgccagcacggataattgtgtaccgtgctggtgtaggggatggtcagctgaaaacacttattgaatatgaagtcccacagctgctgagcagtgtggcagaatccagctcaaataccagctcaagactgtcggtgattgtggtcaggaagaagtgcatgccacgattctttaccgaaatgaaccgcactgtacagaaccccccacttggcactgttgtggattcagaagcaacacgtaacgaatggtatgacttttatctgatcagccaggtggcctgccggggaactgttagtcctacctactataatgtcatctatgatgacaacggcttgaagcccgaccatatgcagagacttacattcaaattgtgccacctgtactacaactggccgggcatagtcagtgtcccagcaccatgtcagtatgctcacaagctgacctttctggtggcacaaagcattcataaagaacccagtctggaattagccaaccatctcttctacctgtgatggcatgaactactggcatcactagatggacaatccaagaagaaattggtatactttgtgcaaatctgccataagctcaaggctgtgactggggaaaaagattgagcttagttttcatgtctaggaaaaaaagcaaaacaacttaatctgaaacagttttaaaaaatgtgtgttattttgttttaaagagttgtatgcttggggtaaattttcattgtcatatgtggaatttaaatataccatcatctacaaagaattccacagagttaaatatcttaagttaaacacttaaaataagtgtttgcgtgatattttgatgacagataaacagagtctaattcccaccccaaattttgctgaggttttcttaatgttgtagagcattttgtagagtggtttaaatagttgaaaataaagttcagaacatcaaaaaaaaaaaaaaaa

SEQ ID NO: 881 - DNA, 286 bp, HOMO SAPIENS
  misc_feature (232)..(232): n is a, c, g, or t
tgagctactgctcctggcctatggatgccctttatcagtttcaggaattcccttctattcctaattggctgagaggtttattttcctttcatgaataggtattaaattttgtcaaatgctttttctgcatctattgagatggtgatatgggttttgtcttatagcctgttagtatagtaaattatattgattgattttaaaatattaagccaaccttgtattcctgggatgnaactaacttggtcatggtgcattattgtttgtatttactactgtattcattttg

SEQ ID NO: 882 - DNA, 6246 bp, HOMO SAPIENS
atcttgagtggaggaggagccgcggtcgccgccatgcggagaggcagggaaagagggaggaggcggcgggcgggcgaacgggcgagcgagggagggggcagaggagccgagttagctcagccaggcggcgacttcggcggcgccacgagagcgggcagcggaggagattgacgtgagtgaattcagatataactcaagcttgttagagggctttttaaaaataaaaagttgattccgtgcaagagagcaagttactgctgcttaccgttcagagacttacaggtgcttgcctgcattgcaataaaggactcatttattgagcaagacttatatttatctcttcattttggagagcctaataaactgttattacagtttctctactgactttcaaaagttttgaagtttgaaagacctttgcaattaaaacagcatgagcacggccagaacagagaaccctgttataatgggtctgtccagtcaaaatggtcagctgagaggccctgtgaaacccactggtggccctggaggagggggcacacagacacagcaacagatgaaccagctgaaaaacaccaacacaatcaataatggcactcagcagcaagcacagagtatgaccaccactattaaacctggtgatgactggaaaaagactttaaaactccctccaaaggatctaagaatcaaaacttcggatgtgacctccacaaaaggaaatgagtttgaagattactgtttgaaacgggagttactgatgggaatttttgaaatgggctgggaaaagccatctcctattcaggaggagagcattcccattgctttatctggtagggatatcttagctagagcaaaaaatggaacaggcaagagcggtgcctacctcattcccttacttgaacggctagacctgaagaaggacaatatacaagcaatggtgattgttcccactagagaacttgctctacaggtcagtcaaatttgcatccaggtcagcaaacacatgggaggggccaaagtgatggcaaccacaggaggaaccaatttacgagatgacataatgaggcttgatgatacagtgcacgtggtgattgctacccctgggagaatcctggatcttattaagaaaggagtagcaaaggttgatcatgtccagatgatagtattggatgaggcagataagttgctgtcacaggattttgtgcagataatggaggatattattctcacgctacctaaaaacaggcagattttactatattccgctactttccctcttagtgtacagaagttcatgaattcccatttgcagaaaccctatgagattaacctgatggaggaactaactctgaagggagtaacccagtactacgcatatgtaactgagcgccaaaaagtacactgcctcaacacacttttctccaggcttcagataaaccagtcgatcattttctgtaactcctctcagcgagttgaattgctagccaagaagatttctcaactgggttattcttgcttctatattcatgctaaaatgaggcaggaacatcgaaatcgtgtatttcatgatttccgaaatggcttatgccgcaatcttgtttgcactgatctgtttacccgaggtattgatatacaagctgtgaatgtggtaataaactttgatttcccaaagctggcagagacctatctccatcgtattggaagatcaggtcgctttggtcatcttggcttagccatcaacttgatcacatatgatgatcgcttcaacctgaaaagtattgaggagcagctgggaacagaaattaaacctattccgagcaacattgataagagcctgtatgtggcagaataccacagcgagcctgtagaagatgagaaaccttaacaagcatgctttgacaaattacaaaaggctcgtttggatctgtgacacatcgttttggggggaatgctcctctctttgtgggtttttcatcttttattttggaactatgaagacttaaaagagctcagacattttctttttttaactggtgaagagaaaaaggctgaaaagaaggaatataccttttttgttccacttgtttgcactgtgtgctgactgaacattagttgcactaactgctggtttttaaaaaatgttttctggggaaaggggacaaggaaggaaaagaaagaagagaaggggagaaaccctaaaaagagaagaatcttaatgaacacacaagcttgtcaatgatttcaaaattctccaacagctgactctcgtgcatttcaacttctccctgattcctcatccgttttttaagcctgaagagcttattacttatttgtgcgaagtgccttatgctatgagaccattcagaatatcatcttttagacacagcccgaggaatcaacaatagtaactctttctttccgtttttttttctttttcttttaaaaaatgtcttcttattttggtttcaggttgaagtctcttccctttctacccagtactcgagcccagggctagaagttgaaactcactagtaatgttaaacaccattttttttttctttttggggaggagttgatatgcaactgcagttcatccgcactgtaaatacatgtatttaaaaaaacaatcccaagtaaaaatttcttctgggctgagtagataaaaaacatcatcgctcccaaaggaaagagcagtctatcattgcaggagccatatgacaagcctttgtgctctatagcagacactaaagactgggttacatatgcctccagtagtagtatggcacttgatgtgtagacatgtcagagcttggccctctttcctctgtggcaaagcgtgtcccatagaaaattgggtgtgtatacttgtataactttgtaaataagttttttttctgggttcatatatatatatatatatacatatatatatatttttttttggatgaaggttgctgggattaaggggattagagtgattatgggagcagctaaagatgagaggggctcagttttacgcaacactaaattctagaaagtactttggcctcgtgctgtagagagcagatttctatggtaccctgtgttagtaaaggggcccagaaatctgggatgtactgtttgctgccacactgtctcatctagtacctttggagtaggtttaccagagagagcaaggaagcttcaaaacattgataattcaacatttattttgagaagctctgattttgcttcttccccctttctaaaagtttgaggaatatttcaagctctgcaacagggggcaaagattaatctaccttgcagtgtaggaattctattgagtggcagtgtcattgagcagtatatatataaagcacagatttgcatttcagaatattagccagtaccagctttggtaatgttagcagttctggagcttaattttctgtggatcatttcctgtagtgtgtaaatgtgttgccctctgcccgctttgatacataaacttttgcaggaatgggcaacctgagagctgttaactttcatgctacagaaagctgcttgccattctcttgcattgtgacaagaattgttacctgtcattttgcactgtaaattgctggcagatgctttacagtcaatagtgttgctttaaattgtgcccctcccaacatgcttgatgtttggcctgatctccaggcaaaaggagtgagatgaatcaaaaccagtgaacttttttttttaatgtttttaattcccttttaacccagtgtactaggtcaatcaggaggcatctggaaagggggggaaaaaagcaaaaaacaaaattaaaaaaaattgatttccatattttatttttcaaaaccctaaaatattacaaaataagtcccgcatatactttaatgttttaactcttttggacaaaggaatcaattacttgaagttgcttttttgactctgcctacttctgagcaaactatttgcgactcacccacaattgccttggagatcaaaatcctacagatgcctcctgatgggacatagccctaactccttaacaactgtagcaagaactgcacggtacaaacccaaaaaagaacaagctcatctatttggaacccaagcctcatattttctgtccagtcaatgttggttactaaatagaaaacctaattaaggaagtaacttttttccagggaggggtgggagagggaatttaaaaggtgtcaacttttgaccaaaaaaattgtgcccttgtaccgatgcagctctctttctcccccacctcttgcgagataagagggatcattcatgtagaagaaaagagtataaatgcaattctgtatctcgctagagaacgtgtgggtgactaaacaaaaagtgcagtctccttcaccaactttagactgcgtggtgccacatgcctgtgggtccctcttaaagcacagacttaaaatggaaagtattactgaagtatagcctctaatgaggagtggcacttaaactatctgggacaccactactggacacggtcttgtagaggcagctgtccagttttggtgcttgactcttgaataggaattgttaaatggaaagatgctctgaggactaggtcaaagcctggtctttttttttttttttttttttttctttcttttttgggccctcataataagcattgttactattggaagttgttttcacattctttccaatattaaatatgtatttttttaagtaatgataatattttccagtggctcatttggatgagaactaccctctatttttaatattaaaactacatccaactcatcatttagcctttggttgtacagttgtgtaatgggctatggactgttacacaccttaccacctctaggcctatgttttttctttccccatatattctgatggggataaatactgttttgcctctcccataggaatggaatacatttattctaaaatgatctttcacagaagtaagagagagggaaacctaaatatacctctaaattgtttgaagttggtcccagcagcataaaatgggttggccccaaagggttggagggtgggcttggttatcagtatttgttttcagaatgagatgggagcatctttcctttgccacgtgctttgtgcttgataacatcatgcttggttcaaacgacaactcagcacaaagccttgagtataaattgttggaatcaaaacatctcattctgatgacgtggtttaattttttaatttttttttttaataggggtgggagggagggtactttgccccagaagggagggtgtctgcactaaggatttagaaacactttggaagctcataacctcatcagaaactgcctttagccacactcctgaccttctagatgagtaacaaaaaaatgaaataagttcttggaaattaagccatttattttaatttgctatttttttcaatgttctaggtatctttaaatttgttattgtggaatcattttcctgccagatacctttatcaaaattattggcctcatgagagctgaagtaagtcagctttttggtgaactttagtggacttctgtgagattgtagttgtactttgtatctctaaatctaaagatagttttttaaaactcccaaagaaaatctgctctcctttctgatctaaaaactcatctttggggtaaagagttaagtgtccaaaggttgtcacagttcatgaggtcagagggagctagcctggcacctggactctgcccatccacagctgacagattccaacagaagtgtatttaaattctccagtagacaatgctgggtaagggagggggtagggctgggttattaagatacaggctgctgtattttacattggttgtgtgggaaggggagcctggagaaaacaaagtcactattcccttttttgaaacaggaaaaaaaattattttttgttcagtaaaaatggtagagaattccaatgtccctagccacaagggaccagttccactgagaagtgaacagtgggaactcaaaatttcagaaacattgggggaagggaaaattggctttctcttaattggcagatgttccagtggggggggggggggctctgtttttgttgggatgtgttatgttgtatgtacgcatatatggaccggagtctgctgagtttataaggttccaaaaatatggtaaaatcttggtttttgttaatttatctcaataaaagcccactggaactccaaaaaaaaaaaaaaaaaaaaaa

SEQ ID NO: 883 - DNA, 2757 bp, HOMO SAPIENS; identical to SEQ ID NO: 594

SEQ ID NO: 884 - DNA, 7218 bp, HOMO SAPIENS
gccccgcatcgtgcccggccccgtcgcggagatcccggacgaccgtcgcgggttgatggtcgcattccagatgtaaacagcttcagaagcctgacggtcatatggtagaatcactgtggactgagacccacctttctagacctgaagcccaggaggaggaagaggaggctggttggtaccatgggcataatgctctgaatcctagtctctcacctagtatgtgagcagtccctgcagatggcccatttggagatcttgacaaagcctcttctgtttccaatggggtttttggcgcattctcacagacttagatgaaactgtgatggccaccgcagggggcaggtgctgacatcgtccccagccctgtggctgttcatccggacatcatttccaacctcaatatctaaatgccacagtgctcttggagcaagttgggctggggaccactgttgccttttaagaccataaaaccatgggaaacgcagaaagtcaacatgtagagcacgagttttatggagaaaagcatgccagcctggggcgcaagcacacttcccgctccctgcgcctctcgcacaagacgcggaggaccaggcacgcttcctcggggaaggtgatccacaggaactccgaagtgagcacccgatccagcagcacccccagcatcccccagtccctggctgaaaatggcctggagcccttctcccaagatggtaccctagaagacttcgggagccccatctgggtggaccgagtggacatgggcttgagacctgtgtcttacactgactcttctgtcactcccagcgtagacagcagcatcgtcctcacagcagcctctgtgcagagcatgccagacactgaggagagcaggctttacggggatgacgctacatatttggctgagggaggcaggaggcagcattcctatacatccaatgggcccactttcatggagacggcgagctttaagaagaaacgctccaaatctgcagacatctggcgggaggacagcctggaattctcactctctgatctgagccaagaacatttaacaagcaacgaagaaatcttgggttccgccgaagagaaggactgcgaggaggctcgggggatggaaacgcgggcgagtccgcggcagctcagcacctgtcagagagccaattccttgggtgacttgtatgctcagaaaaactctggagtgacagcaaacggggggccggggagcaaatttgcaggctactgtcggaatttggtgtctgatattcccaatcttgcaaaccataagatgccaccagctgctgctgaagagactcctccgtacagtaattataacacacttccctgtaggaaatctcactgtctctctgaaggtgccaccaacccacaaattagccatagcaacagcatgcaaggcagaagagctaaaacaactcaggatgttaatgcaggcgagggcagtgagtttgcagacagtgggattgaaggggccactaccgacacggacctcctgtccaggcgatctaatgccaccaactccagctactcacccaccacaggccgggcctttgtgggcagcgacagcggcagcagctccaccggggatgcggctcgtcagggggtgtacgagaacttccggcgggagctggagatgagcaccaccaacagcgagagcctggaggaggccggctcggcgcacagcgatgagcagagcagcggcaccctgagctctccgggccagtcggacatcctgctgaccgccgcacagggcacggtgcgcaaggccggcgccctggccgtcaagaacttcctggtgcacaagaagaacaagaaggtggagtcagccacccggaggaagtggaagcactactgggtgtccctgaaaggatgcacgctatttttctacgagagcgacggcaggtctgggatagaccacaacagcatccccaaacacgccgtctgggtggagaacagcattgtgcaggcggtgcctgagcaccccaagaaggactttgtcttctgcctcagcaattccctgggtgatgccttcctttttcagaccactagccagacggagcttgaaaactggatcaccgccatccactctgcctgcgccactgcggtcgcgaggcaccaccacaaggaagacacgctccgactcctgaaatcagagatcaaaaaactggaacagaagattgacatggatgaaaagatgaagaaaatgggtgaaatgcagctgtcttcagtcactgactcaaagaaaaagaaaacaatattagatcagatctttgtctgggagcaaaatctcgagcagttccaaatggacctgtttcgtttccgctgttatttagccagccttcagggtggggagctgccaaaccccaaaaggcttctcgcttttgcaagtcgaccaacgaaagtggccatgggccgccttggaatcttttcggtatcatcgtttcatgccctggtggcagcacgcactggtgaaactggagtgagaagacgtactcaggccatgtccagatccgcgagcaagcgaaggagcaggttttcttctctgtggggtctggatactacctccaaaaagaagcagggacggccaagcatcaatcaggtgtttggagagggaaccgaagctgtaaagaaatctttagagggaatatttgatgacattgttccagatggcaagagggagaaagaagtggtcttacctaacgttcaccagcacaaccctgactgcgacatttgggtccacgagtatttcactccatcctggttctgtctgcccaataatcagcctgccctgacggtcgtccggccaggcgacactgcacgggacaccctggagctgatttgcaagacacatcaactggatcattctgctcattacctgcgcctgaaatttctaatagaaaacaaaatgcagctctatgttccacagcccgaggaagacatctatgagctgctgtacaaagaaattgaaatctgtccaaaagtcactcagagcatccacattgagaagtcagatacagctgctgatacttacgggttttcactttcttctgtggaagaagatggtattcgaaggctgtacgtgaatagtgtgaaggaaaccggtttagcttccaagaaaggcctgaaagcaggagatgagattcttgagatcaataatcgtgctgctgacgccctgaactcttctatgctcaaagatttcctctcacagccctcgctgggcctcctggtgaggacctaccccgagctggaggaaggagtggagctgctggaaagcccgccccaccgagtggacggccctgccgaccttggcgagagccccctcgcctttctcaccagcaacccagggcacagcctttgcagcgagcagggcagcagtgctgagaccgctccagaggagaccgaggggccagacttggaatcctcagatgagactgatcacagcagcaagagtacagaacaggtggccgcattttgccgcagtttgcatgagatgaacccctctgaccagagcccatctcctcaggactccacggggcctcagctggcgaccatgagacaactctcggatgcagataagctgcgcaaggtgatctgcgagctcctggagacggagcgcacctacgtgaaggatttaaactgtcttatggagagatacctaaagcctcttcaaaaagaaacttttctcacccaggatgagcttgacgtgctttttggaaatttaacggaaatggtagagtttcaagtagaattccttaaaactctagaagatggagtgagactggtacctgatttggaaaagcttgagaaggttgatcaatttaagaaagtgctgttctctctggggggatcattcctgtattatgctgaccgcttcaagctctacagtgccttctgcgccagccacacaaaagttcccaaggtcctggtgaaagccaagacagacacggctttcaaggcattcttggatgcccagaacccgaagcagcagcactcatccacgctggagtcgtacctcatcaagcccatccagaggatcctcaagtacccacttctgctcagggagctgttcgccctgaccgatgcggagagcgaggagcactaccacctggacgtggccatcaagaccatgaacaaggttgccagtcacatcaatgagatgcagaaaatccatgaagagtttggggctgtgtttgaccagctgattgctgaacagactggtgagaaaaaagaggttgcagatctgagcatgggagacctgcttttgcacactaccgtgatctggctgaacccgccggcctcgctgggcaagtggaaaaaggaaccagagttggcagcattcgtcttcaaaactgctgtggtccttgtgtataaagatggttccaaacagaagaagaaacttgtaggatctcacaggctttccatttatgaggactgggaccccttcagatttcgacacatgatccccacggaagcgctgcaggttcgagctttggcgagtgcagatgcagaggcaaatgccgtgtgtgaaattgtccatgtaaaatccgagtctgaagggaggccggagagggtctttcacttgtgctgcagctccccagagagccgaaaggatttcctaaaggctgtgcattcaatcctgcgtgataagcacagaagacagctcctcaaaaccgagagccttccctcatcccagcaatatgtcccttttggaggcaaaagattgtgtgcactgaagggggccaggccggccatgagcagggcagtgtctgccccaagcaagtctcttgggaggaggaggcggcggctggctcgaaacaggtttaccattgattctgatgccgtctccgcaagcagcccggagaaagagtcccagcagccccccggtggtggggacactgaccgatgggtagaggagcagtttgatcttgctcagtatgaggagcaagatgacatcaaggagacagacatcctcagtgacgatgatgagttctgtgagtccgtgaagggtgcctcagtggacagagacctgcaggagcggcttcaggccacctccatcagtcagcgggaaagaggccggaaaaccctggatagtcacgcgtcccgcatggcacagctcaagaagcaagctgccctgtcggggatcaatggaggcctggagagcgcaagcgaggaagtcatttgggttaggcgtgaagactttgccccctccaggaaactgaacactgagatctgactgcgtcacctgccccgtagagaatgtgtgtagatacttcctgccctaactctgcccaccctcctgtaccgtcgacaagaatgtccccttaggtcgcgctcttgcacacacggttttggcagctgacttggttctgaagccatgtagccacccaactttgtcattttcaacaacatcagaaagaattgatcagaatcccaaataagcttgagtcctatcttctgtatattactaagggcttttatttattctcaataaatcagggcctgaacaattaaaagaaaaaagattctatagcactggaaagcaaatcaccccaggagttaacggatgtacaacagattaatttaagggatagtagcacacacacgatccttctatctgaaatcagtctcctagctggggaaacctctttcacacacaaaatgaaatgtgtacagcttgccgtgttctgactgtacccttccctcttccatgtctgagaatctccgtgtattttaagaatgtgtgaggagagggtggcgattcatgtttcaatgagcctctttttttttttccttcctgttttggtctatggctggtcttactctgtgtccatgttcggaagctctagttttgcatagaattatagagatgccaaactctttgaaaagagatccaaatttatcgcttgagagaaagaaaagaaacactattttttgtattttacctgagatacaggggcacaaatagatgagaattttacagtgttagtgtatgtatccctgagcctaaaaaatgaggatataaccttttacagagagagtgaggcgtggtggttttatatttatatatgaaaggccagcaagctcatgcgaaggatatacttttcttccaaaaagcggattttttttttttaatgtttgaatctatatttgagatgggagtttggttggattaaacatgacaccccggtgggcggtgtgtgtgtctgttgcacatggcagggaggggagcctccttctcatggggttgccatggtgatcattggtttttccatcaaaattgcatcttcatccatagattaccttccccttccctgacagtccataaccaaacctttaaacagaacaacctctttaaaaacttctcttgtgtttaacactttcttcatgccaacgaaacagggtaaacatgctcaaaacattaacagtctaaacagatatccaaatactaagaagaaaaacaagttatagcactttcaattttttttttttttttaaaaaaaggtttatagctttttcttttcccatgtcacaatgtccacttcctaagaagggtttaaaatactatgaaaactttctttttggggaaaatatctatttggtgtttgacacatcagtaggtactttaaagacctgaattttatagtagctttaggagttatattttataaaaatcagttatgactttatatttccagacaatagagagttcagtacatcatgctcttgtgcctctgcctgcttttcctgcgttcccaccctgtattccccccgcctttcgggtttccagggcttcgagcttgatcttttgaaagttttattctattaaatttttgctatatcttctggttttctgaaaaagctttagaatggtttctataccctttgtatcactgcatttttccatatcatctccggttcgatcgcgtccagatggaaaacggaagcagaggcttctaatcgtcgcatttactggctccagtgcaacacatccatctgaaaacactcggaagtctggtgcttggagagggtgccattgtctcttgtacataaggtcatgacgtgtctatgtcaaaagttcttatatatttcttttataagctgaaagaaggtctatttttatgtttttaggtctatgaatggaacgttgtaaatgcttgtcaaacaataaaaataacgaaaagtgaaaaaaaaaaaaaaaaaaaa

SEQ ID NO: 885 - DNA, 1512 bp, HOMO SAPIENS
cgccctttcctgccagacctggaggggcggggcggtgccggcaagatggctgcgcccgagaagatgacgtttcccgagaaaccaagccacaaaaagtacagggccgccctgaagaaggagaaacgaaagaaacgtcggcaggaacttgctcgactgagagactcaggactctcacagaaggaggaagaggaggacacttttattgaagaacaacaactagaagaagagaagctattggaaagagagaggcaaagattacatgaggagtggttgctaagagagcagaaggcacaagaagaattcagaataaagaaggaaaaggaagaggcggctaaaaaacggcaagaagaacaagagagaaagttaaaggaacaatgggaagaacagcagaggaaagagagagaagaggaggagcagaaacgacaggagaagaaagaaaaagaggaagctttgcagaagatgctggatcaggctgaaaatgagttggaaaatggtaccacatggcaaaacccagaaccacccgtggatttcagagtaatggagaaggatcgagctaattgtcccttctacagtaaaacaggagcttgcagatttggagatagatgttcacgtaaacataatttcccaacatccagtcctacccttcttattaagagcatgtttacgacgtttggaatggagcagtgcaggagggatgactatgaccctgacgcaagcctggagtacagcgaggaagaaacctaccaacagttcctagacttctatgaggatgtgttgcccgagttcaagaacgtggggaaagtgattcagttcaaggtcagctgcaatttggaacctcacctgaggggcaatgtatatgttcagtaccagtcggaagaagaatgccaagcagccctttctctgtttaacggacgatggtatgcaggacgacagctgcagtgtgaattctgccccgtgacccggtggaaaatggcgatttgtggtttatttgaaatacaacaatgtccaagaggaaagcactgcaactttcttcatgtgttcagaaatcccaacaatgaattctgggaagctaatagagacatctacttgtctccagatcggactggctcctcctttgggaagaactccgaaaggagggagaggatgggccaccacgacgactactacagcaggctgcggggaaggagaaaccctagtccagaccactcctacaaaagaaatggggaatccgagaggaaaagtagtcgtcacagggggaagaaatctcacaaacgcacatcaaagagtcgggagaggcacaattcacgaagcagaggaagaaatagggaccgcagcagggaccgcagccggggccggggcagccggagccggagccggagccggagccgcaggagccgccgcagccggagccaaagttcctctaggtcccgaagtcgtggcaggaggaggtcgggtaatagagacagaactgttcagagtcccaaatccaaataaactagttttgttcttaaa

SEQ ID NO: 886 - DNA, 3385 bp, HOMO SAPIENS
gctctggtgctgcggctccgctctcgtcgcaacgagatctttcgagatcttctccgcccccgctaccggcgcctcctctgcggccactgagccggagccggcctgagcagcgctctcggttgcagtacccactggaaggacttaggcgctcgcgtggacaccgcaagcccctcagtagcctcggcccaagaggcctgctttccactcgctagccccgccgggggtccgtgtcctgtctcggtggccggacccgggcccgagcccgagcagtagccggcgccatgtcggtggtgggcatagacctgggcttccagagctgctacgtcgctgtggcccgcgccggcggcatcgagactatcgctaatgagtatagcgaccgctgcacgccggcttgcatttcttttggtcctaagaatcgttcaattggagcagcagctaaaagccaggtaatttctaatgcaaagaacacagtccaaggatttaaaagattccatggccgagcattctctgatccatttgtggaggcagaaaaatctaaccttgcatatgatattgtgcagttgcctacaggattaacaggtataaaggtgacatatatggaggaagagcgaaattttaccactgagcaagtgactgccatgcttttgtccaaactgaaggagacagccgaaagtgttcttaagaagcctgtagttgactgtgttgtttcggttccttgtttctatactgatgcagaaagacgatcagtgatggatgcaacacagattgctggtcttaattgcttgcgattaatgaatgaaaccactgcagttgctcttgcatatggaatctataagcaggatcttcctgccttagaagagaaaccaagaaatgtagtttttgtagacatgggccactctgcttatcaagtttctgtatgtgcatttaatagaggaaaactgaaagttctggccactgcatttgacacgacattgggaggtagaaaatttgatgaagtgttagtaaatcacttctgtgaagaatttgggaagaaatacaagctagacattaagtccaaaatccgtgcattattacgactctctcaggagtgtgagaaactcaagaaattgatgagtgcaaatgcttcagatctccctttgagcattgaatgttttatgaatgatgttgatgtatctggaactatgaatagaggcaaatttctggagatgtgcaatgatctcttagctagagtggagccaccacttcgtagtgttttggaacaaaccaagttaaagaaagaagatatttatgcagtggagatagttggtggtgctacacgaatccctgcggtaaaagagaagatcagcaaatttttcggtaaagaacttagtacaacattaaatgctgatgaagctgtcactcgaggctgtgcattgcagtgtgccatcttatcgcctgctttcaaagtcagagaattttctatcactgatgtagtaccatatccaatatctctgagatggaattctccagctgaagaagggtcaagtgactgtgaagtcttttccaaaaatcatgctgctcctttctctaaagttcttacattttatagaaaggaacctttcactcttgaggcctactacagctctcctcaggatttgccctatccagatcctgctatagctcagttttcagttcagaaagtcactcctcagtctgatggctccagttcaaaagtgaaagtcaaagttcgagtaaatgtccatggcattttcagtgtgtccagtgcatctttagtggaggttcacaagtctgaggaaaatgaggagccaatggaaacagatcagaatgcaaaggaggaagagaagatgcaagtggaccaggaggaaccacatgttgaagagcaacagcagcagacaccagcagaaaataaggcagagtctgaagaaatggagacctctcaagctggatccaaggataaaaagatggaccaaccaccccaagccaagaaggcaaaagtgaagaccagtactgtggacctgccaatcgagaatcagctattatggcagatagacagagagatgctcaacttgtacattgaaaatgagggtaagatgatcatgcaggataaactggagaaggagcggaatgatgctaagaacgcagtggaggaatatgtgtatgaaatgagagacaagcttagtggtgaatatgagaagtttgtgagtgaagatgatcgtaacagttttactttgaaactggaagatactgaaaattggttgtatgaggatggagaagaccagccaaagcaagtttatgttgataagttggctgaattaaaaaatctaggtcaacctattaagatacgtttccaggaatctgaagaacgaccaaaattatttgaagaactagggaaacagatccaacagtatatgaaaataatcagctctttcaaaaacaaggaggaccagtatgatcatttggatgctgctgacatgacaaaggtagaaaaaagcacaaatgaagcaatggagtggatgaataacaagctaaatctgcagaacaagcagagtttgaccatggatccagttgtcaagtcaaaagagattgaagctaaaattaaggagctgacaagtacttgtagccctataatttcaaagcccaaacccaaagtggaacctccaaaagaggaacaaaaaaatgcagagcagaatggaccagtggatggacaaggagacaacccaggcccccaggctgctgagcagggtacagacacagctgtgccttcggattcagacaagaagcttcctgaaatggacattgattgattccaacacttgtttctattaaaacagactattataaagctttaagttgtcaactttgttctaaatatcaactagcgcaagtgaatactgaagatttcttagtcagtttttaggggattttcggggaggggaaataggtaatgtatggagcattttcacttctaaatagttagatacagaaattaagtgcattgtatctttttcataatggtactatttagaagcccagttagtcttactgagcttatgcttcactcctttatgtttaaccatgtgtctacaagaataagtttgttttggaaagttgagctatagctacagctctagctatccagcagacttttcattatgacttacatggcaggagctctaattatgctttaaaaatctgttgtggagattgctttaaatgctccctgcctggtgtggggatggggtccccctctttgtgagggctggagcatggcacggcatggattaacacggcagaggaacaaaggtgtgctctgagcttcttcatatttcaccttcaccctcacctgtgttctcttccctctctcccaataaaagggctcccatta

SEQ ID NO: 887 - DNA, 2970 bp, HOMO SAPIENS
gttttaaacgcgcagccgagggccgcgcgcaggagtagggagggcctagggcggcggagccgactcgtcgcggccgaggcgcgcgcggtccgtgccggcgtcagtctgggattggccggcccgcgacttcctccgccccctgccaatcgccggggacgacttccgtgggtttttccggctcccccgcgtcgctaaggagcgacgggctgtcggccagaccccgagttctcggtgcgctcagcggccgccgacgctaggaggccgcgctccgcccccgctaccatgaggccccggaaagccttcctgctcctgctgctcttggggctggtgcagctgctggccgtggcgggtgccgagggcccggacgaggattcttctaacagagaaaatgccattgaggatgaagaggaggaggaggaggaagatgatgatgaggaagaagacgacttggaagttaaggaagaaaatggagtcttggtcctaaatgatgcaaactttgataattttgtggctgacaaagacacagtgctgctggagttttatgctccatggtgtggacattgcaagcagtttgctccggaatatgaaaaaattgccaacatattaaaggataaagatcctcccattcctgttgccaagatcgatgcaacctcagcgtctgtgctggccagcaggtttgatgtgagtggctaccccaccatcaagatccttaagaaggggcaggctgtagactacgagggctccagaacccaggaagaaattgttgccaaggtcagagaagtctcccagcccgactggacgcctccaccagaagtcacgcttgtgttgaccaaagagaactttgatgaagttgtgaatgatgcagatatcattctggtggagttttatgccccatggtgtggacactgcaagaaacttgcccccgagtatgagaaggccgccaaggagctcagcaagcgttctcctccaattcccctggcaaaggtcgacgccaccgcagaaacagacctggccaagaggtttgatgtctctggctatcccaccctgaaaattttccgcaaaggaaggccttatgactacaacggcccacgagaaaaatatggaatcgttgattacatgatcgagcagtccgggcctccctccaaggagattctgaccctgaagcaggtccaggagttcctgaaggatggagacgatgtcatcatcatcggggtctttaagggggagagtgacccagcctaccagcaataccaggatgccgctaacaacctgagagaagattacaaatttcaccacactttcagcacagaaatagcaaagttcttgaaagtctcccaggggcagttggttgtaatgcagcctgagaaattccagtccaagtatgagccccggagccacatgatggacgtccagggctccacccaggactcggccatcaaggacttcgtgctgaagtacgccctgcccctggttggccaccgcaaggtgtcaaacgatgctaagcgctacaccaggcgccccctggtggtcgtctactacagtgtggacttcagctttgattacagagctgcaactcagttttggcggagcaaagtcctagaggtggccaaggacttccctgagtacacctttgccattgcggacgaagaggactatgctggggaggtgaaggacctggggctcagcgagagtggggaggatgtcaatgccgccatcctggacgagagtgggaagaagttcgccatggagccagaggagtttgactctgacaccctccgcgagtttgtcactgctttcaaaaaaggaaaactgaagccagtcatcaaatcccagccagtgcccaagaacaacaagggacccgtcaaggtcgtggtgggaaagacctttgactccattgtgatggaccccaagaaggacgtcctcatcgagttctacgcgccatggtgcgggcactgcaagcagctagagcccgtgtacaacagcctggccaagaagtacaagggccaaaagggcctggtcatcgccaagatggacgccactgccaacgacgtccccagcgaccgctataaggtggagggcttccccaccatctacttcgcccccagtggggacaaaaagaacccagttaaatttgagggtggagacagagatctggagcatttgagcaagtttatagaagaacatgccacaaaactgagcaggaccaaggaagagctttgaaggcctgaggtctgcggaaggtgggaggaggcagacgccctgcgtggcccatggtcggggcgtccacgccgaggccggcaacaaacgacagtatctcggattcctttttttttttttttaattttttatactttggtgtttcacttcatgctctgaatactgaataaccatgaatgactgaatagtttagtccagatttttacagaggatacatctatttttatcattatttggggtttgaaaaatttttttttacaccttctaatttctttatttctcaaagcagataattcttctgtgtgaaaatgttttctttttttaatttaaggtttaaaattccttttccaaatcatgttgattttgctctttgctttttcgttgtctgagaaattgttggcgtagatttggcttctggtatgtgtttctgattgcttcctgttgagcacaaagtgagagctgccactgagcagccctgccaggggtgctgtttcaggctgggcatcgccaggcggcctccctgcaaaccaagggctgggggcaaaggggcatgatccagggtcccccagggtgggctcagctccagggagaggccacccacgtggcagccccacctcttgagagcccccagtgccggagcagaaaggaccctggacccagaggcagatactgcggggtggtagaaaaggtagagtaggctgtggcaatggaataaaacacgattaaaaacgttaaaaaaaaaaaaaaaaaaaa

SEQ ID NO: 888 - DNA, 1109 bp, HOMO SAPIENS
ggctggattcccgtcgtaacttaaagggaaattttcacaatgtccggagcccttgatgtcctgcaaatgaaggaggaggatgtccttaagttccttgcagcaggaacccacttaggtggcaccaatcttgacttccagatggaacagtacatctataaaaggaaaagtgatggcatctatatcataaatctcaagaggacctgggagaagcttctgctggcagctcgtgcaattgttgccattgaaaaccctgctgatgtcagtgttatatcctccaggaatactggccagagggctgtgctgaagtttgctgctgccactggagccactccaattgctggccgcttcactcctggaaccttcactaaccagatccaggcagccttccgggagccacggcttcttgtggttactgaccccagggctgaccaccagcctctcacggaggcatcttatgttaacctacctaccattgcgctgtgtaacacagattctcctctgcgctatgtggacattgccatcccatgcaacaacaagggagctcactcagtgggtttgatgtggtggatgctggctcgggaagttctgcgcatgcgtggcaccatttcccgtgaacacccatgggaggtcatgcctgatctgtacttctacagagatcctgaagagattgaaaaagaagagcaggctgctgctgagaaggcagtgaccaaggaggaatttcagggtgaatggactgctcccgctcctgagttcactgctactcagcctgaggttgcagactggtctgaaggtgtacaggtgccctctgtgcctattcagcaattccctactgaagactggagcgctcagcctgccacggaagactggtctgcagctcccactgctcaggccactgaatgggtaggagcaaccactgactggtcttaagctgttcttgcataggctcttaagcagcatggaaaaatggttgatggaaaataaacatcagtttctaaaagttgtcttcatttagtttgctttttactccagatcagaatacctgggattgcatatcaaagcataataataaatacatgtctcgacatgagttgtacttctaaaaaaaaaaa

SEQ ID NO: 889 - DNA, 7190 bp, HOMO SAPIENS
cttttagtttctcttctttctaaagaaggctcgcggagcccggctggagaacctcaccctcgccgagcctagaaccgagagggggccaccccaggcggtcaccagcagatttgcccgcgcgttctctttctttccacccagttgcccttgcggccggctgtaaacctgccactaggacccggtcggtgagatctagcctcttgacctgagagccgagagtggatcgctgggctgggctaacggcgacggagagcgcgccctcgctgactccgggcgcgcccagcagtagcaccgcccgcgcccgcccctggacacttgtaagtttcgatttccgatttccgcggaaccgagtcccgcgccgcggcagagccagcacagccagcgcgccatggcggacccggaggtgtgctgcttcatcaccaaaatcctgtgcgcccacgggggccgcatggccctggacgcgctgctccaggagatcgcgctgtctgagccgcagctctgtgaggtgctgcaggtggccgggcccgaccgctttgtggtgttggagaccggcggcgaggccgggatcacccgatcggtggtggccaccactcgagcccgggtctgccgtcgcaagtactgccagagaccctgcgataacctgcatctctgcaaactcaacttgctgggccggtgcaactattcgcagtccgagcggaatttatgcaaatattctcatgaggttctctcagaagagaacttcaaagtcctgaaaaatcacgaactctctggactgaacaaagaggaattagcagtgctcctcctccaaagtgatcctttttttatgcccgagatatgcaaaagttataagggagagggtcggcagcagatttgtaaccagcagccaccgtgttcaagactccacatctgtgaccacttcacccgagggaactgtcgttttcccaactgcctccggtcccataacctgatggacagaaaggtgctggccatcatgagggagcacgggctgaaccccgacgtggtccagaacatccaggacatctgcaacagcaagcacatgcagaagaatcccccagggcccagagctccttcttcacatcgtagaaacatggcatatagggctagaagcaagagtagagatcggttctttcagggcagccaagaatttcttgcgtctgcttcagcgtctgctgagaggtcctgcacacctagtccagatcagatcagccacagggcttccctggaggacgcgcctgtggacgatctcacccgcaagttcacgtatctggggagtcaggatcgcgctcggcctccctcaggctcgtccaaggctactgatcttggaggaacaagtcaggccgggacaagccagaggtttttagagaacggcagtcaagaggacctcttgcatggaaatccaggcagcacttaccttgcttccaattcaacatcagcccccaactggaagagcctcacatcctggacgaatgaccaaggcgccaggagaaagactgtgttttctcccacgctacctgccgcccgctcttctcttggctctctgcaaacacctgaagctgtgaccaccagaaagggcacaggcttgctttcctcagactacaggatcatcaatggcaaaagtggaactcaggacatccagcctggccctctttttaataataatgctgatggagtggccacagatataacttctaccagatccttaaattacaaaagcactagcagcggtcacagagaaatatcatcacctaggattcaggatgctggacctgcttcccgagatgtccaggccactggcagaatcgcagatgatgctgacccaagagtagcacttgttaacgattctttatctgatgtcacaagtaccacatcttctagggtggatgatcatgactcagaggaaatttgtcttgaccatctgtgtaagggttgtccgcttaatggtagctgcagcaaagtccacttccatctgccttaccggtggcagatgcttattggtaaaacctggacggactttgagcacatggagacgatcgagaaaggctactgtaaccccggaatccacctctgttctgtaggaagttatacaatcaattttcgggtaatgagttgtgattcctttcccatccgacgcctctccactccttcttctgtcaccaagccagccaattctgtcttcaccaccaaatggatttggtattggaagaatgaatctggcacatggattcagtatggagaagagaaagacaaacggaaaaattcaaacgtcgactcttcatacctggagtctctctatcaatcctgtccgaggggagttgtgccatttcaggcgggctcacggaactatgagctgagtttccaagggatgattcagacaaacatagcttccaaaactcaaaaggatgtcatcagaagaccaacatttgtgcctcagtggtatgtgcagcagatgaagagagggccagaccatcagccagcaaagacctcgtcagtgtctttaactgcgacctttcgtcctcaggaggacttttgcttcctatcctcaaagaaatataagttgtcagagatccatcacctacatccagaatatgtcagagtaagtgagcattttaaagcttccatgaaaaatttcaagattgaaaagataaagaagatcgagaactcagagctcctggataaatttacatggaagaaatcgcagatgaaggaagaaggaaaactcctattttatgcgacaagccgtgcctatgtggaatctatctgttcgaataattttgacagtttcctacatgaaactcatgaaaacaaatacggaaaaggaatttactttgcaaaagatgccatctattcccacaaaaattgcccgtatgatgccaaaaacgtcgttatgtttgtagcccaagttctggttggaaagtttactgaaggaaatataacgtacacgagccctcctccacagttcgacagctgtgtggataccagatcgaatccctccgtttttgtcatctttcagaaagatcaggtttacccacaatatgtgattgaatatactgaagacaaagcctgcgtgattagttagaaccgatgaatacagcgtcagaaggatgccataaccattctgttcctttacagaactaaattgccgcagacaggagttaaagttttatattttcctgctcagttatctaatgtcttagatcagtggtccccaaattttgctacatattagaatcatctgggaggttttaaacaaattctgatgcccaggttgcaccccatgccaatgaaatcatttctgggcgtcagcgccaggcagttgtatttttttttttttttttttttttgagactgaatctcactccatcgtccaggctggagtgcagtggcgcgatctcggctcactgcaacctctgcctcccgggttcaagcaattctcctgcctcagcctcccgagtagctggaactacaggcacacactgccgcgcccagctaattttttgtattttttagtagagacagggtttcactgtgttgcccaggctggtctcaaactcctgagctcaggcaatctgcccgccttggcctcccaaagtgctaggattacaggtatgagccaccatgcccggctggcagttgtattttttaaagcccttctgatgattccaatgtgttggaaagtttaccttgtctcagatgtaactggtaaaggctgatttctaaattttctgtaattgcagcaacctttctctcctgtctacccttttagtttactgtatgccatggttttgttttggttacattgaaagaaagttaatttggaaaatttgggagaaatctaatcatgcctattaaggatgtaagacattacagccttagaagaaagattgtgaaaagctggggagaaaatgcttaaggacatgctaggggaaaaaaaagtaaaattgaagtgctattgcagacatggctgcagtactgtaccttatcattctgatgaaactgatttggagcacccttttctttatcgctacatttatttaggggacaaactccatccaggttgactctctctggaatgcggtaataagagctggcaagtaaggctcagagagaagcaaccaactggagttaattgcccatttgggctctttgtataattatggcaaagtagacatttatgttctaattaatatgattacagagaaggctttttctcaggtcaggcttttcatgaaagtattttgagaacaatgaattgcaataaccagcttcacacaagcataactgataaacgcgagtgctattgtagtcttggcaagtgagccaagaacctaggagcagggccattcctactgaaggacgggccccctacggagatgaaatttgtttcctggtgagcacagaatcagaacaaagaacaatatcccaaagaggccctgtgtctaccaggagcttctttttccaaatgtaatggattatgtggaattgtagtgccatcggtttttacttagagcccttgacgtgcttggaccaatatttccttccttcttatgaaccaggtttttccttctgattttcccttttcaacattccttaccagtcaccaaagtttcctgttataatttcttttagcagacaagttataagtcagatttaattagcatcagagttgattttatattagtcagattttggatcatcacagagatctccacaactccttggcttaaacagctccaccggtaaaaaaaaaaaaaaaaaaaaaaaaaaaaaatagtttttttagagtagagttattttctgggagagttactacaaatgcttattctcattgacttatttctttcatggtaactttcgttttggagtgttcattttctgaacttgaccctcacattgtaggggtgcagtttgtccaactctttccaacagcccattagacaccactagctggatatttcacaggcatctttgattcaatatgtccaaagtggaactctccatctacctccctcacatgaacctgttcctctctcaggatctgtatgtaagtgaaaagcatcaccatctacccattggctcaagcagaaatctggaagtcatctttgactccttcctctccctcctgataaacatctaagcagtttctaagtctagttttacctcttaaatatctctgttcccttctaagttgtttgctgtgttttcttcagagcaagaaggttatattttttaaaatttacttagtaatgcacattcaaaacacacatcaagtcttcaggataaagttcaaaaccgctgtcatggccccatgtgatctctccctcccctacccctctatcatttagtttcttctgcgcaagccactctggcttcctttcagttttgtggttcccatttttagctagttcagtggttttcaatgggcatttctgcctttttttttctaaacgacaaatagaaatacatcttctttattatcctccaaatccaattcagaggtaatatgctccacctacacacaattttagaaataaattaaaaattaaataaaactaatatgaacataaagaggaaataaaaggtacctaacttgggcacagctgtaactgaagacctaatgaagtagtcagatgcttacaactatttataatgcatcaatttgaacttagaaggtaggagatcagatcatatgtgggaaaatgtaaaagcagggatatcagtgggcattagaataaaaactagggatacaataacttctttgcatatgacaatacttatttgtatataagagaaagaacgaaataacctttattgaaataaagatactatgcaagaaaatgtacagttgtcgaagtggagaaaatgaggatatattcttgcagacgagctataggtcatacatgaatgtctagtgagacattcaaaattcgtatagggtgcagagtaatttcttattgtgaggaactgtccaatgtattgcaagatgttctgcatacttggctctcacatactaaatgctagtagcgcccccacccccacgcccagtcacggtgacaaccacaaaccctatcagatctattcacctttttcagagcagatattttgtaacattctctttgctgacctgaaatgactcatagataatacaatctacttacacacatgaatttcttaaaaaaatcaatttaatgccctaactctcttattaaggagaaatagaaaagaagaaatttataatgaaaagaagatgaatttcattatgtaaacgctcaggcatgactacgctgtttgaaacagacagatgtttactcttccttgtaatgagtaggtttggatttaagagccgattagaggctacttcctgtaaacaagtacaggaaaatgaaactagacgggtgggggacactagaatgaaaaccagtgttagggtaaagacaaaacagactatgtacataatctgtatatgggaaaagaaagagcgaaattaccttacttaaggataataggacaagacaaattacagattgtctcagagaaaacaaatgagttactctctcggacaagctgtaggtcctacctaaatgtccagcaggacattagacagtcgtacagggtacagaataattcttcgttgtgtggcactaacccacacactgcaggacatcgttctccctggctgcatccactcagtgctgggagtagtccccagttattatgaaaccaccaataacccactgaccacagtgagaaccactgattttttccactgacctactgaatatctagcatccttagattggctcaactgttactttcctaaggagtccttctacagaataggtcagatcttggcctcccaaaccccttatttttaaaatactttgcgccttgctttgataatttgtattatgtatccaaactgaaattatctgctttctgcattagaatgtaagccccctgagggttgagtcagtctgtcttgtttgctgtgccacgcctgatgcccagcccagcagcatgctttgtacactgatatattgggtaaattttgttgaataaattaagctcaactatttgtatttcaatagttgagttgtattgcttcctgttcttcaagcttaatttgaactgtctaataaaaagaagtaattaaaaaaaaaaaaaaaaaaaaa

SEQ ID NO: 890 - DNA, 1560 bp, HOMO SAPIENS
ctagtaaaaatgcatttttatagagatgttgggaaaggcttgcttgaaattacacgtgggacttttaatagataggcgctttgaccagctaagcaacagggctcccctcgtgtgggacttttagaatgtagcaaccactgacacacagggaaggattatgcgatcaggtgagaaggtggccgaccctgactggctggaagcagatgcattctggtagttgattggtccacaggtagcgtgacgcttgtcacgtcctcagcctcccagcattcaatcgtagcctttcggacagctcgaagccttctgtggagagctcgaagccttctgtggagaactcaaagccgtccgtggagccccagacgagccaaagcccaccttctcctcagcctgagctgtcttgaagatgagtaagagtgggtttgggagctatggcagcatttctgctgctgatggagcgagtggaggcagtgaccaactgtgtgagagagatgcaactcctgctattaagacccaaagacctaaggtccgaattcaggacgttgtaccgtgtaatgtgaaccagcttctcagctctactgtgtttgaccctgtgttcaaggttaggggaattatagtttcccaggtctccatcgtgggggtaatcagaggggcagagaaggcttcaaatcacatttgttacaaaattgatgatatgaccgcgaaaccaatcgaggcccgacagtggtttggtagagagaaagtcaagcaggtgactccattgtcagtcggagtatatgtcaaagtgtttggtatcctcaaatgtcccacgggaacaaagagccttgaggtattgaaaattcatgtcctagaggacatgaacgagttcaccgtgcatattctggaaacggtcaatgcacacatgatgctggataaagcccgtcgtgataccactgtagaaagtgtgcctgtgtctccatcagaagtgaatgatgctggggataacgatgagagtcaccgcaatttcatccaggacgaagtgctgcgtttgattcatgagtgtcctcatcaggaagggaagagcatccatgagctccgggctcagctctgcgaccttagcgtcaaggccatcaaggaagcgattgattatctgaccgttgagggccacatctatcccactgtggatcgggagcattttaagtctgctgattgaggcagggaaaacatcctttcatttttcgaagacccttgcatccagctgtgagtaattttgacctgttgactttttaggaagtaggactaaaaaaaaaaatctcaagtggcattctttgtcaactcgctgcttttctaactgctttgaacttttcggattttctgtatttgaagctcagagagagacggtgatggataaattgacaactctgtaggatttactagcaagctaatggaaacatgattttcggggaagaaaaactacagaaaatgtagaaatttattatttaattgtgttggagcttctttttccaaaagaaaaactagttgcagtcagggagccagcgaaaagacaaaaaaaaaaaaaaaaaa

SEQ ID NO: 891 - DNA, 338 bp, HOMO SAPIENS
  misc_feature (150)..(150): n is a, c, g, or t
agtttccccatgtgtatgctgtggtattggatcagcaacgagataagaagatctctcccatttccaagcgtctatgatgattctgaggcacaaggtcacatttgacagtactaggaaacccaggaaacaagaagcaaagatgacaaaggntgtgtctgcctgggcagacgatctatttggacaagataatagacccaggcatggacatgctctccaagaaagatgccctgacagctgctcacactgaagctgaatcgaacattccaatccttagaggttccagcgaagatcttgaagtctccctgagccattgacacaatggccatgccatcccagtg

SEQ ID NO: 892 - DNA, 1617 bp, HOMO SAPIENS
agcgtgcgcgggcatccggtgggtgcgggaggcccgaggccaggcaggcagggatcccgcagcgaggggctggttactgccaggacggagcgcattgcctcgagccgaccccggggtccgcgagggctcctggggacgaggagtgtggggcacctgccgcggggggcccaggcgctaaaggtggagggaaggaacgcactcgcggcgggggcctggccggggcggacgcagccagcctcacccgcgacggtaggggacttccagggcgagggggcccatctgccctcgggcgccaggaggatgctccagctcctggtgctgaagattgaagatccaggttgcttctgggttattataaaagggtgtagtccctttttagatcatgatgtcgattatcaaaaattaaatagtgccatgaatgacttctacaacagcacgtgtcaagatatagaaataaaacccttaacattggaagaaggacaggtgtgtgtggtctattgtgaggagctaaagtgctggtgcagggccattgtcaaatcaattacgtcttccgcagaccagtacctggcagaatgtttccttgtggactttgccaagaacattccagtcaaatctaaaaacatccgagttgtagtagaatcgtttatgcagcttccctatagagcaaaaaaattcagcctgtactgcacaaagcctgtcacattacacattgacttctgccgagacagtactgacattgtacctgccaagaagtgggacaatgcagctattcagtactttcagaaccttctgaaagcaactacccaggtggaagccagattatgtgctgtggaagaagatacatttgaggtttacctttatgtaactataaaagatgaaaaagtttgtgttaatgatgatcttgttgcaaagaactatgcttgttatatgtcacctacaaagaataaaaaccttgattatttagaaaaaccaagattgaatataaaatcagcaccctccttcaataaactcaatccagcacttacactctggccaatgtttttgcaaggaaaagatgttcaaggaatggaagattcacatggtgtaaattttccggcacaatctctgcaacatacatggtgcaagggtattgtcggtgacctcaggccaacagccacagcacaggacaaagctgtaaaatgtaatatggattcattgagagattcacctaaagacaaatctgaaaagaaacaccattgcatctctttaaaagatacaaataagcgtgttgaatcctcagtgtactggccagcaaaaagaggcataaccatatatgctgatccagatgtaccagaagcaagtgctttaagtcagaagtcaaatgagaaacctcttagattgactgagaagaaagaatatgatgagaagaatagctgtgtgaaattactgcagtttttaaatcctgatcctttgagagctgacggaatctctgatctccagcagacttgagattagaagagaaactccttagatgggggacttaacctgaagacatccttttagaaacgatcgaatggattgttgcttctgagaaattgttccttgttttttggataataaacgatcttccttttggta

SEQ ID NO: 893 - DNA, 4268 bp, HOMO SAPIENS; identical to SEQ ID NO: 479

SEQ ID NO: 894 - DNA, 956 bp, HOMO SAPIENS
gggcggagcagctgaaaatccggcgcgcgcagtctccagccccaatttctacgcgcaccggaagacggaggtcctctttccttgcctaacgcagccatggctcgtggtcccaagaagcatctgaagcgggtggcagctccaaagcattggatgctggataaattgaccggtgtgtttgctcctcgtccatccaccggtccccacaagttgagagagtgtctccccctcatcattttcctgaggaacagacttaagtatgccctgacaggagatgaagtaaagaagatttgcatgcagcggttcattaaaatcgatggcaaggtccgaactgatataacctaccctgctggattcatggatgtcatcagcattgacaagacgggagagaatttccgtctgatctatgacaccaagggtcgctttgctgtacatcgtattacacctgaggaggccaagtacaagttgtgcaaagtgagaaagatctttgtgggcacaaaaggaatccctcatctggtgactcatgatgcccgcaccatccgctaccccgatcccctcatcaaggtgaatgataccattcagattgatttggagactggcaagattactgatttcatcaagttcgacactggtaacctgtgtatggtgactggaggtgctaacctaggaagaattggtgtgatcaccaacagagagaggcaccctggatcttttgacgtggttcacgtgaaagatgccaatggcaacagctttgccactcgactttccaacatttttgttattggcaagggcaacaaaccatggatttctcttccccgaggaaagggtatccgcctcaccattgctgaagagagagacaaaagactggcggccaaacagagcagtgggtgaaatgggtccctgggtgacatgtcagatctttgtacgtaattaaaaatattgtggcaggattaatagca

SEQ ID NO: 895 - DNA, 376 bp, HOMO SAPIENS
  misc_feature (121)..(121): n is a, c, g, or t
  misc_feature (127)..(127): n is a, c, g, or t
  misc_feature (138)..(138): n is a, c, g, or t
  misc_feature (162)..(162): n is a, c, g, or t
  misc_feature (270)..(270): n is a, c, g, or t
atctggtttctttcgtgtttggtgaaataactgaattttcccatgctttaactatgtgtgaggaaataatttctggttcttctgtttattttctctttctatggtcatacatacactcacngtcttncctctgacagntattgattaccaagcacaattaangcactgagacagaaagttaacagctgaagtggggtcacctataggcagaaaatagattcgtgtctgtttaacagtaacccaaataagaagccatgttaaatagagacnacttttattacaatccttatagcataccttccttttaacattatttttatgatttagctccctccaataggaaatgtttggccacccactggttttgtgctttata

SEQ ID NO: 896 - DNA, 3900 bp, HOMO SAPIENS
ccatgggctcaggatgccggtgcggaggggccacgtcgcgccgcagaacaccttcctggacaccatcatccgcaagtttgagggccagagccgtaagttcatcatcgccaacgctcgggtggagaactgcgccgtcatctactgcaacgacggcttctgcgagctgtgcggctactcgcgggccgaggtgatgcagcgaccctgcacctgcgacttcctgcacgggccgcgcacgcagcgccgcgctgccgcgcagatcgcgcaggcactgctgggcgccgaggagcgcaaagtggaaatcgccttctaccggaaagatgggagctgcttcctatgtctggtggatgtggtgcccgtgaagaacgaggatggggctgtcatcatgttcatcctcaatttcgaggtggtgatggagaaggacatggtggggtccccggctcatgacaccaaccaccggggcccccccaccagctggctggccccaggccgcgccaagaccttccgcctgaagctgcccgcgctgctggcgctgacggcccgggagtcgtcggtgcggtcgggcggcgcgggcggcgcgggcgccccgggggccgtggtggtggacgtggacctgacgcccgcggcacccagcagcgagtcgctggccctggacgaagtgacagccatggacaaccacgtggcagggctcgggcccgcggaggagcggcgtgcgctggtgggtcccggctctccgccccgcagcgcgcccggccagctcccatcgccccgggcgcacagcctcaaccccgacgcctcgggctccagctgcagcctggcccggacgcgctcccgagaaagctgcgccagcgtgcgccgcgcctcgtcggccgacgacatcgaggccatgcgcgccggggtgctgcccccgccaccgcgccacgccagcaccggggccatgcacccactgcgcagcggcttgctcaactccacctcggactccgacctcgtgcgctaccgcaccattagcaagattccccaaatcaccctcaactttgtggacctcaagggcgaccccttcttggcttcgcccaccagtgaccgtgagatcatagcacctaagataaaggagcgaacccacaatgtcactgagaaggtcacccaggtcctgtccctgggcgccgacgtgctgcctgagtacaagctgcaggcaccgcgcatccaccgctggaccatcctgcattacagccccttcaaggccgtgtgggactggctcatcctgctgctggtcatctacacggctgtcttcacaccctactcggctgccttcctgctgaaggagacggaagaaggcccgcctgctaccgagtgtggctacgcctgccagccgctggctgtggtggacctcatcgtggacatcatgttcattgtggacatcctcatcaacttccgcaccacctacgtcaatgccaacgaggaggtggtcagccaccccggccgcatcgccgtccactacttcaagggctggttcctcatcgacatggtggccgccatccccttcgacctgctcatcttcggctctggctctgaggagctgatcgggctgctgaagactgcgcggctgctgcggctggtgcgcgtggcgcggaagctggatcgctactcagagtacggcgcggccgtgctgttcttgctcatgtgcacctttgcgctcatcgcgcactggctagcctgcatctggtacgccatcggcaacatggagcagccacacatggactcacgcatcggctggctgcacaacctgggcgaccagataggcaaaccctacaacagcagcggcctgggcggcccctccatcaaggacaagtatgtgacggcgctctacttcaccttcagcagcctcaccagtgtgggcttcggcaacgtctctcccaacaccaactcagagaagatcttctccatctgcgtcatgctcattggctccctcatgtatgctagcatcttcggcaacgtgtcggccatcatccagcggctgtactcgggcacagcccgctaccacacacagatgctgcgggtgcgggagttcatccgcttccaccagatccccaatcccctgcgccagcgcctcgaggagtacttccagcacgcctggtcctacaccaacggcatcgacatgaacgcggtgctgaagggcttccctgagtgcctgcaggctgacatctgcctgcacctgaaccgctcactgctgcagcactgcaaacccttccgaggggccaccaagggctgccttcgggccctggccatgaagttcaagaccacacatgcaccgccaggggacacactggtgcatgctggggacctgctcaccgccctgtacttcatctcccggggctccatcgagatcctgcggggcgacgtcgtcgtggccatcctggggaagaatgacatctttggggagcctctgaacctgtatgcaaggcctggcaagtcgaacggggatgtgcgggccctcacctactgtgacctacacaagatccatcgggacgacctgctggaggtgctggacatgtaccctgagttctccgaccacttctggtccagcctggagatcaccttcaacctgcgagataccaacatgatcccgggctcccccggcagtacggagttagagggtggcttcagtcggcaacgcaagcgcaagttgtccttccgcaggcgcacggacaaggacacggagcagccaggggaggtgtcggccttggggccgggccgggcgggggcagggccgagtagccggggccggccgggggggccgtggggggagagcccgtccagtggcccctccagccctgagagcagtgaggatgagggcccaggccgcagctccagccccctccgcctggtgcccttctccagccccaggccccccggagagccgccgggtggggagcccctgatggaggactgcgagaagagcagcgacacttgcaaccccctgtcaggcgccttctcaggagtgtccaacattttcagcttctggggggacagtcggggccgccagtaccaggagctccctcgatgccccgcccccacccccagcctcctcaacatccccctctccagcccgggtcggcggccccggggcgacgtggagagcaggctggatgccctccagcgccagctcaacaggctggagacccggctgagtgcagacatggccactgtcctgcagctgctacagaggcagatgacgctggtcccgcccgcctacagtgctgtgaccaccccggggcctggccccacttccacatccccgctgttgcccgtcagccccctccccaccctcaccttggactcgctttctcaggtttcccagttcatggcgtgtgaggagctgcccccgggggccccagagcttccccaagaaggccccacacgacgcctctccctaccgggccagctgggggccctcacctcccagcccctgcacagacacggctcggacccgggcagttagtggggctgcccagtgtggacacgtggctcacccagggatcaaggcgctgctgggccgctccccttggaggccctgctcaggaggccctgaccgtggaaggggagaggaactcgaaagcacagctcctcccccagcccttgggaccatcttctcctgcagtcccctgggccccagtgagaggggcaggggcagggccggcagtaggtggggcctgtggtccccccactgccctgagggcattagctggtctaactgcccggaggcacccggccctgggccttaggcacctcaaggacttttctgctatttactgctcttattgttaaggataataattaaggatcatatgaataattaatgaagatgctgatgactatgaataataaataattatcctgaggagaaaa

SEQ ID NO: 897 - DNA, 535 bp, HOMO SAPIENS
  misc_feature (31)..(31): n is a, c, g, or t
  misc_feature (69)..(69): n is a, c, g, or t
  misc_feature (72)..(73): n is a, c, g, or t
aaagcaaggccaagtatgtccacccatgggnacaaacgtcccagcacaaaggggtctcaggcctgcaangcnnaagtggacgctcggacaagggcaggaaggtatttgctgattctccttctccatgtgacgtgtctctcaacccacaccagctaggggagcctcccgcagcttcagttcccctttgacgcccacacagtgttatgcaagcaccgagcccagagtcccgctgggccgtggtgtcctaattgtcttggtgacaaagagcaattttattttaaagcaactgaatcctttccccctgttttgtgtgccagtattttactgtcttcttaattgttttaagcaatgtttactttggatttctggatgttatataaaagccacgaaaaccctggccatgctgtttgtcaggcccacctggctgagtgcaggaagcaagcgcttttcaggagctcactgcaacaccgggcaaacacttcttccgccagggatgcggttaggacaatgccacgtggcgtcacagtatgctgtt

SEQ ID NO: 898 - DNA, 1493 bp, HOMO SAPIENS
ggcaaacagcccgcccggcaccaccatgctcgccctggaggctgcacagctcgacgggccacacttcagctgtctgtacccagatggcgtcttctatgacctggacagctgcaagcattccagctaccctgattcagagggggctcctgactccctgtgggactggactgtggccccacctgtcccagccaccccctatgaagccttcgacccggcagcagccgcttttagccacccccaggctgcccagctctgctacgaaccccccacctacagccctgcagggaacctcgaactggcccccagcctggaggccccggggcctggcctccccgcataccccacggagaacttcgctagccagaccctggttcccccggcatatgccccgtaccccagccctgtgctatcagaggaggaagacttaccgttggacagccctgccctggaggtctcggacagcgagtcggatgaggccctcgtggctggccccgaggggaagggatccgaggcagggactcgcaagaagctgcgcctgtaccagttcctgctggggctactgacgcgcggggacatgcgtgagtgcgtgtggtgggtggagccaggcgccggcgtcttccagttctcctccaagcacaaggaactcctggcgcgccgctggggccagcagaaggggaaccgcaagcgcatgacctaccagaagctggcgcgcgccctccgaaactacgccaagaccggcgagatccgcaaggtcaagcgcaagctcacctaccagttcgacagcgcgctgctgcctgcagtccgccgggcctgagcacacccgaggctcccacctgcggagccgctgggggacctcacgtcccagccaggatccccctggaagaaaaagggcgtccccacactctaggtgataggacttacgcatccccaccttttggggtaaggggagtgctgccctgccataatccccaagcccagcccgggcctgtctgggattccccacttgtgcctggggtccctctgggatttctttgtcatgtacagactccctgggatcctcatgttttgggtgacaggacctatggaccactatactcggggaggcagggtagcagttcttccagaatcccaagagcttctctgggattttcttgtgatatctgattccccagtgaggcctgggacgtttttaagatcgctgtgtgtctgtaaaccctgaatctcatctggggtgggggccctgctggcaaccctgagccctgtccaaggttccctcttgtcagatctgagatttcctagttatgtctggggccctctgggagctgttatcatctcagatctcttcgcccatctatggctgtgttgtcacatctgtcccctcatttttgagatcccccaattctctggaactattctgctgcccctttttatgtgtctggagttccccaatcacatctagggctcctccaagaaaaaaaaaaaaaaaaaaaaaa

SEQ ID NO: 899 - DNA, 3441 bp, HOMO SAPIENS
gaggagtgagcgagcggcgaccctcacctcgcctcccgcctagctcctgcgcagccagcgggtaccgggagctgcggccagcgccgcttctttcctttccttttctctccgttttccttctccttccccggaggagaaaacaaataaagaagagcaaatagccgggaggcgctcggcatccaggacgttccctcccccgatccaagttggaattagcatcctctcggggggtttcatcaccttaaatggttttgaaccaatgaaggtgtattcccttaaaaagacggacagcccatcgtgtgaactatagagtttgtggacagatttatattgggttcatagtggcgtcatgcacgcagactcctgcaagttcccctaagttcttagaggactgctttgccttttgatctgagagttgcaaagttccataaagaatggcccttgtggataagcacaaagtcaagagacagcgattggacagaatttgtgaaggtatccgcccccagatcatgaacggccccctgcacccccgccccctggtggcgctgctggacggccgcgactgcactgtggagatgcccatcctgaaggacctggccactgtggccttctgtgacgcgcagtcgacgcaggaaatccacgagaaggttctaaacgaagccgtgggcgccatgatgtaccacaccatcaccctcaccagggaggacctggagaagttcaaggccctgagagtgatcgtgcggataggcagtggctatgacaacgtggacatcaaggctgccggcgagctcggaattgccgtgtgcaacatcccgtctgcagccgtggaagagacagcggactctaccatctgccacatcctcaacctgtaccggaggaacacgtggctgtaccaggcactgcgggaaggcacgcgggttcagagcgtggagcagatccgcgaggtggcctcgggagcggcccgcatccgtggggagacgctgggcctcattggctttggtcgcacggggcaggcggttgcagttcgagccaaggcctttggattcagcgtcatattttatgacccctacttgcaggatgggatcgagcggtccctgggcgtgcagagggtctacaccctgcaggatttgctgtatcagagcgactgcgtctccttgcactgcaatctcaacgaacataaccaccacctcatcaatgactttaccataaagcagatgaggcagggagcattccttgtgaacgcagcccgtggcggcctggtggacgagaaagccttagcacaagccctcaaggagggcaggatacgaggggcagccctcgacgtgcatgagtcagagcccttcagctttgctcagggtccgttgaaagatgccccgaatctcatctgcactcctcacactgcctggtacagtgagcaggcgtcactggagatgagggaggcagctgccaccgagatccgccgagccatcacaggtcgcatcccagaaagcttaagaaattgtgtgaacaaggaattctttgtcacatcagcgccttggtcagtaatagaccagcaagcaattcatcctgagctcaatggtgccacatacagatatccgccaggcatcgtgggtgtggctccaggaggacttcctgcagccatggaagggatcatccctggaggcatcccagtgactcacaacctcccgacagtggcacatccttcccaagcgccctctcccaaccagcccacaaaacacggggacaatcgagagcaccccaacgagcaatagcagagaatgccagaaggtaatcactcagatacacttgggaccaagagacagtgaaaaatagatgaactaagagaaaaagaatcggatggtctttgtaactgattctggacatatgcatcattgatgttgcagtgttgaaactacaagagctagaaaactgaagatgtcgtctgcttacggaagcgctgaaagactaggatgtgatttattaacgaccaacttctgttattgtgtgttaagtttttcatctgtgcatcaaatcacaaaaagaataaatagagctttttcctttatcagtcccttgggcacagcaggtcctgaacaccctgctctacaatgttgcatcaagagttcaaacaacaaaataaaaaatattaagaggaaatccccatcctgtgacttgagtcccttaagtctacaggggctggtgacctctttttgctaataggaaaatcacattactacaaaatggggagaaaactgtttgcctgtggtagacacctgcacgcataggattgaagacagtacaggctgctgtacagagaagcgcctctcacatctgaactgcatactgagcgggcaagtcggttgtaagttcagtaaaaccctctgatgatgcaaaaaaaaaaaaaaaagtattaagtttcacaagctgtttgtactcaaatatattttctcagtttcagatcctctgctattttattgagtggaaagtcttgagctaaaagggttcaagaagaataatgttgcatttccttatgtctcaggaaacactttttatggtaacttgtcagattgtctatgaacaaacccacttttttagacattgataaagtcttcttttcttcacgtgatattttatacaagaacacttcagatgtattagatgtgactgattttaacaaatcctattagatttgtatcaactagttacatgttctattcatagtcttttgtgaatcattgcctttttgtttaaaaagatggcctattttgagcctttgtataggtacattcctgtttttgtgacaaaagaaaaactttaaaattgtcccaaacagaaaaataatggctatcagaagtatgttttgttttagtgtgagttaccgttactgtatttgtttattgtaaaggtggacatttagcgttcagtgcagttttcaataaaaagtaattaaaatttgttaagttctgaaattcaagtacatctcactaatgtaaatgttctctacttgagatgtttaaggcaattgcattgtcaattagccaatttccagctcttgttactacagggttccataaccagactcaagaccgctgacaattaattacctgtgataacaaaaagtttaattgaaaaatcaaaacctcacacaagtccatcattatcacgtcatgccatccttaagatgcaatggtgggttagtgctaaatcaattcaaaaaaaaacaaagttgctcaacttttagagttctgactttaatctaccccaaagcaaaatgacctggacctggttcaagggagggaagtgaaccttgaaactgttttgccaataacctaacaaacaaaatgatatttacaaagaagtgttgcaaatagtcccatgagttaagagcttgatttaatggatcttctttttaaatagaattaaacctttatactaaaagta

SEQ ID NO: 900 - DNA, 2445 bp, HOMO SAPIENS
gacagctggtgtctgaagccgctcgcgcccagggtgaccctgtttgcagcacgatgtctgaagaagaggcggctcagatccccagatccagtgtgtgggagcaggaccagcagaacgtggtgcagcgtgtggtggctctgcccctggtcagggccacgtgcaccgcggtctgcgatgtttacagtgcagccaaggacaggcacccgctgctgggctccgcctgccgcctggctgagaactgcgtgtgcggcctgaccacccgtgccctggaccacgcccagccgctgctcgagcacctgcagccccagctggccactatgaacagcctcgcctgcaggggcctggacaagctggaagagaagcttccctttctccagcaaccttcggagacggtggtgacctcagccaaggacgtggtggccagcagtgtcacgggtgtggtggacctggcccggaggggccggcgctggagcgtggagctgaagcgctccgtgagccatgctgtggatgttgtactggaaaaatcagaggagctggtggatcacttcctgcccatgacggaggaagagctcgcggcactggcggctgaggctgaaggccctgaagtgggttcggtggaggatcagaggagacagcagggctactttgtgcgcctcggctccctgtcagcacggatccgccacctggcctacgagcactctgtggggaaactgaggcagagcaaacaccgtgcccaggacaccctggcccagctgcaggagacgctggagctgatagaccacatgcagtgtggggtgacccccaccgccccggcctgccctgggaaggtgcacgagctgtggggggaatggggccagcgccctccggagagccgccgccggagccaggcagagctggagacgctggtgctgtcccgcagcctgacccaggagctgcagggcacggtagaggctctggagtccagcgtgcggggcctgcccgccggcgcccaggagaaggtggctgaggtgcggcgcagtgtggatgccctgcagaccgccttcgctgatgcccgctgcttcagggacgtgccagcggccgcgctggccgagggccggggtcgcgtggcccacgcgcacgcctgcgtggacgagctgctggagctggtggtgcaggccgtgccgctgccctggctggtgggacccttcgcgcccatccttgtggagcgacccgagcccctgcccgacctggcggacctggtggacgaggtcatcgggggccctgacccccgctgggcgcacctggactggccggcccagcagagagcctgggaggcagagcacagggacgggagtgggaatggggatggggacaggatgggtgttgccggggacatctgcgagcaggaacccgagacccccagctgcccggtcaagcacaccctgatgcccgagctggacttctgacccatgggccagtggaggcggggaggaaaggccacctgcacaccccgatccctgctgccccctggtggccacacgtaagctcgaggccttggccttgacccttctttggaatcaggcccaactccggatctctgaccacctttttggtattggactctcccattttttccttgaacacatggacaaagaggcccgggggagcagggcctcgaaccctattcaggccaacttgagccacaagctgggttcttcacctatgtcctgctccctggctccatgaagcgaatccaaatctttccaagaggctgggcacagtggctcacgcctgtaatcccagcactttgggagtctgaggcaggtggatcatctgaagtcaggagttcgggatcatcctggccaacatgatgaaaccctgtctctacttagaaagaaagaaaaaaaaaaaaaaagccaggtgtggtggtgtgcacctgtagtcccagctagttgtgaggctgacgcagaagaattgcttaaacccgagaggcgcggagcttgcagtgagcagagatcgcgccactgcacaccagcctgggtgacagagcgagactccatctaacaaaaaataatagtaacagcctcccgaagaaatacacattttgcccaatgccttctgtttggggctttgaaaagtgagccctgactgggtgtggtggttgacacctgttatcacagcactttgggaggccaaggtgggaggactgcttgagcccaggagttggaggctgcagtgagccatgatcttgcccctgcgctctcgcctgggtgacagagcaagactctatctcaaaaatgtttttaaaaaatacttcctagggaaacacacattttgccctatttggaactttgaaaagtgagccctcctctgcccatgggccgtgctgctcagcctgccatactcgcttgctttgctgtttgggatttgcctccagaataaaggtcctttttgttgttgaaaaaa

SEQ ID NO: 901 - DNA, 246 bp, HOMO SAPIENS
  misc_feature (84)..(84): n is a, c, g, or t
  misc_feature (115)..(115): n is a, c, g, or t
  misc_feature (153)..(153): n is a, c, g, or t
  misc_feature (164)..(164): n is a, c, g, or t
gatgtcaggaaataatcttttgattatttttcccaaccatttaaaagccattttcagttcatgggccacacaaaaacaggcagnaagctgattctggctacgggccatagtttgncaacccttgctctagtagatttaacagaatatatgagnctgtaattaantaatggctcagtaacactaaaatatcagccaaatatcttacatctggaacctagactttacaaacattgagactgtctggaa

SEQ ID NO: 902 - DNA, 313 bp, HOMO SAPIENS
  misc_feature (132)..(132): n is a, c, g, or t
  misc_feature (164)..(164): n is a, c, g, or t
  misc_feature (167)..(167): n is a, c, g, or t
  misc_feature (170)..(170): n is a, c, g, or t
  misc_feature (179)..(180): n is a, c, g, or t
  misc_feature (191)..(191): n is a, c, g, or t
  misc_feature (193)..(193): n is a, c, g, or t
  misc_feature (216)..(216): n is a, c, g, or t
  misc_feature (218)..(218): n is a, c, g, or t
gatgtcaattactcatactaccaccatccagaaatatcactctgaacatgttggcacacatccttcctaacatttttctctacacataacacgtgtgtaagacttttttttgaacaaaaaatagaatcacanacatgctgatttattttttcccctttattggnctntanctcccaaanncctcctcacananacccactgtgatgtgtttgatgngngtcctgaacacgcatgcttccttataaaaggtgtgtgtgtgtgtgtatgtgtgtctgtgtgtgtgttttaaagtttacataactcagccgggcac

SEQ ID NO: 903 - DNA, 548 bp, HOMO SAPIENS
  misc_feature (115)..(116): n is a, c, g, or t
  misc_feature (127)..(127): n is a, c, g, or t
  misc_feature (139)..(139): n is a, c, g, or t
  misc_feature (143)..(143): n is a, c, g, or t
  misc_feature (159)..(159): n is a, c, g, or t
  misc_feature (167)..(167): n is a, c, g, or t
  misc_feature (188)..(188): n is a, c, g, or t
  misc_feature (219)..(220): n is a, c, g, or t
  misc_feature (234)..(234): n is a, c, g, or t
  misc_feature (239)..(239): n is a, c, g, or t
  misc_feature (278)..(278): n is a, c, g, or t
  misc_feature (281)..(281): n is a, c, g, or t
  misc_feature (284)..(284): n is a, c, g, or t
  misc_feature (296)..(296): n is a, c, g, or t
  misc_feature (314)..(314): n is a, c, g, or t
  misc_feature (317)..(317): n is a, c, g, or t
  misc_feature (321)..(321): n is a, c, g, or t
  misc_feature (325)..(325): n is a, c, g, or t
  misc_feature (330)..(330): n is a, c, g, or t
  misc_feature (339)..(339): n is a, c, g, or t
  misc_feature (345)..(345): n is a, c, g, or t
  misc_feature (352)..(352): n is a, c, g, or t
  misc_feature (384)..(384): n is a, c, g, or t
  misc_feature (387)..(387): n is a, c, g, or t
  misc_feature (394)..(394): n is a, c, g, or t
  misc_feature (400)..(400): n is a, c, g, or t
  misc_feature (405)..(405): n is a, c, g, or t
  misc_feature (408)..(408): n is a, c, g, or t
  misc_feature (412)..(412): n is a, c, g, or t
  misc_feature (416)..(416): n is a, c, g, or t
  misc_feature (419)..(419): n is a, c, g, or t
  misc_feature (426)..(427): n is a, c, g, or t
  misc_feature (434)..(434): n is a, c, g, or t
  misc_feature (440)..(440): n is a, c, g, or t
  misc_feature (446)..(446): n is a, c, g, or t
  misc_feature (460)..(460): n is a, c, g, or t
  misc_feature (467)..(467): n is a, c, g, or t
actcagggctcgtgcttgatcgaaggggatctgtgttagtcagcattctccagagaaatggaacccattggatagatatgtaaagagatttattatgggagttggctcatgcaannttgtggagtcntagaagacccancacntcctgtctgcaagctnggagaaancagcaaagccagtgacgtaanttaagtctgaatccaaaggcataagatcaannggagaactgatggntcacntgtgtatacttccattatggcatgtaacatgctggcaanaanttngattcattgggnttgtgtcttctcagctgnctngaangaantgaanatcatatanctctangtttcantatgcccagcattgtacacaacttgacacatncancagcagnctctangaaangcncatnaggnctngacaacnntgagtgnaacaanccactngactgtgtgtcgtncagggtngggaaagcaagggcaggtctctgtgccccatctctagcttttcctcaacttaggctttataaacccttgcatcaaaaaata

SEQ ID NO: 904 - DNA, 717 bp, HOMO SAPIENS
gcacgagggctacggccctggaacggggccatggagaagctgcggcgagtcctgagcggccaggacgacgaggagcagggcctgactgcgcaggtcctggatgcctcatcccttagtttcaacaccagattgaaatggtttgccatctgcttcgtatgtggcgttttcttttctattcttggaactggattgctgtggcttccgggcggcataaagctttttgcagtgttttataccctcggcaatcttgctgcgttagccagtacatgctttttaatgggacctgtgaagcaactgaagaaaatgtttgaagcaacaagattgcttgcaacaattgttatgcttttgtgtttcatatttaccctgtgtgctgctctttggtggcataagaagggactggctgtgttattctgcatattgcagttcttgtcaatgacctggtatagcctgtcatacatcccatatgcaagggatgcagttattaaatgctgttcttctctcctaagttgaaaatcagaaacttgtggaaaagagcacttgaatgttggtactctatgtttggtgaagtttgcttttccccataaaacactccaggaacaactgacgtgacagttgaagaccgttttgtactaagtctcattttgtatactggtaaaaactacatgcttgattaaaccattaaatgcttgtaactttaaaaaaaaaaaaaaaaaaaaa

SEQ ID NO: 905 - DNA, 3118 bp, HOMO SAPIENS
cccgaagtgagcaggcagcaaaggctgagagtgccagctgcctgggcactgacggaccccacccacggaaacgatgccttatgaggaagctaacccgggccacttaccgacgacctgcgcaggcgtggcttgaggaaacgcccgctgtgggcggagccacccgaaaggctccggtcgggggcgggaacaggatcggcccgcgggctggcgtcgataggctgccgcagagacagggcgggctctgctaagggacgcgcctcgccgtggggcggtgcctgcgcctgagcctctacgagagggaaggaacgctgctccgagctccgcgtcgcgtcgcgtagattcgcgtcgccgtcgacctcagaggcggggccggaagcgctacggtttgacccccgagtccctctgttcccgaaggggcggccgtctttctcccgacccgctccgcctcctctccttcttccccattacccggaggccgaagcccccagccagggcggggcggcgcagcccgagctcccggacccggaagaagcgccatctcccgcctccaccatggagcccaccgcaccgtccctcaccgaggaggacctcactgaagtgaagaaggacgccttagaaaatttacgtgtatacctgtgtgagaaaatcatagctgagagacattttgatcatctacgtgcaaaaaaaatactcagtagagaagacactgaagaaatttcttgtcgaacatcaagtagaaaaagggctggaaaattgttagactacttacaggaaaacccaaaaggtctggacacccttgttgaatctattcggcgagaaaaaacacagaacttcctgatacagaagattacagatgaagtgctgaaacttagaaatataaaactagaacatctgaaaggactaaaatgtagcagttgtgaaccttttccagatggagccacgaacaacctctccagatcaaattcagatgagagtaatttctctgaaaaactgagggcatccactgtcatgtaccatccagaaggagaatccagcacgacgccctttttttctactaattcttctctgaatttgcctgttctagaagtaggcagaactgaaaataccatcttctcttcaactacacttcccagacctggggacccaggggctcctcctttgccaccagatctacagttagaagaagaaggaacttgtgcaaactctagtgagatgtttcttcccttaagatcacgtactgtttcacgacaatgacactttattgccttttaatttttaatgatgacaaaaaatgttttaaagaatatgactttttataaaatggctgtaatcatttgtttacatttgatgcatgtcttttaaaatgcaatgtaagcatactttgtaaataggatttttagaattaaaaaagcatacttctaggatagctaactgtaaatcatgttgatcatgtactttttagtaatttctttttttcctttttaaggtctttcagtacttttttaaatattttctattttaagactgattttaatagggaatatatctctatttgagaatagacccttactaggaagaacgttttttcctcagtgcatttgtgctagaaattttcaagagtctaatagtctttgccagtcattcagcagcaaattttcagcattaagctgttcctgttcagtaataaaaccggtcactgatgggaaaactgccaatatagaaaaataaaaatctcttttccactccattgtcgtataggcatgtaaacagcctctttttgatactggaggaacacttgatggagtgtgagccacctaagatctcggtttgccaaaattcatttctaattaaccttactaattatactactttgttaggattttcacattcttggcttaatcattttcattcctaaagaaaaatatcttggcctaaacctcagttattacatgtaatttgatgaggtattttttccttttttcttttttttttttttttttttttgagacagtcttgctctatcgcccaggctggagtgcagtggcgcattctaggctcactgcaacttctgcctcccatgcttacgtgatcctctcacctcagcctctcaagtaatatagctgagactacaagtgtgtgccaccatgcctcactaatttttgtattatttttgtagagacggtgttttgccatgttggccaggctggtcttgaactcctggactcaagcaacctacccagcgtggcctcccaaagtgctgggattacagacacgagccacctcacctagcctgatgagatttttaaaaaatattttctctgtacttttcattctcttttaatgaggaccaatgtacagttgaaataactggaacaaattatttttggtgtgtgtgacaattctgtttttaatgctatttgaacaagtgggccattagccagatttgtctttttgttgtaaaacaaaatttgactaattttacatgtttataaatcttatgctctcactgtttgtttttatttaaattacaattttatctgtttcctgacattgtctcctatatatttctattattaattgcaaaaacatagaaatggaaattttgctatcaacaataaaatttttttaaagtagtgagtgctattttggagttccaaattttcagtaggaagtatctaaaactttttttaatacgtgccattatctatagaaaacattacttcaggttgtgagattgagttgcatttctggatggactgatgaatttatccgacatgaagaagattggcatattagctttaaaaatttttaaagattggattttttttagtataagcactttctaaggattatagagaaatgtttcacctccaatgcatagcaaaaatagtggtgttagaaagaaaataggttacatttaaggaaggtgctttaaaaagcagaagcagactttaaaattaaatttgtggacacctttttaaaaattgaatcaaagattataatttagatatacaataacacctatatatagataagttttaacactgagttttctttcagactgttttctaactacatagacaataaaattaagctttgcataaaaaaaaaaaaaaaa

SEQ ID NO: 906 - DNA, 3726 bp, HOMO SAPIENS
agttgtaaaatacagtttgctgtttatacttcgcagccattcattttttagtgtgaagtttaatgtctttcatttttatcagttctttttttcttatggttaagccatgtgaaaatgaattacagtattacagtttcaatagtcatgggcattcccacagtgaagagagaagttaaatcttacctcatagaaactcttcattcccttattgataacctgtatcctgaagagaagttggactgtgttatagtagtcttcataggagagacagatattgattatgtacatggtgttgtagccaacctggagaaagaattttctaaagaaatcagttctggcttggtggaagtcatatcaccccctgaaagctattatcctgacttgacaaacctaaaggagacatttggagactccaaagaaagagtaagatggagaacaaagcaaaacctagattactgttttctaatgatgtatgctcaagaaaagggcatatattacattcagcttgaagatgatattattgtcaaacaaaattattttaataccataaaaaattttgcacttcaactttcttctgaggaatggatgattctagagttttcccagctgggcttcattggtaaaatgtttcaagcgccggatcttactctgattgtagaattcatattcatgttttacaaggagaaacccattgattggctcctggaccatattctctgggtgaaagtctgcaaccctgaaaaagatgcaaaacattgtgatagacagaaagcaaatctgcgaattcgcttcagaccttcccttttccaacatgttggtctgcactcatcactatcaggaaaaatccaaaaactcacggataaagattatatgaaaccattacttcttaaaatccatgtaaacccacctgcggaggtatctacttccttgaaggtctaccaagggcatacgctggagaaaacttacatgggagaggatttcttctgggctatcacaccgatagctggagactacatcttgtttaaatttgataaaccagtcaatgtagaaagttatttgttccatagcggcaaccaagaacatcctggagatattctgctaaacacaactgtggaagttttgccttttaagagtgaaggtttggaaataagcaaagaaaccaaagacaaacgattagaagatggctatttcagaataggaaaatttgagaatggtgttgcagaaggaatggtggatccaagtctcaatcccatttcagcctttcgactttcagttattcagaattctgctgtttgggccattcttaatgagcagagagttttctcgggctggtggcagaagtcaagagacaaagcagaaggacctcaggcaccattgctgttttaaggtagagggggctgcatgagaaggaatgcacatggctttgaggagctgagagaggccttggctaacagcaaaggagctgggaactgcagtcctacagccacgggaactgaattcagcccataagctcattcataggcttggaaaggcattcatctccagtctccagataagacccagcctggccaacactttgaatccagccttgtgagaccctaagccgagaactcacttaagcctgcttggacttctgacctacagaactatgagataataaatcagtggtgttttaagctgctaaatttgtggcaatttgttatgtaggaataggaaatgaatacagtattttaaaagaggtaaagaggaaatcttcatacttgattccctgtagtatgctggatatttcttggtaaatgcatgaataaagtctttagtagcaagtcatgtacctggaccttgttggggatgttctcgccagagatctcaattagtcttcattggacgtttgttggcaaagttgcagcatcttactgagtagcgtttggtaaaggaactgctagaatgagactataggaataggactgaaacagtgtgtaagggatcttttttatttctagaagaggtgttactttatactgatttagactgctctgagcctgtcagaagtaaattcaagaatgattaacagtggtattttagatacattaagagcaaaaataacctttgccttgtagagatcagataatctgtgtatcgagggatttaattttttttaaccaaaacttagtttctctttttatcatctagcacagatcaaatcctgtatgggccagccaaatgtttgtagtttgagaatgttttgcaaatacctctctgcttccaagccattaatagctaatgaagttttattttggtttgtccattaatttttctgcttatttttactgtattgccatgtccttgatacgagacaagtagaactaaaagagagaaaatgagaggttaagactgtcagaagatgagaaatgtgagtcataaccataccttagtgttttaagggaactttatccagtccaatccctttatagaaaaggaacttttccaagttatgttgcagtatttatagtgtgtaaaattttgtttgactttggtagttgtgcattttaaattatgaatcttatatgctacgataactagtatgcttactttctttaatgcatgtgatcatacaatgctaaaaaggtattttttaaagacccaaccaaactgaggattttgttatacatatctgtatcaacacctatatataaactcttcttcttacctgaaacactccttcacccggtttgggcactaactagatcattttcaaaggaacaaacaggaaggagcaagctggcactccagggtgcatctgagctgagaatttagaagacctcattcaagaaagtaaactgagcattgatgggaaagcactttgcgcgaagtaacattcccactgttaatgttgcagtcaaaattgtggaaaaaaaaaagtggtgctaaaattgttctgaaatgaagattgtttgttgtggggaatattttaatactcttggactttagggaggctattttatgtgtcacttgctcctagttgtttcattgtattagtaattagcaaactgtcctggaaccaagggtttggtacttttgcctgattagcattccattatttatttgaaatgctcagtgtttgctcaaatttggtgaaaatatcttttgaagacatattctctgagccttaaaaatggctgctatcgacagtactgtaagatgcactgccagtagatttgatacttttcatttcagtgtaggcagtaatgttttctaagaaagatttagaaatcagcaaagtgtaacaattgtgtttcatttatggaatggaaaaactgaagtgtcccattcagaacactttggaaaggttgtctgcattaggggatgtttctggaagcatcccttagagaagctgcctgaggaatctccttgccaggttgtaccagatttttttttttcttaaatgtattgtatatattttccttaaaatgtcttcattggctgaatgattcctatccgtagtaatattttaggtacttgttggatttttaaaggaagattatttattttcagatttgctgctataattgaaaacctagtaactggtcctgttgattgtgccttcatcactgtttctctgtgccacgaccgttcatgtgtatttgaaataaagaagtttaaaaagccatgttgaattcaagattccttctaataaaaataggtgaaacttaaaaaaaaaaaaaaaaa

SEQ ID NO: 907 - DNA, 393 bp, HOMO SAPIENS
  misc_feature (36)..(36): n is a, c, g, or t
  misc_feature (40)..(41): n is a, c, g, or t
  misc_feature (52)..(52): n is a, c, g, or t
  misc_feature (294)..(305): n is a, c, g, or t
  misc_feature (310)..(310): n is a, c, g, or t
tcttgacaggccagtgtagaacaggtggggcatctntggnntgacagaactnggttccaattctgtcccttcacctgtcccaggttcctcatctgaaaactgtgacccagtaaacctaatttcatgagcagctttcattaaaattgaaataatggtggaaaatgccttgtaaccgtgcttgatgtagagtagttacttagccagttatttcctctcttcttcccattcctaacaaaatggaaaaacgtttggttgctaggaaagagccttaaggggattttgttgttgtttgannnnnnnnnnnnctctntcgcccaggatggagtgcaatggcacaatctctgctcagtgcaacctccgccatagacaggagccaagcgtagtggtgtgcac

SEQ ID NO: 908 - DNA, 3220 bp, HOMO SAPIENS
ctcccggagatgccccgcggcagccgcgctcggggctctaagagaaaaaggagttggaatacagaatgcccatcctttccaggagaaagaccactgcaggtcagaagagcaggtctcaggacagcaggggcagctgcctctctctctgaagcatggctcaggtgtggagaagggtttcagaacacttctgggaatccgtcattaacagctgaagagaagacgattacagaaaagcaccttgaattatgccctagacccaagcaagaaaccaccacatctaaaagcaccagtgggcttacagacataacatggagctccagtggaagtgatttgtcggatgaagataagacactttctcagttacagagagatgaattacagtttatcgactgggagattgacagtgacagggcagaggctagtgactgtgatgaatttgaagatgacgagggtgctgtggaaatctcagactgtgcttcttgtgcaagtaatcagtctttgacaagtgatgagaagctgtcggagcttcccaagccaagttctatagaaattttagagtattcatcagatagtgaaaaagaagatgatttggaaaatgtcctactcattgattcagaatcccctcacaaataccacgtgcagtttgcatcggatgcaagacagattatggagagactgatagatccaaggacaaaatcaacagagaccattttgcatacacctcagaaacccacagctaagtttcccaggactccagaaaattcagcaaagaagaagcttttaagaggtggactagcagaaagactaaatggactgcagaatcgagagagatctgctatttctttgtggagacatcaatgtatttcttaccaaaagacactttcaggtagaaaatctggtgtattaactgtgaaaattttagagctgcatgaggaatgtgccatgcaagttgccatgtgtgagcagttattggggtcaccagccaccagctcctcccaaagtgtggctcccaggcctggagctggcctgaaagttctcttcaccaaggagactgcaggctacctcaggggccgtccccaggacactgtccggatcttccctccctggcaaaaactgattattccaagtggaagttgccctgttattctgaatacttacttttgtgagaaagttgttgccaaagaagattcagaaaaaacttgtgaagtgtactgtccggacataccccttccaagaagaagcatctctttggcccagatgtttgtaattaagggtctaacaaataattcacctgaaatccaggttgtgtgtagtggtgtagccactacagggacagcctggacccatgggcacaaagaagcaaaacagcgcatcccaaccagcactcccctgagggattctctcctggatgtggtggaaagccagggagctgcctcgtggccaggagctggagtccgagtggtggtgcaaagagtgtattctcttcccagcagagacagcaccaggggtcagcagggggccagctcaggacacacagacccagctggaactcgagcctgccttctggtacaagatgcctgtggaatgttcggtgaagtgcacttggagttcaccatgtcgaaggcaagacagttggaagggaagtcttgcagcctggtgggaatgaaggttctacagaaagtcaccagaggaaggacagcggggattttcagtttgattgacaccctgtggcccccagcgatacctctgaaaacacctggccgcgaccagccctgtgaagagataaaaactcatctgcctcctccagccttgtgttacatcctcacagctcatccaaatctgggacaaattgatataattgacgaagaccccatttataagctttaccagcctccagttacccgctgcttaagagacattctccagatgaatgatcttggtacccgttgcagtttctatgccacggtgatttaccaaaaaccacagctgaagagtctgctgcttctggagcaaagggagatctggctgctagtgaccgatgtcactctgcaaacgaaggaggagagagaccccaggctccccaaaaccctgctggtctatgtggcccccttgtgtgtgctgggctctgaagtcctggaggcactcgctggggctgcccctcacagcctcttcttcaaggacgctctccgtgaccagggtcggattgtttgtgctgaacgaactgtcctcttgcttcagaagccccttttgagtgtggtctctggtgcaagttcctgtgagctgcctggcccggtgatgctcgacagcctggactctgcaacacctgtcaactccatctgcagtgttcaaggcactgtggttggcgtggacgagagcactgctttctcatggcctgtgtgtgacatgtgtggcaacgggagattggaacagaggccggaagacagaggcgccttttcctgtggggactgctcccgggtggtcacatctcctgttctcaagaggcacctgcaggtcttcctggactgccgctcaagaccgcagtgcagagtgaaggtcaagctgttgcagcgcagcatttcctccctgctgaggtttgccgccggtgaagatgggagctacgaagtgaagagtgtcctcggaaaggaagtggggttgttaaattgttttgtccagtccgtaaccgcccacccgaccagctgcattggattggaggaaatcgagcttctgagtgcaggaggggcctctgcagaacactagcggttgccgcaggatctgtgaactttgcaatgtggctgcaagggtggtggtggtggtggtgatttggggtagttatttgttaactatggacacagtgaacgtagtttacgatcttgaaatgaaacttagatttttctggggaaatgttcagatacagttttgtgaactgtaaatcaaaatacctttttctacagtttatcttttattttctgcaaatttaggaacatatttactcgttttcacattgaatcttaagtttaagctcttcatttggtatttaggcaatatatgagaaaaaaattttttttgttcatttgtaattttaacaagttgaacattttaccatgattgaacatgtttttattacagtatttaacattcccccaaagaataccctgcaaagtgtaaacctttgtcccatactgtgatattactgttctgctacaataaatgtcaaacctaa

SEQ ID NO: 909 - DNA, 4621 bp, HOMO SAPIENS
ctcgcttccagcgcgccgagcggagcctaacgccgggtcctctaggaacctcgggccgggcagcacccgcgggattctgctggcgtcctccgctgccatgaagcgggaccggctgggccgcttcctgtctcctgggtcgtcccgacagtgcggggcctcggacggcggcggcggcgtcagccggactcggggccgcccttcccttagcggtgggccgagggtggacggggcgacggcgcggcgcgcctggggcccggtggggtcctgcggggacgcgggcgaggacggcgcggacgaggcaggagcaggccgggctctcgccatgggtcactgtcgcctctgccacgggaagttttcctcgagaagcctgcgcagcatctccgagagggcgcctggagcgagcatggagaggccatccgcagaggagcgcgtgctcgtacgggacttccagcgcctgcttggtgtggctgtccgccaggaccccaccttgtctccgtttgtctgcaagagctgccacgcccagttctaccagtgccacagccttctcaagtccttcctgcagagggtcaacgcctccccggctggtcgccggaagccttgtgcaaaggtcggtgcccagcccccaacaggggcagaggagggagcgtgtctggtggatctgatcacatccagcccccagtgcctgcacggcttggtggggtgggtgcatggacatgcggccagctgcggggccctgccccaccttcagaggacactgtcctccgagtactgcggcgtcatccaggtcgtgtggggctgcgaccagggccacgactacaccatggataccagctccagctgcaaggccttcttgctggacagtgcgctggcagtcaagtggccatgggacaaagagacggcgccacggctgccccagcaccgagggtggaaccctggggatgcccctcagacctcccagggtagagggacagggaccccagttggggctgagaccaagaccctgcccagcacggatgtggcccagcctccttcggacagcgacgcggtggggcccaggtcgggcttcccacctcagccaagcctgcccctttgcagggccccagggcagttgggtgagaagcagcttccatcttcaacctcggatgatcgggtaaaagacgagttcagtgacctttctgagggagacgtcttgagtgaagatgaaaatgacaagaagcaaaatgcccagtcttcggacgagtcctttgagccttacccagaaaggaaagtctctggtaagaagagtgaaagcaaagaagccaagaagtctgaagaaccaagaattcggaagaagccgggacccaagcccggatggaagaagaagcttcgttgtgagagggaggagcttcccaccatctacaagtgtccttaccagggctgcacggccgtgtaccgaggcgctgacggcatgaagaagcacatcaaggagcaccacgaggaggtccgggagcggccctgcccccaccctggctgcaacaaggttttcatgatcgaccgctacctgcagcgccacgtgaagctcatccacacagaggtgcggaactatatctgtgacgaatgtggacaaaccttcaagcagcggaagcaccttctcgtccaccaaatgcgacattcgggagccaagcctttgcagtgtgaggtctgtgggttccagtgcaggcagcgggcatccctcaagtaccacatgaccaaacacaaggctgagactgagctggactttgcctgtgaccagtgtggccggcggtttgagaaggcccacaacctcaatgtacacatgtccatggtgcacccgctgacacagacccaggacaaggccctgcccctggaggcggaaccaccacctgggccaccgagcccctctgtgaccacagagggccaggcggtgaagcccgaacccacctgaggacggcagtgaggatgagcacctctagcagcctggactccgcagtggctgtgtcagcctcacccttcgtgtgcacccgcatgggagggtcggagggtgctgcccgcccttggtgctggaggcgggcttggtgtccggctcaagtagccttcctctgctctgggaccagtggtttattttcccgcaaacgctgagtgactcggggccggacagttcataaataattgattcctttccccactaaagcagtcgaggagatttgtaatccactttttagtgcaacaagagctccatgttatgcttgtaataaattatttacacgggagctgggctggtgtgcagtggcaggtcccgtcagaagagatgaggctcctgggacaggtcagcgtcaggggcagcctgctgtctgctctggagggcggcgctcacctctgggtcgcagtccccacgatcagccagcagctgtgagagaggagcaggtcctcagcccatgccgcccactaggcctcagaccacaggggaggggctctggcagaaatagtcgagttgtattgccagccaggcaggcacatggcccaggcagctgtcaattctcatgtcccccacatggcccaaggtgggcatcttgacgttacctctgccacgtgtgagaagctctttttcgggcaccgaggtattaactgcagcagaaaaagacgagcttttgttatcagttccacggggttgccctagagagaaaacaggcaaactcacaggttagaagacatacagaaacagggctggtgtgtcccccatagtctgcatgctgtgccggaacattctttggcagaaggagcctccggctggggggagctcccctggaggtgggactggcccttgcacctgcctgacccttgagctccaggctcctgccagctggaggtgaaactgtgcttgtatccccagccacgaagagctggaccagcttcaagtacatgtccacagcaacatgcaggaaggcctcttccctgatggccgcgtcttcatggaagtaggagagaagactagaggtaaagacatagtgacaaatggctacagactgctggaaaggtagcaggtgatgccaagggatactgctcatctgtggagcagaggcacagacaacccttcccatctggcgggacccagaggtgctgagatgggggtctgggaaacactgcccagccctgaccagccctgtgggtggaggtacctgtaaaaagcgaaaggcagcagcctggtgtgctgatccggggccacacggaggaggagccgccccagcctgaggtctgcaacaccaagaagtggctcaggcaactctggacatctctgcctattatcagtgctggggacacccctgggggtcgggacgtgtaccctgggaggcctggctgtggggatagtgtggggcgaacagcctgagctgaggatacccaggtacctgtcagcagctgggagaggatgggggggtcgacctcttgcaggagggtgggtgtggtgcagagagaggcagtccccatgataggcccattggtcctggggttgaccagtgagccagtaaattatcttattgctttaaacaagtttgtgcttaatctgtcccaactaaaatggagcttataaacttacttagcaaggaacctcaaggagggctcgttcttaaccatttgcaagatgcctctgaaaagagcggccctccgcatttgtgcctcagcagcgtgtttcttaccactctctgtcaactgaaagagtgccagccaggatatcttcctcttctctaaacactcgaggattgctgcacaaacgtggaaagcctttggcaggtctgtggtgctctgtaaaccgcaggagaccaaccctgagaatggccgacctggtgctcccatgggtaggagggtacagccctcagcacagaagagggcatttcctctttgcttattgtaagtcttaaaactggtgacagttttacctatagaaggtaatactgggcctctggacagaagaggctcaggtaggaggccagggacttcgagcacccacaccaaggctgctgcaccacgtcctcaaataagacattaaaagaaaggcccacaggccggatgcagtggctcatgcctgtaatcccaacactttgggaggccgaggtcggcggatcactgaggccagttcaagaccagcctggcaatatggtgaaaccccgtctctactaaaaatacaaaaattagccgggtgtgacagactcacgcctgtaatcccagctactcgggaggctgatgcaggagaattgcttgaacccaggaggctgaggttgcagtgagctgagatcacaccactgcactccagcctgggtgacagagtgagacccccatctcaaaaaaaaaaaaaaaaaacccacggcctgggagttctcactcacacttccgcaaacacaaggagctcctgagctagtctggaaaccctgacttggaagctggctgcctggtgcccctgcctggcccacagtgggagaggacaccttggctggtaaggtctgacttacatttgaggtcagatgtgacgacagcaggcccatcaaggagaagaagaaaaggaaaaccaatagctgtaaataaaaacgtgcacttattattacattaaaattacctgtgctgtcattctaaa

SEQ ID NO: 910 - DNA, 5777 bp, HOMO SAPIENS
attcatgaggcgcgcgcagcccggcatgctaatgaggcggggcgcggcggctggctaaagagcgactgggcggcggcgggcgcggagctgccaggcgggagcggcgtaggcgcggggtcgccggccagcgtgaaccgggacatggagccgcccggcgggagcctggggcccggccgcgggacccgggacaagaagaagggccggagcccagatgagctgccctcggcgggcggcgacggcggcaaatctaagaaatttctggagagatttaccagcatgagaattaagaaggagaaggaaaagcccaattctgctcatagaaattcttctgcatcatatggggatgatcccacagcacagtcattgcaagatgtttcagatgaacaagtgctggttctctttgaacagatgctgctggatatgaacctgaatgaggagaaacagcaacctttgagggagaaggacatcatcatcaagagggagatggtgtcccaatacttgtacacctccaaggctggcatgagccagaaggagagctctaagtctgccatgatgtatattcaggagttgaggtcaggcttgcgggatatgcctctgctcagctgcctggagtcccttcgtgtgtctctcaacaacaaccctgtcagttgggtgcaaacatttggtgctgaaggcttggcctccttattggacattcttaaacgacttcatgatgagaaagaagagactgctgggagttacgatagccggaacaagcatgagatcattcgctgcttgaaagcttttatgaacaacaagtttggaatcaagaccatgttggagacagaagaaggaatcctactgctggtcagagccatggatcctgctgttcccaacatgatgattgatgcagctaagctgctttctgctctttgtattctaccgcagccagaggacatgaatgaaagggttttggaggcaatgacagaaagagctgagatggatgaagtggaacgtttccagccgctgctggatggattaaaaagtggaaccactattgcactgaaggttggatgcctacagctgatcaatgctctcatcacaccagcggaggaacttgacttccgagttcacatcagaagtgaactgatgcgtttggggctacatcaggtgttgcaggaccttcgagagattgaaaatgaagatatgagagtgcaactaaatgtgtttgatgaacaaggggaagaggattcctatgacctgaagggacggctggatgacattcgcatggagatggatgactttaatgaagtctttcagattctcttaaacacagtgaaggattcaaaggcagagccacacttcctttccatcctgcagcacttactcttggtccgaaatgactatgaggccagacctcagtactataagttgattgaagaatgtatttcccagatagttctgcacaagaacggggctgatcctgacttcaagtgccggcacctccagattgagattgagggattaattgatcaaatgattgataagacaaaggtggagaaatctgaagccaaagctgcagagctggaaaagaagttggactcagagttaacagcccgacatgagctacaggtggaaatgaaaaagatggaaagtgactttgagcagaagcttcaagatcttcagggagaaaaagatgcactgcattctgaaaagcagcaaattgccacagagaaacaggacctggaagcagaggtgtcccagctcacaggagaggttgccaagctgacaaaggaactggaagatgccaagaaagaaatggcttccctctctgcggcagctattactgtacctccttctgttcctagtcgtgctcctgttccccctgcccctcctttacctggtgactctggcactattattccaccaccacctgctcctggggatagtaccactcctcctcctcctcctcctcctcctcctcctccacctcctttgcctgggggtgtttgcatctcctcacccccttctttacctggaggtactgctatctctccaccccctcctttgtctggggatgctaccatccctccaccccctcctttgcctgagggtgttggcatcccttcaccctcttctttgcctggaggtactgccatccccccacctcctcctttgcctgggagtgctagaatccccccaccaccacctcctttgcctgggagtgctggaattccccccccacctcctcccttgcctggagaagcaggaatgccacctcctcctccccctcttcctggtggtcctggaatccctccacctcctccatttcccggaggccctggcattcctccacctccacccggaatgggtatgcctccacctcccccatttggatttggagttcctgcagccccagttctgccatttggattaacccccaaaaagctttataagccagaggtgcagctccggaggccaaactggtccaagcttgtggctgaggacctctcccaggactgcttctggacaaaggtgaaggaggaccgctttgagaacaatgaacttttcgccaaacttacccttaccttctctgcccagaccaagacttccaaagccaagaaggatcaagaaggtggagaagaaaagaaatctgtgcaaaagaaaaaagtaaaagagttaaaggtgttggattcaaagacagcccagaatctctcaatctttttgggttccttccgcatgccctatcaagagattaagaatgtcatcctggaggtgaatgaggctgttctgactgagtctatgatccagaacctcattaagcaaatgccagagccagagcagttaaaaatgctttctgaactgaaggatgaatatgatgacctggctgagtcagagcagtttggcgtggtgatgggcactgtgccccgactgcggcctcgcctcaatgccattctcttcaagctacaattcagcgagcaagtggagaatatcaagccagagattgtgtctgtcactgctgcatgtgaggagttacgtaagagtgagagcttttccaatctcctagagattaccttgcttgttggaaattacatgaatgctggctccagaaatgctggtgcttttggcttcaatatcagcttcctctgtaagcttcgagacaccaagtccacagatcagaagatgacgttgttacacttcttggctgagttgtgtgagaatgactatcccgatgtcctcaagtttccagacgagcttgcccatgtggagaaagccagccgagtttctgctgaaaacttgcaaaagaacctagatcagatgaagaaacaaatttctgatgtggaacgtgatgttcagaatttcccagctgccacagatgaaaaagacaagtttgttgaaaaaatgaccagctttgtgaaggatgcacaggaacagtataacaagctgcggatgatgcattctaacatggagaccctctataaggagctgggcgagtacttcctctttgaccccaagaagttgtctgttgaagaatttttcatggatcttcacaattttcggaatatgtttttgcaagcagtcaaggagaaccagaagcggcgggagacagaagaaaagatgaggcgagcaaaactagccaaggagaaggcagagaaggagcggctagagaagcagcagaagagagagcaactcatagacatgaatgcagagggcgatgagacaggtgtgatggacagtcttctagaagccctgcagtcaggggcagcattccgacggaagagagggccccgtcaagccaacaggaaggccgggtgtgcagtcacatctctgctagcttcggagctgaccaaggatgatgccatggctgctgttcctgccaaggtgtccaagaacagtgagacattccccacaatccttgaggaagccaaggagttggttggccgtgcaagctaatgtgggtcctgtgaccgcggcagctcctcagcggagccgcagactgtcctgccctgcagcatgtgcctaaaggctcaaggggatattcctctggggtggccactcccaccaccctgaccctgtctttctctctggcctgctgctctctcaacatcacatacagcttcagctgcctggaggccagaaggaaagggcagtgcaggggaggcctgagcccgacttagccagccctggctgttgtattaccaaagcagggtccatgtttgctgccttaaccctgtctcctctctgttactcagagggcctcatctcagacaaggcccagcctgctttttctcagccctgactttctaatgggctttcccccctaggtcagtcttgctggatttgtgcttttcttttgtggtttctctggccctgagaatagcatggggcttgtaaacctttgggctagatccctcctttcattgctgttgtctctgctcttccctctcctggctgtggttatttattattagtggtgtggcactgggagctgctcctaaggaagcagggagcaaatcccacctttaccccaccttcctgggaaaggcctccaaagcaaaggatctggaccagtttccctgctgtgctgtggcccaggccagagcctgtgggcaggcaggcagggcatagcgacagtgtgggacctgcccccagcttctgccacgctttatgcccttgcctctctggacgctctgcaccaaccccaggctactgagccaccttccctcctcatgccttccctgagctttggtgcatctcatctggactatgggttgtactgtgaccatcccaacacctcaccctctgtctacaaggaaatgggaggtggagcctcctggctgagaaattgttttgcaaatggatctatttttgtatgaaaaaaaaaatttttttaaagaaaactgttccttccccctttcccctccataatgtaagaagctttggtggcaggttacagagttctgggatttcttctcacaggcccaatcctgaatgtgcccctggaccttctggacccttgagtccaaggcagatcctctctcccagggaatccgacacaggaggaaccccttctctggttgagctgggccaggcctaagagtagcaggaactctaagaccacagagttttttataaatgtataaatgtatcaagccaaatgtgcagatgctaactggacattctggggaactgggcaccaggagtgccttcatacactgtaccccagctctcttctaaaagagaagtgggtgggcacactgaactgtttggtggccccaaccacaggaagctgcaattctctggcttagggtgatacttttgccctccttgtgcccctctcagctttccatccccagctaggaagaaagaatggcactcttgggcttggcccagaattagagttattagagcaagagagagcttaggaagcatgagggcaactatagtgaggccttattgccaggagggagggttttggttgctggcgcttgtgtataaaggggcaagagcagctcctttggactattcctgggaggactctgatgcagggcgtctgttgctcccctgggtcacctcctccctgctcgctgacatctggggctttgaccctttcttttttaatctacttttgctaagatgcatttaataaaaaaaaagagagagagagagaggtgtgagggacaaaatgcaaacctatttcccttgcctcataggcttctgggatgtcatcacctccagtttgttggttttgtttccaactgttaataaagcattgaaacagtaaaaaaaaaaaaaaa

SEQ ID NO: 911 - DNA, 904 bp, HOMO SAPIENS
agtttgaagaaggctcttacagcatggccgccggtactgcagctgccttagcgtttttgagtcaggagagccgaacgcgggccgggggtgtcgggggcctacgggtcccggccccggtcactatggacagttttttcttcggctgtgagctctccggccacacccgctccttcacctttaaggtagaggaagaggatgatgcggagcacgtgctggcactaaccatgctctgcctcaccgagggagccaaagacgagtgtaatgtggtagaagttgtggcccggaaccatgaccatcaggagatcgcagtccctgtggccaacctcaagctgtcctgccaacccatgctcagtctggatgacttccagctccaaccacctgtaaccttccgcctgaagtcgggctctggccctgtgcggatcactgggcggcaccagattgttacgatgagcaatgatgtttctgaggaggagagcgaggaagaggaagaggacagtgatgaggaagaagttgagctgtgccccatccttcctgccaaaaagcaggggggcaggccctagccctcctaggtcagctccatgtgccatgcaccgccatgcaccctgttccctgacaagtttcaacaattgtaaatatttcttccttgaagaggagagcttgggtgggggttgggtgggagggacttgggtctttggtgctaggagagggcctgtgctccacacagccgtggttttctgattttcaccatgcccggggcctcccttcccacctgcctgtgagaattggaggttagtgcctgaagctcagagctacacatttttaatagtttttacatttttggataaaggttgaaataaagtggtgtggagtttttgcaaaaaaaaaaaaaaaaaaaaaaaaaaaa

SEQ ID NO: 912 - DNA, 4125 bp, HOMO SAPIENS
gttttgttcctcccactccagacactggacgctcctagcaaccggctagcagctcggtttccaaggactgtaacgccttcaaccgcccgccgcgatagagtgcccacgaccctgcctcgggaatcccgctctgcaccgccccaccagacccggactcggagccgcgagcggcccgagatgagcagcaatgactcctcccttatggctgggatcatttactatagccaggaaaagtacttccaccatgtgcagcaggctgcagctgtgggcctggaaaaattcagcaatgaccctgtgttgaagttctttaaagcctatggagtcctcaaagaagagcacatccaggatgccatcagtgacctggaaagcatcaggcatcacccagacgtgtccctgtgctccaccatggccctcatttatgctcacaaaagatgtgaaatcattgaccgagaagcaattcaggagcttgagtacagcctgaaggaaatacgcaagacagtcagtgggactgcactgtactatgctggccttttcctctggctcataggccgccatgacaaggccaaagagtacattgaccgcatgctgaagatttctagaggcttcagagaggcaatgtacttcatgatgcagcagaactactcagaggccctggaggtggtgaaccagatcactgtgacttcagggagcttcctgccagccctcgtcctgaagatgcagctgttcttagctcggcaggactgggagcagacagtagaaatgggacacagaatcctagaaaaagatgagagcaatattgatgcctgccaaattctaaccgtgcatgagcttgcaagagaaggaaacatgaccacagctaccaatcacgttagaaatctgattaaggcactagagacaagggaacccgaaaatccaagcctccatcttaaaaaaattattgtggttagccgactgtgtgggagtcaccaggtgattctagggctagtgtgtagtttcatcgagcgcaccttcatggccaccccctcgtatgtccatgtggccacagaactgggctatctcttcatcctgaagaaccaagtgaaagaggccttgctgtggtattcagaagccatgaaactggacaaggatggcatggctggtttgacagggatcatcttgtgtcatatcttagaaggccacctggaggaagctgagtaccggctggaattcctgaaggaggtgcagaagtcccttgggaagtctgaggtgctaattttcctccaagccctcctgatgtccaggaagcacaagggggaggaagagaccacagcgctcctgaaggaggcagtggagcttcacttctccagcatgcaaggcatccctcttggctctgagtactttgaaaagctggacccgtacttcctggtctgcattgctaaggagtacttgctcttctgccccaagcagcccaggttaccaggccagatcgtgtctccacttcttaaacaagtcgccgtgatcttgaatcctgtagtcaaagcagcaccagctctgatcgaccccctgtatttgatggctcaggtcaggtattactcaggagagctagagaatgcccagagcatcctgcagcgttgcctggagctggaccccgcctccgtggatgcccatctcctcatgtgtcagatctacttggctcagggcaactttggcatgtgcttccactgcttagagctgggtgtcagccacaacttccaggtccgagatcaccccctctaccacctcatcaaggccagggccctcaacaaggctggagactatccagaggccataaagacgctgaaaatggtcatcaaattgccagctctgaagaaggaagaaggcagaaagttcctcaggccctctgtgcagcctagccagcgggcatccatcttattggaactggtggaggccctccggctgaatggggagctacatgaggccaccaaggtcatgcaggacaccatcaatgagttcggtggcacaccagaagagaaccgcatcaccattgccaacgtggacttggtcctgagcaagggcaatgtggacgtggcgctgaacatgctaaggaacatcttgcccaagcagtcctgctatatggaagccagagagaagatggccaacatctacctgcagaccctcagagacaggcgcctctacatcagatgctaccgtgagctctgtgaacatctgcctggcccccacaccagcctgctactgggcgatgccttaatgagcattctggagcccgagaaggccctggaggtctatgatgaggcctatagacagaacccacatgacgcctccctggccagcagaattgggcacgcttatgtgaaggcccaccagtatactgaggcaattgagtattatgaggctgcccagaagattaatggacaggactttctgtgctgcgatctgggcaaactgctcctgaagttaaagaaggtcaataaagcagaaaaagttttgaagcaggcactggaacatgacattgtccaagacatcccatccatgatgaatgatgttaagtgcctgcttttgctggcaaaggtttacaagagccataaaaaagaagctgtgatagaaactttgaacaaggccttggacctccagtctcggatactgaagcgagttccactggagcaaccagaaatgattccctcccagaagcaactggcagcctctatctgcatccaatttgcagagcactacctggcagagaaagagtatgacaaggcggtacagtcttataaggatgtcttctcctacttgccaactgacaataaggtgatgctggagctggcgcagctctacctgctccaggggcacctggacctgtgtgagcagcactgtgccatcctcctgcagactgagcagaaccatgagaccgcttctgtgttgatggctgacctgatgtttagaaaacagaaacatgaagcggccatcaatctttaccaccaagtcttggagaaagcgccagacaattttttggtattgcataaattaatcgatctgctaagaagaagtggaaaacttgaagacattcctgccttctttgaattggccaagaaggtgtctagccgggtgcctttggaaccagggttcaattactgcagaggtatctactgctggcacatagggcagcccaacgaagccttaaagttcctgaacaaggcacgcaaggacagcacttggggccagagcgccatctaccacatggtgcagatctgtctgaatccagacaacgaggttgtgggcggagaggcttttgagaaccagggagctgagagcaactacatggagaagaaggagttggagcagcagggtgtgagcaccgccgagaaactgctgcgtgagttttacccacattcagactccagccagacccagctgcggctgctgcagggcctctgccggctggccaccagggagaaggctaacatggaggctgcgctgggcagcttcatccagatagcgcaggctgagaaggacagcgtccctgccctgctggccttggcacaagcctacgtgttcctgaagcagatccccaaggcgcgtatgcagttgaagcgcctggccaagaccccctgggtgctgagtgaggctgaggacctggagaagagctggctcctgctggctgacatttactgccagggcagcaagttcgacctcgccttagaactgctgcggcgctgtgtgcaatacaacaagtcctgctacaaggcctatgagtacatgggcttcatcatggagaaggagcagtcctacaaggatgcagtcaccaactacaaactggcctggaagtacagtcatcacgccaaccctgccattggcttcaaacttgctttcaactacctgaaggacaagaaatttgtggaggccattgaaatctgcaacgatgtcctcagggagcaccccgactaccccaagatcagggaggaaattttggaaaaggcccgaaggtccctgaggccctagctggggtcaaggggcctggaccagtagaagccatcaacctactgaagttgtgtggagggatggaaagtgggtcagtggagaagggattcagaaaatgacacattcttccccatttaaaaaaaaaaaaaa

SEQ ID NO: 913 - DNA, 4033 bp, HOMO SAPIENS
accgcgcagcggccttttgtcagcgcgcagggccaggagagctctcatttcctcccagcctcgtgcgggaaatggctttaattctgacggcagggctgtgagggactagcgggaacccgagccttttgtcaaggaactgcggcgtcggtggccagtcatccccgccgccgcggagccgctgcactgctgggggatctcccagcagctctgacgagcgcgggctgcagcatgggcagaaaacgctgccctgcagattagctgggtggattttttaagcgcaccccaccccccaaacccataaaataacaaaaccaacccgcagtggccgaccggagatagctaagatgccgcgcaggagtttccacctggatgtttgaggttgtgtagatgtggccggcacccttgagagtggagctagggggtgcagactgagcagtgaacagaaggagccttggacagggctgggccagcctcccgagttccaggagcgaattgcaaacccaccgggaaaatgagcgaagagacggtccccgaggctgcctcgccgccgcccccgcaggggcagccttactttgaccgcttctcagaggacgaccccgagtacatgcgccttcgcaaccgggcggcggacctgcggcaggacttcaacctgatggagcagaagaagcgcgtcaccatgatcctgcagagtccctctttcagggaggagctggaaggcctcatccaggagcagatgaagaaggggaacaactcctccaacatctgggccctgcgacagatcgcggacttcatggccagcacctcccacgcagtcttcccgacatcttccatgaatgtctccatgatgacgcctatcaatgacctccacacagctgactccctgaacctggccaaaggggagcggctcatgcggtgcaagatcagcagtgtctaccgactcctggacctctatggctgggcccagctgagtgacacctatgtcacgttgagagtcagcaaggagcaggaccacttcctgatcagccctaagggagtttcttgcagtgaagtcacagcgtccagcctgatcaaggtgaacattctgggagaggtggtggagaagggcagcagctgcttcccagtggacaccacaggcttctgtctgcactcggccatctatgcagcgaggcccgacgtgcgctgcatcatccacctgcacacaccggccacagcagcggtgtcggccatgaagtggggcctcctgcctgtctcccacaatgccctgctggtgggggacatggcctattatgacttcaatggggaaatggagcaggaagccgatcggatcaacctgcagaagtgccttggacccacctgcaagatcctggtgctaagaaaccatggagtggttgctctgggtgacacggtagaggaggcattttacaagatcttccacctgcaggctgcatgtgagatacaggtgtcggctctgtccagtgccgggggagtggagaacctcatcctcctggagcaggagaagcaccggccccatgaggtgggctccgtgcagtgggccgggagcacctttgggcctatgcagaagagtcggctgggggagcatgagtttgaggccctcatgaggatgctggacaacctgggctacagaacaggttacacgtatcgccacccctttgttcaagagaaaaccaaacacaaaagtgaggtggagattccagccacggtcacagccttcgtgtttgaggaggacggtgccccggtgcccgccctgcgacagcatgcccagaagcagcagaaggagaagacccgctggctcaatacgcccaacacctacctgcgggtcaatgtggccgatgaggtccagaggagcatgggcagcccccgacccaagaccacgtggatgaaggctgacgaggtggagaaatccagcagtggcatgccgattcgcatcgaaaacccaaaccaatttgtgcctctctatactgacccccaggaagtactggagatgaggaacaagattcgagaacaaaaccgacaagatgtgaagtcagcggggcctcagtcccagctcctggcgagcgtcattgccgagaagagccgaagcccgtctacagagagccagctgatgtccaagggagacgaggataccaaagacgattcagaggagacggtgcccaaccccttcagccaactcactgaccaggagttggaggagtacaagaaagaggtggagaggaagaaactagaacttgatggagagaaagaaactgccccagaagagcctggctcacctgcaaagtctgcacctgcttctccagtgcagagcccagcgaaggaggcagagacaaagagccctttagtctctccttccaagtctttagaggaaggtactaagaagacagaaacaagcaaagccgccaccacagagcccgaaacaacccagccggaaggggtggtggtcaacgggagggaggaggagcagacggcagaggaaatcctcagcaaaggcctgagccagatgaccaccagtgctgacacggatgttgatacctctaaggacaaaaccgagtcggtcaccagcggccccatgtccccagagggctcaccttccaagtctccctcaaagaagaaaaagaaattccgaaccccctccttcctgaaaaagagcaaaaagaaggagaaagtggagtcctgattcatgacacccttgggctccctcctgcctcctctctctcctccccttcccttctcccatctctgtccctgcaagcacagggctaaggagggatagagtaggaccctggaccacattcggaaggggaacttagagatcacccgaccaacccttcgttttacagttgcccaagagaaatcaggtgacttgcccaaggtcacacagctagttagcggcagagcctgcactcgaattcaggtctcctgacttccagtccagtgctccttctactacacaacactgcctagttgtgggctgcctttgtttggatgctgtccaccaatctgagcctagggcaagaaggccagaaatgggccgtgagctctcacaggctcagactaaatcagaggtcaaggcttcccctgagtaaggtccatttcttcccaggaatccaatctcctgtggatggagctatctctacatttaaaaatctcttctcttttccactttgggtccctgccctgctgctcaaagtgactagccaaattgacccctccaacagaaagtaatctttgttcccaagggctgatggcttagcttgtactaccccaaacattaaccctgagctttcttcatggaacctcttgaatgatggatggaagagctataagaggtggtaggcataggggcaagccatgtaagctgaggattggggatggtttcatcaacataagaggccaggaacttgacccctttgaattgtgcatctcaggcacttcaaaactaaaaccaaatttagcataggaaaaagttgtttaatgctcagggcagaaatttggggaagttgaaatcctctgttggctttgggttgtataaggaggatcaaaacaacagaggaaatgctgactttctagctttgcatgacacctggagcaatgcactgtacctgcctcactcctgtccagtggtcaggtttcccctgaccttccctcacccccagaaacacttgcttacagaccgaaactggcatcttactcttggcaccttgacttgcaccctctgaggttccaactcagtcattctttgtccagcagaggagaatcagaaatgagcccttcaggattaatcctcttgcaccagctctcagagaaatgctgggtatccctgtccttgtccctatctgtccatcctggggcctggtaatggccacagttattgttttaaatgccaacactgtcttctcatgttcttccgtggggcattgattaatgagcatttgttggctcctaaaaattagacaatccattctcttgaaagcaccgtgtcttgaaagaatatttttccttttgatctgactatcgt

SEQ ID NO: 914 - DNA, 5809 bp, HOMO SAPIENS
ccagccaatgggcagtgaggcctgacgcggggggcggacgctggggccgagggtagcttgagcgcggcggcggcgttgttcagtcagagcgagaacattccagaggtcgcccagctccggcgctgacgggtgtggaccgcggacgtcgctgggacagcccctccccgctgctcggcggcggcacctggcccggccgctcctcgctgcgcttcgcctccgcctcctcggactcggactcgggtttatatcgcgcctcacttcatcccagtcccgggcgagcagcgttgggtttatgtctttatttgacgaaaacgagctgttgcgcagccattggtacctgtattggggaaacatagcatacaagcaagaagcttacagcctcagtggcgaaaattttttcatgtcagagaccgagaactcttgcagtcgtttatgtcatcccttcttctccagacagaagataccaaaaagttgcaatcaaagatctcttcatcttattgataaagccactaataagccaaaatgtctgtcaatgtcaaccgcagcgtgtcagaccagttctatcgctacaagatgccccgtctgattgccaaggttgagggcaaaggcaatggaatcaagacagttatagtcaacatggttgacgttgcaaaggcgcttaatcggcctccaacgtatcccaccaaatattttggttgtgagctgggagcacagacccagtttgatgttaagaatgaccgttacattgtcaatggatctcatgaggcgaataagctgcaagacatgttggatggattcattaaaaaatttgttctctgtcctgaatgtgagaatcctgaaacagatttgcatgtcaatccaaagaagcaaacaataggtaattcttgtaaagcctgtggctatcgaggcatgcttgacacacatcataaactctgcacattcattctcaaaaacccacctgagaatagtgacagtggtacaggaaagaaagaaaaagaaaagaaaaacagaaagggcaaagacaaggaaaatggctccgtatccagcagtgagacaccaccaccaccaccaccaccaaatgaaattaatcctcctccacatacaatggaagaagaggaggatgatgactggggagaagatacaactgaggaagctcaaaggcgtcgaatggatgaaatcagtgaccatgcaaaagttctgacactcagtgatgatttggaaagaacaattgaggagagggtcaatatcctctttgattttgttaagaaaaagaaagaagagggtgttattgattcatctgacaaagaaatcgttgctgaagcagaaagactggatgtaaaagccatgggccctcttgttctaactgaagttctttttaatgagaagattagagaacagattaagaaatacaggcgccatttcctacgattttgtcacaacaacaaaaaagcccaacggtaccttcttcatggtttggagtgtgtggtagcaatgcatcaagctcagcttatctccaagattccacatatcttgaaggagatgtacgatgcagaccttttagaagaagaggtcatcatcagctggtcggaaaaggcctctaagaaatatgtctccaaagaacttgccaaagagattcgtgtcaaagcagaaccatttataaaatggttgaaggaggcagaggaagaatcttctggtggcgaagaagaagatgaagatgagaacattgaggtggtgtattcgaaggctgccagtgtaccgaaagttgagactgtaaagtcagacaacaaggatgacgacatcgatattgatgccatttaaagggatggatgcaacctagcttaacagtataatgctgcaaattttcctccattatcagccagaagtgcaacatgtatgtgcaaaagctaaaatggcttaacatcatgctacactttacactaaaaatctattactgtgagtggtctgttattaagcccaatgagacatctagggagtccatacacatcagtgagcagatgtagtttgcttatttatagcatgtttctttttgaaaaactagtggtggacacatttggatcacatttatacagttataaaaataaaggtttgattttggtcgttcttcagatgtttggctctgaatgacttaagctgaagtaactggctccttactttaaatgttctgccatcatttcacctgatgagcattcttggagcctgccagatattgttaggtcctggggctgcaaagaggtcctcaacaggatgtaaagcaaacttaattgtaattaatttattcagcccattaagaaagtactaaagttttatctctgtagttcctcaaattggcatctggtaatgtacattgtgaggtagactgataatgaaatgacagtgcaacatcttaaccaagaagtaaatatgacctcagtgtcctataaataatgtaagagcaggatttgaaacttggagagctgttttctcatttcatgtacacttgccccaaattgtctttgaagtcgtgtgcattgcacgttggatgagccagggaaattattacattaacaagcattttgtgtgtacgtagtagttactttgtactgagagaacttgctttggggtgcaattaataaactgattttatttgggagaaacaaggaagggtgcacttaactagcaacctaagcatgatttttcagcttttgcccttagggtttaaattacaattccaaaatgttagacatactgtattttttcgttcagtgtggctttaattttcccctcttgcagtttgttctgtaatgccttttacatttggacacatagtttatgctttttagattttggttgctttcttgccaaaataagtgttaactgtgtttcaaacttgattttctttcctttttcttttttttttcttccagaatgtcttatttaaaaagaaagctaaaagcatacttctaagtcagagcctctattttggtgtaagacttgggatattttttacttcacattgaatatagccaggcacccaagaagtctgatggccacctgagtgcaggtgacaaggacctgacagagcccatgcagggctttagatttggacacacaagagttgataacttcctcatgaactccttgcctgatctaaactcatattatgggttctgactgtttgagtaatcatcttcaaggttaaacctcttggcagttacccttttcacaaagtgcacagtgggaatcgagaatcgatagggttaattttggagcagtggcttataccattcacctctgtttttttgtgattatttcacagataatgagaccttaataacaaataggcgtaaaaaaattttcacattgaaatgatagaaacatttgatgtaataaaacttggttggcttgatattttaaggaattgaaacctagcaatcttattggagagacaagaattggtctccagctgcctttgatcaagattcgggtgcaagtggagcaggagccatatacctggagggaatgtgctttgtcacaccaaagaggatttttttttcttcaaacttgtatgttgcctaggtttcaaattctttgccgcaaggctgatctgctttcattaactggaattctgtaggagatactggtgacctaagctaagttgcactcagcatactcagtgtcaagctaatgaggttctattataaaggttctacttttaatctgagggaaaacatgttcagggcttctagaacactaaaaaatttggcttaaaccagtgttcagtctggtgccaaacttcgaatggaatacaaattcacataatctgaactttgttcacaggttatcctaatagagtaattcttcactttgctctattgaactgtcttaaggatttgtttaaacagctaagttacttgattaaaataatgataaaattgtattttgtctttgctttaatattaaagttaacaagttttcattttataatgagatcaaagcattggaatctgccctgttttgtagccgttgctttggatttgtgttggatgtatcctgcagttacacttgccagccccactcacaaaagttgttcatttcattgggtcactggctttatttgctagtcttgtctgtgaactgagcatctgcctcagttttattacttgaaatcttggcaggtgcttaatagggaacatacatacagctatgtaactgtgaataattgtatatatctctagttaagaatgagggaatggggaggtttgctttctaaacaagtgcattctgaaattgacttaaaaatttttagtgtgggtcctaaagtttagagatgggcaaggaggtctctaatccaccgcttcccgcttgagaagggaggggtatcaaaattgagccccaagctgtttgttccagtgtaccaagcactgactttatgcctttggcctggagatggcagaagtgaaagctggccatctgcaaaaagcagataagtgagtttgaaccttttgcattttgttagctcagtcagtcctcatcgtggtcctgaggcataggtactgttgtaccaaggtcacttatctaacaaaataacccttcatgtattttaaatttatttgacaagtctgcagacaatccttatctaaccagctattttcttaattgctacagcttgacctaccagtattccggagtaaccagcaaatgcaaagttaaccttgttcctgcatcatctttttgatggttcaaatttcagcctccctgactactacaaagccagagcagtcttagtaccagaaacagtgttgcactttcgttgcatgtgctgtgtgaccccaaggggacagggagtcactttggtcatctctgtccccagtacagatcttgattcatagtgacattccataagtggggtgacagcaaatgacttgcaggtagtctcattgtaggtttgtgcaccagagtgaccctgtgagcctttgttaataggttgggagctcagggtgtttatgtccacctgtctggtctagccaaacagtttttttctgggaatcaaatttctgtggtttttatggccagaaattttaaggacttgtgtgtgctgggatatgagaatagaagctacagagttcttttcttgggacctagactgggaggtgcaatgtcaggacctccaggtgaatggtaggatctgagttgaccctgcagttcggttatgcagtcaattatttctttttaagaggaggaggattcacttgggtgttgggatcaaatttggattctgtcccaggccttactgtaaaactaggggattgcctttccatatctgctgggggtggagacccttatgtgcagcactcaatcccactggaagcctaatgctgcagtcagaagcaatgcctggctggggcagtaggggaaattccacccaattttgctatgagcctaaaacctctttaaaaacggtcagttaactaaaaaataaaaatcaagtctttaggagagtagaaaacacaattaactaaaaagcagggacatctgaaagagacgtattaagttaacatttttaaaaatccaaatgaaagtaaatggaataaatgtatcaggtaaaggacaagttgtaagcttggatttttaggtctagcaatacactgtttacaagagcatcacctaaaatgtgacaaaagatgttgaaaggatgaaaaaaggtatagtagacatacactaaccaaaaatgtagctctttgaatctcagaaaaaagtagattttaataaagtgtgaaagttgtcaatcaaaaaaaaaaaaaaaaaaaaa

SEQ ID NO: 915 - DNA, 4087 bp, HOMO SAPIENS; identical to SEQ ID NO: 238

SEQ ID NO: 916 - DNA, 2245 bp, HOMO SAPIENS
agcggaagtcacttctcacacgcctttcttattggataccggcttttcatggggccgagcgccgctgggtaggcggaagtagccgcaggcatggcggcggctatgccgcttgctctgctcgtcctgttgctcctggggcccggcggctggtgccttgcagaacccccacgcgacagcctgcgggaggaacttgtcatcaccccgctgccttccggggacgtagccgccacattccagttccgcacgcgctgggattcggagcttcagcgggaaggagtgtcccattacaggctctttcccaaagccctggggcagctgatctccaagtattctctacgggagctgcacctgtcattcacacaaggcttttggaggacccgatactgggggccacccttcctgcaggccccatcaggtgcagagctgtgggtctggttccaagacactgtcactgatgtggataaatcttggaaggagctcagtaatgtcctctcagggatcttctgcgcctctctcaacttcatcgactccaccaacacagtcactcccactgcctccttcaaacccctgggtctggccaatgacactgaccactactttctgcgctatgctgtgctgccgcgggaggtggtctgcaccgaaaacctcaccccctggaagaagctcttgccctgtagttccaaggcaggcctctctgtgctgctgaaggcagatcgcttgttccacaccagctaccactcccaggcagtgcatatccgccctgtttgcagaaatgcacgctgtactagcatctcctgggagctgaggcagaccctgtcagttgtatttgatgccttcatcacggggcagggaaagaaagactggtccctcttccggatgttctcccgaaccctcacggagccctgccccctggcttcagagagccgagtctatgtggacatcaccacctacaaccaggacaacgagacattagaggtgcacccacccccgaccactacatatcaggacgtcatcctaggcactcggaagacctatgccatctatgacttgcttgacaccgccatgatcaacaactctcgaaacctcaacatccagctcaagtggaagagacccccagagaatgaggcccccccagtgcccttcctgcatgcccagcggtacgtgagtggctatgggctgcagaagggggagctgagcacactgctgtacaacacccacccataccgggccttcccggtgctgctgctggacaccgtaccctggtatctgcggctgtatgtgcacaccctcaccatcacctccaagggcaaggagaacaaaccaagttacatccactaccagcctgcccaggaccggctgcaaccccacctcctggagatgctgattcagctgccggccaactcagtcaccaaggtttccatccagtttgagcgggcgctgctgaagtggaccgagtacacgccagatcctaaccatggcttctatgtcagcccatctgtcctcagcgcccttgtgcccagcatggtagcagccaagccagtggactgggaagagagtcccctcttcaacagcctgttcccagtctctgatggctctaactactttgtgcggctctacacggagccgctgctggtgaacctgccgacaccggacttcagcatgccctacaacgtgatctgcctcacgtgcactgtggtggccgtgtgctatggctccttctacaatctcctcacccgaaccttccacatcgaggagccccgcacaggtggcctggccaagcggctggccaaccttatccggcgcgcccgaggtgtccccccactctgattcttgccctttccagcagctgcagctgccgtttctctctggggaggggagcccaagggctgtttctgccacttgctctcctcagagttggcttttgaaccaaagtgccctggaccaggtcagggcctacagctgtgttgtccagtacaggagccacgagccaaatgtggcatttgaatttgaattaacttagaaattcatttcctcacctgtagtggccacctctatattgaggtgctcaataagcaaaagtggtcggtggctgctgtattggacagcacagaaaaagatttccatcaccacagaaaggtcggctggcagcactggccaaggtgatggggtgtgctacacagtgtatgtcactgtgtagtggatggagtttactgtttgtggaataaaaacggctgtttccgtggtt

SEQ ID NO: 917 - DNA, 1304 bp, HOMO SAPIENS
acttaaatcttcccaaatctggtgcccataccttctatggcaggggcttttagcaccattctttaacgttagacacataaccacagcctaatcacttgaaccatttaatccttaccagcctctagcattatcctaaaaccctgaacctcttccagctttcttaaactttcagcttttcttgaaacgactttttctgattctaagattattttaactgtaagtaggagaagacatctgaaatttaactatgatcagaaattcagattacaaaaactttgtttgctgtgctgtttgtaataaaataattccaccagccccttttggaaaaaccttcaaacggatccatgaatacaagccacttaagacacgcttttacactcacaaagacatactagatattggggcaaatattctgaaaaaagaagagcagtttcaagaagatatactcagagaacacattgcgaaagcagaagctgaagtatgggctcaggctaatgaacgtcaaaaacaagcagtggagaaagcacttgaagaagcaaatgacagacacaaaattgaaattcagattttgaaagaggaacatcagaaagatttacaggaagtgacagctaaaactaagacagagatgtatcaaaacatggatgacgaaatgaagagagagcacttggctgcagaacagcgcatggtccacagaatccaaaggattatgatggaatgccacagagagaaggtcgaagctgtggagaaagccagggctgaagaaagacacatcgcccaggaagcaatccaggcccagaaaagcaaagccgtggaggaaattgtgaatactggtgtcacagttattaaggatgagaagaccagtgtggcccgactgatgagggaaaaagaacatgaaatgagcatcctctatggcatagctcagaggcagaggcaagaagaggtacaggaagtgcttcaagaagcagagaaaacacatcaggccactcttggcaatatgatggataaactggctaacacccagggggagctgctgtctatagcaaaacaactgggaatcatgacaaattggaaagatttcctagaggaggaattacaggaaaccaggatggcatttcaaaaatacatcaattatacctttcctaagctttcaccaggacatgcagattttattctgccagaaagaaagaaaacaccttctaatcttgttattaaggagaacaaaacaactcttgattagaagtcttcagttgaaattccactacaaaagacatcattccagactaaataaatttactcaaaaacca

SEQ ID NO: 918 - DNA, 8672 bp, HOMO SAPIENS
gaatcggttcccgggtgatcctcgcgcctgccgctgctcggccgccgccgctgacgaggagctgcagcgcgccgggccgaggcctcgagccgccccgggagctggagctgaaggcgccgcgcggagcgcgcacctcagccctgagcccggcggcggcaggcgtcgctgtcttttctccttttccccaatatggcagcggcggacggcggcgggcctggtggggcctctgtggggactgaggaggatggcggaggcgtcggccacaggacggtgtacttgtttgatcggcgcgaaaaggagtccgagctcggggaccggcctctgcaggtcggggagcgctcggactacgcgggatttcgcgcgtgtgtgtgtcagacacttggcatttcacctgaagaaaaatttgttattacaacaacaagtaggaaagaaattacctgtgataattttgatgaaactgttaaagatggagtcaccttatacctgctacagtcggtcaatcagttactactgacagctacgaaagaacgaattgacttcttacctcactatgacacactggttaaaagtggcatgtatgaatattatgccagtgaaggacaaaatcctttgccatttgctcttgcggaattaattgacaattcattgtctgctacttctcgtaacattggggttagaagaatacagatcaaattgctttttgatgaaacacaaggaaaacctgctgttgcagtgatagataatggaagaggaatgacctctaaacagcttaacaactgggccgtgtataggttgtcaaaattcacaaggcaaggtgactttgaaagtgatcattcaggatatgttcgtccagtaccagtgccacgcagtttaaatagtgatatttcctattttggtgttgggggcaagcaagctgtcttctttgttggacaatcagccagaatgataagcaaacctgcagattcccaagatgttcacgagcttgtgctttctaaagaagattttgagaagaaggagaaaaataaagaggcaatatatagtggatatattagaaacagaaagccctctgattctgttcacattacaaatgatgatgaaagatttctacatcatcttatcatagaggagaaggaaaaagatagctttactgctgtggttatcacaggggtacaaccagaacacatacagtacttgaaaaattatttccacctttggacacgacagttagcgcatatttatcactactatattcatggcccaaaaggaaatgaaatacgaacatcaaaagaagttgaacctttcaacaatattgatattgaaatttctatgtttgaaaaagggaaggtacctaagattgtcaacctaagggaaatacaagacgacatgcagacgttgtatgtaaacacagcagctgatagttttgaattcaaagctcatgttgaaggagatggtgtagtggaagggattatccgttatcatccattcttatatgatagagaaacttaccctgatgatccatgctttccatcaaaattaaaagatgaagatgatgaagatgattgtttcatacttgagaaagcagctagagggaaaaggcctatttttgaatgtttttggaatggacgattaataccatatacatcagttgaagactttgactggtgtactcctcctaagaagagagggcttgcaccaattgaatgctacaataggatatctggtgcattattcactaatgacaaattccaggtcagcacaaataaattgacgtttatggatcttgagctaaaattgaaagataagaacaccctttttacaaggattttaaatggacaggaacagcgaatgaaaattgacagagaatttgctttgtggctgaaggactgtcatgagaagtatgataaacaaataaaatttacactttttaagggagtaattacacgtcctgatcttccttctaaaaagcaaggtccctgggcaacatatgcagcaatagaatgggatggaaagatatacaaagcaggacagctggtcaagacaatcaagacacttcccctcttttatggaagcatagtaagattttttctttatggcgatcatgatggagaagtatatgctacaggaggagaggttcaaattgcaatggaacctcaggcactatatgatgaagtaagaactgtgccaattgcaaagctggataggacagttgctgagaaagctgttaaaaaatatgtagaagatgaaatggcaaggctccctgatagattgtcagtaacttggcctgaaggagatgaattattgcctaatgaggttaggcctgctggaacccctattggtgcgttaagaattgaaatactgaataaaaaaggggaagcaatgcaaaagcttccaggaacaagccatggagggtcaaagaaactcctggttgagctcaaagttattttacattcttcaagtggaaataaagagattatttcgcatattagtcaacatggaggaaaatggccttactggtttaaaaaaatggaaaatattcagaagttggggaattataccttgaaattacaagttgtgttgaatgaaagtaatgcagacacttatgcaggaagaccactaccatctaaagcaattaagttttctgttaaagagggtaagccagagaaattttcatttggtcttctggatcttccttttcgtgttggagttccatttaatatccctctggagtttcaggatgaatttggtcataccagtcaactagtaactgatattcagccagttcttgaagcaagtggtttatctttacattatgaagaaataaccaaaggaccaaattgtgtaattcgaggtgttacagccaagggccctgtaaactcttgtcaaggcaagaattataatctgaaggttactctgcctggcttaaaagaagactcacagattttgaaaattagattactacctggtcaccctcgtcgactgaaagtgaaacctgattctgaaattttagttatagaaaatggaacagctttcccatttcaggtggaagttttagatgaatcagacaacataacagcacaaccaaaattgattgttcattgtaagttttcaggtgctccaaaccttccagtctatgttgtagattgcagtagttctggaaccagtattttaacaggatctgcaattcaagttcagaatattaaaaaagaccagacgcttaaagcaagaattgaaatacctagttgtaaagatgtggcacctgtggagaagactattaagttgcttcccagtagccatgttgcaagactacaaatattcagtgtagaaggacaaaaggcaattcagatcaaacatcaggatgaggttaattggatagcgggtgatattatgcataatcttatttttcaaatgtatgatgaaggagaaagagaaatcaatataacatcagctttagcagaaaaaattaaagttaattggactcctgagattaacaaagaacacttgctacagggtctgcttcctgatgtgcaagtaccaacatctgtaaaagatatgcgctattgccaggtttcattccaagatgatcatgtgtctttggaaagtgcgtttacagtaagaccacttcctgatgaacctaaacatttaaaatgtgaaatgaaaggaggaaaaacagtacagatgggccaagagcttcaaggagaagtagttataataattacagatcagtacggaaatcagattcaagcattttcaccaagttctttatcttctttgtcaattgctggggttggacttgatagctcaaatttgaaaacaacctttcaggaaaacacacagagtataagtgtaagaggcatcaaatttattccaggtcctcctggaaataaggatctttgttttacttggcgtgagttttctgactttattcgagtgcaactaatttctggacctcctgctaaacttctccttatagactggccagaactaaaggagtccattccagtgattaatggaagagatttacagaaccctattattgttcaactttgtgatcagtgggataatccagcaccggtacaacatgttaaaataagtcttacaaaagctagcaatttaaagctcatgccttcaaaccaacagcataaaacagatgagaaaggcagggctaatttgggagtattcagtgtttttgcccctaggggagagcatactcttcaggttaaagccatctataacaaaagtatcatagaaggacctataattaagttaatgattcttccagacccagaaaaacccgttcgtctcaatgttaaatatgacaaagatgcatccttcttagcagggggtcttttcactgattttatgattagtgttatttctgaagatgacagtatcattaaaaacattaatccagcacgtatttccatgaaaatgtggaagctgtctaccagtgggaaccgacccccagcaaatgcagaaacatttagttgtaataaaataaaagataatgacaaagaagatggctgcttctatttcagggataaagtaattcctaataaagtggggacatattgtatccagtttggttttatgatggataaaacaaatattctcaacagtgaacaggttatagttgaagtcctgcctaatcaacctgtgaagttagtacctaaaattaaaccacctacaccagctgtttcaaatgttcgctcagttgccagtaggaccttggtcagagatctacatcttagtatcacggatgactacgacaaccatactggaattgatttggttggcactataatagccaccattaaaggctctaatgaggaagatactgataccccactttttattgggaaagttagaacacttgaattccccttcgtgaatggttcggctgaaatcatgagtctggtgctggcagaaagtagtcctggaagggatagtactgaatattttattgtatttgagccccggctaccacttttatcaagaaccttagaaccatatatcctaccgttcatgttttacaatgatgttaagaagcagcaacaaatggcagcacttacaaaagaaaaggaccaattatctcagtctattgttatgtataaaagtttatttgaagccagccaacagcttcttaatgaaatgaaatgtcaagttgaagaagcaagattaaaagaggcccaattgcgaaatgaactaaaaatacataatattgacattcctacaacacaacaggtgccacacattgaagcacttctgaaaagaaagctatcagaacaagaagaactgaagaaaaaacctagaagatcgtgtactcttccaaactatactaaaggcagtggagatgttttgggaaagattgcacatctagcacaaattgaagatgatagagctgcgatggttatttcttggcatctggcaagtgacatggactgtgtagtcaccctaaccactgacgctgcacgtcgtatctatgatgaaacccaaggtcgtcagcaggtgttgccccttgattctatttacaagaagactcttccagattggaaaagatctctacctcatttccgaaatggaaaattgtattttaaacccattggagatccagtctttgctcgagacttgttaacatttccagataatgtagaacattgtgaaacagtatttggtatgctgttaggagacaccattattttggataatctggatgcggccaatcattatagaaaagaggttgttaaaattacacactgtcctacactgctgaccagagatggagatcgaattcgaagtaatggaaagtttgggggccttcagaataaagctcctccaatggataaacttcggggaatggtatttggagctccagttccaaaacagtgtctgatcttaggggaacaaatagatcttcttcagcagtatcgttctgctgtgtgcaaactagacagtgtgaataaggatcttaacagtcaattagagtaccttcgcactccggatatgaggaagaaaaagcaagaacttgatgaacatgagaaaaatctcaaactaatagaggaaaaactaggtatgactcccatacgtaagtgtaatgactcattgcgtcattcaccaaaggttgagacgacagattgtccagttcctcctaaaagaatgagacgagaagctacaagacaaaataggattataaccaaaacagatgtatgagaggtgacagagagaagaggccattggtctcagtaagaatgccctgctttctgcatctctgtttcagaagaccaagagggtgacttaccagactgagtatttctggggacaatacaagtacctgggcatgaatttccatttcgattcagatgggactggaaacaaccattcaattttatgaatcttactggacattatggatttactggaattattccagacattatgccctttggttgtcactaccttgcaaatgtgtaagaggaaaatgtgctaatgtggcagtgactgtaaaactggcacatggcatttattaatcctgaagaaaagtacatgtactatttttcagtataaatataatgaacatgtcagaactatttcttgaaaacctttttattacttttgcgtgaatttatttaacaaagatgttttgtcttttgtgtaagggaggttctagaggctagatgtttaattgtaaatatgtgaggaaactcaatgcagaattcaggataaaaattttaaaagcacaggtatttgggaattgaaatgttaagatacccagaacaacattaaatcaatgagtgaacttgtgacagtggtagcatttcaaatttcaaaagacttatcctgtgtgtgtgtgtgtgtgtatatatatatatatatataaatatatatatataaaatattcagcagcaccaagttttataactattgtttgtttgactttattaatactagaatatgtagtctcagccttaattttacatttacattattttgtaattttttattactatttttaaggggttaaagagaacatacattctcacattagtgtactttctggtagaaagttgctgcaaaaacatttgaaatgtatattaacctaatgtatgtcatatatatgtctttgtgtaagttcaagactattgatctgtgaagttattttgtaaggacatacatttggtaagtaagtttgtgtcccaggaaatgtatgtgtttttaaaccctttctaaatatgcaggccattaataaataagattgtttcttccctactgaatagataagtgtttttcttttttaaaattggaagcttcataaaagttatcttgttaaaaaacgatgatgatgttaacctatctatctttataattggaaattatttaaactgtttgttgttacagaagaaacaaaatggtaattacagaattagctgtggggaagattggctcccatggtactacaggttgagtatcccttattcaaaatggttgggacctgaagtgttttggattttggttttttgtggggtttttaaattattattttggaatatttgcattatatttaccaatttagcatccctaatccaaaaatctttcattagaaattggaaatgcttcaatgagcatttcccttatgtgtcatatctgcgctcaaatgttttgaattttggaacatttcttgtttctgacttttagattagggatactcaccccgtaccaatatttggagtccttagacattagattatatgaaaatgattgattgataggtaagaaaggttaaagagaaatgactttttaggaactagacttgaacgtataattaatatgtggaactagtttgcttttataattcattgtatcaagaaggagtcatgttttaaatccaaggcattgagactatctagaagcaaaaaagttggttttaaaaattctttttattagaagtgtgtttaaaaacatgtctttttttcccttgagcgacagtggcctcactacattgcccaggctagtcttgaactcctgggttcaagcagtcttcctgccttggcctcctaagtagcagggattacaggcatgcacccacatgccaatttttattgcttaaaatggcgagttctatggatattatctagccccaagcccatatctgtacacttttgttcattttataataccagaaagaatgttctatcagtaaaagaaggtttttaagtatgaatctccatttttgtggagtttttctaccctgtaaaaattaactttgtggttcccagtaattacagtaaggagtttttctatattttcacagttggatttatctaaggatatttctcagcatattaaggaatccttttctacatttgagcaaatactgaggttcatgttgtaccaaataataataaattgcttttgtgtttaatatgtaacacgtaagaacaattgaaattttcttctaagatttaatactagtcttttagtataaaggaatgtaactggagaaaaaaattaatgctacagccatttatcctgtgttatgtgttatataatctgaaatttgtcacaatgttacaatcaggaagttttttttctggtttcttcttccaaaggaaaataatagcctacttgtattttgaagtaactgaaataaaactctctccaagcctttttgcacatta

SEQ ID NO: 919 - DNA, 3958 bp, HOMO SAPIENS
aaggaagcggatccacggccgcacagctaaacagcaaccccctacccgcttcgtctccctccgccgctatcggggcctaagcgggagcggctggcacggcgtcactgggtgggctggggcggaagtggaggcggagggagacggtggcgtcgtccgcggggccctgggctctcgcggcgaggccctggtgggcgcgaggcagggggagggggaggaggaggagcccgcggcccgggcggcggcggctctcgggttctccgtagggccccgcctcggagcgggcggcggcggaggaggagactgaggagcaggatggcggcctcggccctgtacgcctgcaccaagtgtacccagcgttatcctttcgaggagctctcccagggccagcagctctgcaaggaatgtcggattgcacatcctattgtaaaatgtacttactgcagatcagaatttcaacaagagagcaaaactaacacaatttgtaagaagtgtgctcaaaatgtgaagcaatttgggacgcccaagccttgtcagtactgtaacataattgcagcatttattggtaccaagtgtcagcgttgcacaaattcagaaaaaaagtatggaccacctcagacctgtgaacagtgcaaacagcaatgtgcttttgatcggaaggaggaaggaagaagaaaggttgatggaaagttattatgctggctctgtactttatcgtacaaaagagttttacagaagacgaaagaacaaaggaagagcctgggatcttcacattcaaattcatcttcttcatctcttactgagaaagaccagcatcatccaaaacatcatcaccaccatcatcaccatcaccatcgtcacagcagtagccatcacaaaatcagcaatctaagtccagaagaagagcagggactgtggaaacagagccataaatcctctgcaacaattcagaatgaaactccaaagaaaaagcccaaattggaatctaagccatctaatggagatagtagctctataaatcagtcagcagatagtgggggaacagacaattttgtccttataagtcaattgaaagaagaagtgatgtcacttaagcgtctcttacagcagagagaccagaccattttagaaaaagataaaaagttaactgaactaaaggcagactttcagtaccaagagtcaaatttgagaacaaaaatgaacagtatggaaaaagcccacaaagaaactgtggaacaacttcaggccaaaaacagagaactactcaaacaggtcgcagcattatcaaagggtaaaaaatttgacaaaagtggaagcatactaacatctccttgagaaagtcatttgtttagcatttcttcttacaatgtaaatttggggaaaaaaaattctgtgaagcccttaaattctgtgtagtagaaaaatatttttgcacaccaaatgaattggtgtgtttcctgttcacttttgtaattgatatacagcattttttaagttgtaaaacattcaaataaaacttcaactggtttgaagtaactttttaattatttgatatccaggaacttttttgccagcaatagtattaaacagttgtaaaggagtgcatgagtagtgctctttatgaaacgcaacatgcaataatagagtaggtatggtttcagaagtcagagcagcagggtttttttgttttgtttttgttttacactatgctaatttcagacaaacagttttcaatttagaaatacaaaaacttttaaactcgaaaaatggcgaacactggttttttgggaattgtgtttttactttgcatcaagatgaatttaggagaaaatcacggtgcttttattaaatgaacttcagatatatgtaaatttgttttttaaagttacatcattaacattagtaacctagcattttcattattggtataggaattaatgtttattgtacagtatctaaggtaaaatgtgtttctgttttgtaaaaactactgtagatttttacttacaagtgcctttttgccacctaatgtttttatttataggaatgctgatcttttgtacatacattttgttttaaaatcatgtttaataaatgtttgtatataaatgcatatgtacagaagcctatttcaaaaggaaatcaaagttgctagtaaaatgtttgagattacatttagaactaactgataatgcatatagattgtagaaaattttgtgatttgtttctgtgtgataagggaagctgttggtctttgaattcatttaattatgtcaaaatagttccccaaagatttaattttaagttgcttcttaaagagtaattttattttttatgtcatgtggcttcatattagtattgtgtgagttacatgttttgctttatattttataaaattttttaaaaattttaatgtttctgcaatgatccatgtatctgctttccctatgtgtggttatctaagttaatatttatgtacaatgtaatttgtaaatttaaagcaaatctgaaaaaaattaaatgatctttttaatccaatctgtgataatctttgaataaattggaatctactataagattcaggcattataagtaaattgtcctaaagtctttaaaattgtctataaaaggttaaggtagggtgggataggttatatgaagttattgactatattctgatccagcggttttcagcctgaaatagaatttatctcctagttattatcagttcagagttttagtttgattttaaagtattgctagatacactgtatagagtgagttgcttctcttaataatttatgggcaaagataaatttgcttcatgtaaaactgttactaaatttataagttttaaaggttttgttttatacaagcattgattgtgaatgtcatatcaaagattggctttcttaagaacacatgattgaaacaatttttttttaacatgacgtgtttcaatagactgttctcatagttcattataaagtgaataccaaataattctttgtccattttgaaagcataatatagggtaattttcaagtgatacaaaaagattcagttagaatcttgtaaactaaaccagtttatttttatgggatcttcatgtaataattttcttaaatttagtactctcaaccatgatagataatgccttaacatggattttaacgtttgcaggatttgctaaattcataagatagttattacctttctttgaaatttgtaatgttttatattcttgtttcatagccatttgtcagtccacagtggtcattatggttttactttttgatagttcttacaccttgttggagaaactacaaaagaaagttgtcctcgtccttccccttagctaacatcaaaattaaaaagttgaatattaatattagctaacattaaaatggaaggtaattcagttttagtgttagctaacattaacagtctaataatttagctttgtaaattccaaggctaaaaccctttcatgggcttcacagtatttagtcctaattaaatacccttctttattccatgaccttattttataacttaaatttttttgcaattgtataaattagtaattcagtcccagtcctggatctctgtagtgttttgacataataaactgatattctttaaatgtggacctgtaaggagatactatggtgtggtgtattgtgcttttagcctgttttccactattaattagcatttaccagtaagggtcattttgactcaagttatttatgtattaatagcctgtgaatattgcagtcctttttagattatattggtctaaatatgcattctgcagtgaacctgttaagctgttcacatgtatagactattgaaatactgtacttgtacacatctgactgttgacattttgtacttttttctagatccaatatttcacaataaaaaacttgtcaaaggctttgtattagtaaaaaaa

SEQ ID NO: 920 - DNA, 2692 bp, HOMO SAPIENS
aggggcggggctgggcggcaggtcccgggtgcggacatctggcagctggcagtgggcggcgtagagcactgcagcagcaatgacggagggcacgtgtctgcggcgccgagggggcccctacaagaccgagcccgccaccgacctcggccgctggcgactcaactgcgagaggggccggcagacgtggacctacctgcaggacgagcgcgccggccgcgagcagaccggcctggaagcctacgccctggggctggacaccaagaattactttaaggacttgcccaaagcccacaccgcctttgagggggctctgaacgggatgacattttacgtggggctgcaggctgaggatgggcactggacgggtgattatggtggcccacttttcctcctgccaggcctcctgatcacttgccacgtggcacgcatccctctgccagccggatacagagaagagattgtgcggtacctgcggtcagtgcagctccctgacggtggctggggcctgcacattgaggataagtccaccgtgtttgggactgcgctcaactatgtgtctctcagaattctgggtgttgggcctgacgatcctgacctggtacgagcccggaacattcttcacaagaaaggtggtgctgtggccatcccctcctgggggaagttctggctggctgtcctgaatgtttacagctgggaaggcctcaataccctgttcccagagatgtggctgtttcctgactgggcaccggcacacccctccacactctggtgccactgccggcaggtgtacctgcccatgagctactgctacgccgttcggctgagtgccgcggaagacccgctggtccagagcctccgccaggagctctatgtggaggacttcgccagcattgactggctggcgcagaggaacaacgtggcccccgacgagctgtacacgccgcacagctggctgctccgcgtggtatatgcgctcctcaacctgtatgagcaccaccacagtgcccacctgcggcagcgggccgtgcagaagctgtatgaacacattgtggccgacgaccgattcaccaagagcatcagcatcggcccgatctcgaaaaccatcaacatgcttgtgcgctggtatgtggacgggcccgcctccactgccttccaggagcatgtctccagaatcccggactatctctggatgggccttgacggcatgaaaatgcagggcaccaacggctcacagatctgggacaccgcattcgccatccaggctctgcttgaggcgggcgggcaccacaggcccgagttttcgtcctgcctgcagaaggctcatgagttcctgaggctctcacaggtcccagataaccctcccgactaccagaagtactaccgccagatgcgcaagggtggcttctccttcagtacgctggactgcggctggatcgtttctgactgcacggctgaggccttgaaggctgtgctgctcctgcaggagaagtgtccccatgtcaccgagcacatccccagagaacggctctgcgatgctgtggctgtgctgctgaacatgagaaatccagatggagggttcgccacctatgagaccaagcgtggggggcacttgctggagctgctgaacccctcggaggtcttcggggacatcatgattgactacacctatgtggagtgcacctcagccgtgatgcaggcgcttaagtatttccacaagcgtttcccggagcacagggcagcggagatccgggagaccctcacgcagggcttagagttctgtcggcggcagcagagggccgatggctcctgggaaggctcctggggagtttgcttcacctacggcacctggtttggcctggaggccttcgcctgtatggggcagacctaccgagatgggactgcctgtgcagaggtctcccgggcctgtgacttcctgctgtcccggcagatggcagacggaggctggggggaggactttgagtcctgcgaggagcggcgttatttgcagagtgcccagtcccagatccataacacatgctgggccatgatggggctgatggccgttcggcatcctgacatcgaggcccaggagagaggagtccggtgtctacttgagaaacagctccccaatggcgactggccgcaggaaaacattgctggggtcttcaacaagtcctgtgccatctcctacacgagctacaggaacatcttccccatctgggccctcggccgcttctcccagctgtaccctgagagagcccttgctggccacccctgagaacatgcctacctgctgggtgccgtctgtgcgttccatggccttcaagtcacaggacgcagcgattccctgccctcttcggtgttattacacaggcaggacttcagtgtcagtatccctgccttcagtcttctttagaaatcacatctgtgttcaatccattgtttagagggagtgtatttttcctgttccacgaagaggactttttgttcacaattggatcacaatgcagaggagtctgttcctcccccgtcggcttctcggtgctgggagggtgacctgtcccagatgactcatcaccctgacatgctcttgacaaaggacaccaccaagaggagatggcagctgtaccggtgcagcctctgtctgagggggatatttgcctcagtgtgattaaaaatcagtcatgaaaga

SEQ ID NO: 921 - DNA, 2166 bp, HOMO SAPIENS
gtggtgggactcgcgtcgcggccgcggagacgtgaagctctcgaggctcctcccgctgcgggtcggcgctcgccctcgctctcctcgccctccgccccggccccggccccgcgcccgccatggagaagactgagctgatccagaaggccaagctggccgagcaggccgagcgctacgacgacatggccacctgcatgaaggcagtgaccgagcagggcgccgagctgtccaacgaggagcgcaacctgctctccgtggcctacaagaacgtggtcgggggccgcaggtccgcctggagggtcatctctagcatcgagcagaagaccgacacctccgacaagaagttgcagctgattaaggactatcgggagaaagtggagtccgagctgagatccatctgcaccacggtgctggaattgttggataaatatttaatagccaatgcaactaatccagagagtaaggtcttctatctgaaaatgaagggtgattacttccggtaccttgctgaagttgcgtgtggtgatgatcgaaaacaaacgatagataattcccaaggagcttaccaagaggcatttgatataagcaagaaagagatgcaacccacacacccaatccgcctggggcttgctcttaacttttctgtattttactatgagattcttaataacccagagcttgcctgcacgctggctaaaacggcttttgatgaggccattgctgaacttgatacactgaatgaagactcatacaaagacagcaccctcatcatgcagttgcttagagacaacctaacactttggacatcagacagtgcaggagaagaatgtgatgcggcagaaggggctgaaaactaaatccatacagggtgtcatccttctttccttcaagaaacctttttacacatctccattccttattccacttggatttcctatagcaaagaaacccattcatgtgtatggaatcaactgtttatagtcttttcacactgcagctttgggaaaacttcattccttgatttgtgtttgtcttggccttcctggtgtgcagtactgctgtagaaaagtattaatagcttcatttcatataaacataagtaactcccaaacacttatgtagaggactaaaaatgtatctggtatttaagtaatctgaaccagttctgcaagtgactgtgttttgtattactgtgaaaataagaaaatgtagttaattacaatttaaagagtattccacataacttcttaatttctacattccctcccttactcttcgggggtttcctttcagtaagcaacttttccatgctcttaatgtattcctttttagtaggaatccggaagtattagattgaatggaaaagcacttgccatctctgtctaggggtcacaaattgaaatggctcctgtatcacatacggaggtcttgtgtatctgtggcaacagggagtttccttattcactctttatttgctgctgtttaagttgccaacctcccctcccaataaaaattcacttacacctcctgcctttgtagttctggtattcactttactatgtgatagaagtagcatgttgctgccagaatacaagcattgcttttggcaaattaaagtgcatgtcatttcttaatacactagaaaggggaaataaattaaagtacacaagtccaagtctaaaactttagtacttttccatgcagatttgtgcacatgtgagagggtgtccagtttgtctagtgattgttatttagagagttggaccactattgtgtgttgctaatcattgactgtagtcccaaaaaagccttgtgaaaatgttatgccctatgtaacagcagagtaacataaaataaaagtacattttataaaccatttactatggctttgtaacaattgcatacccatattttaagggacaggtgaatttactactttctaaagtttattgatacttcccttttatgtaaaatgtagtagtgatacctatatttccacattgtgcattgtgacacacttgtctagggatgcctggaagtgtataaaattggactgcatttcttagagtgttttactatagatcagtctcatgggccatctcttcctcagatgtaaatgatatctggttaagtgttatatggaataaagtggacattttaaaacta

SEQ ID NO: 922 - DNA, 4682 bp, HOMO SAPIENS
cttacggcagtctcgcgggatttccccctctcgcgggaattatttgaacgttcgagcggtaaatactccctggggctgtcatagaagactactcggagagcgctgcctctgggttggcgggctggcaggctgtagccgagcgcgggcaggactcgtcccggcagggttccagagccatgggagcggaaaggaggctgctgtcgattaaggaggcctttcggctggcgcagcagccgcaccagaaccaggcgaagctggtggtggcgctgagccgcacctaccgcacgatggatgataagacagtttttcatgaggagttcattcattaccttaaatatgttatggtggtctataaacgtgaaccagctgtggagagggtaatagaatttgcagcaaagtttgttacctcatttcaccaatcagatatggaagatgatgaggaagaggaagatggtggccttttaaattatttgtttacttttctcttaaagtctcatgaagcaaacagcaatgcagtgagatttagagtgtgcctgctcataaacaagcttttgggaagtatgccagaaaatgctcagattgatgatgatgtgtttgataaaattaataaagccatgcttattagattgaaagataagattccaaatgtgagaatacaggcagttctggcgctttcacgacttcaggatcccaaggatgatgaatgcccagtggttaatgcatatgctactttgattgaaaatgattcaaatccagaagttagacgggcagtgttatcatgtattgcaccatcagcaaagactttgccaaaaattgtagggcgcaccaaggatgtgaaagaggctgtcagaaagctggcttatcaggttttagctgaaaaggttcatatgagagctatgtccattgctcagagagtaatgctccttcaacaaggtcttaatgacagatcagatgctgtgaaacaagctatgcagaagcatcttcttcaaggctggttacggttctctgaaggaaatatcttagagttgctccatcggttggatgtagaaaattcttctgaagtggcagtctctgttctcaatgccttgttttcaataactcctctcagtgaactggtgggactctgtaaaaacaatgatggcaggaaattgattccagtggaaacattaactcctgaaattgctttgtattggtgtgccctttgtgaatatttgaaatcaaaaggagatgaaggtgaagaatttttagagcagattttgccagagcctgtagtatatgcagactatttattgagttacatccagagcattccagttgttaatgaagaacacagaggtgatttttcctatattggaaatttgatgacaaaagaattcataggtcaacaattgattctaattattaagtctttggataccagtgaagaaggaggaagaaaaaaactgctggctgttttacaggagattcttattttacccacaatcccaatatccctggtttcttttcttgttgaaagactactccacatcattatagatgataataagagaacacaaattgttacagaaattatctcagagattcgggcgcccattgttactgttggtgttaataacgatccagctgatgtaagaaagaaagaactcaagatggctgaaataaaagttaagcttatcgaagccaaagaagctttggaaaattgcattaccttacaggattttaatcgggcatcagaattaaaagaagaaataaaagcattagaagatgccagaataaaccttttgaaagagacagagcaacttgaaattaaagaagtccacatagagaagaatgatgctgaaacattgcagaaatgtcttattttatgctatgaactgttgaagcagatgtccatttcaacaggcttaagtgcaaccatgaatggaatcatcgaatctttgattcttcctggaataataagtattcatcctgttgtaagaaacctggctgttttatgcttgggatgctgtggactacagaatcaggattttgcaaggaaacacttcgtattactattgcaggttttgcaaattgatgatgtcacaataaaaataagtgctttaaaggcaatctttgaccaactgatgacgttcgggattgaaccatttaaaactaaaaaaatcaaaacacttcattgtgaaggtacagaaataaacagtgatgatgagcaagaatcaaaagaagttgaagagactgctacagctaagaatgttctgaaactcctttctgatttcttagatagtgaggtatctgaacttaggactggagctgcagaaggactagccaagctgatgttctctgggcttttggtcagcagcaggattctttctcgtcttattttgttatggtacaatcctgtgactgaagaggatgttcaacttcgacattgcctaggcgtgttcttccccgtgtttgcttatgcaagcaggactaatcaggaatgctttgaagaagcttttcttccaaccctgcaaacactggccaatgcccctgcatcttctcctttagctgaaattgatatcacaaatgttgctgagttacttgtagatttgacaagaccaagtggattaaatcctcaggccaagacttcccaagattatcaggccttaacagtacatgacaatttggctatgaaaatttgcaatgagatcttaacaagtccgtgctcgccagaaattcgagtctatacaaaagccttgagttctttagaactcagtagccatcttgcaaaagatcttctggttctattgaatgagattctggagcaagtaaaagataggacatgtctgagagctttggagaaaatcaagattcagttagaaaaaggaaataaagaatttggtgaccaagctgaagcagcacaggatgccaccttgactacaactactttccaaaatgaagatgaaaagaataaagaagtatatatgactccactcaggggtgtaaaagcaacccaagcatcaaagtctactcagctaaagactaacagaggacagagaaaagtgacagtttcagctaggacgaacaggaggtgtcagactgctgaagccgactctgaaagtgatcatgaagttccagaaccagaatcagaaatgaagatgagactaccaagacgagccaaaaccgcagcactagaaaaaagtaaacttaaccttgcccaatttctcaatgaagatctaagttaggaaagacgatggaggtggaatcctttaagattatgtccagttatttgctttaataaagaagaagttacccttgtcaaaatcagaacaaacctgatgtctttctgaagattttctgctgtgcgcttccacgttactttggcctgtattaaagcagtagagcagcatcagttattatagtccagaaaaagtgtgcatcagtcagtcacacagatttatcacaatctgaggtgggcctaggaatctcatttttaaatagtctctccaagtgattcttatgaactctttatgtttaaaatcatgtcattatggaaaacttacaagtgtaactagctagtagcttgcatttgagaagcttatgacttagatgggcagaatcaacaaagatgaaaccgcctgaggacacatttaacaagtaacatttctagggaaaatgaaggaagtaccacaaactggctagaaaggagcttatcaatcaccagtgaggaagaccagtataacgttcaacaacagttattttgacaaaaacttattttgtgattcctacagtgaaaacatttttggtgatatctgcctgggaaatctctcttcctaaagtatttgtatatgggagtccttgtttgtgaatgtttcctggattagggaggtgtcaacataaatgtattattaaccatgaagctgctcgctatatttttggcataacaaaataatatttatttactgtggataataattctagtgggaatataatgtgacaggaacttctctttatatacgctaccaatttatgagcactattcactgtcaatttcatttcttgtcttttgaaattgacacttggcctgacttacgaaacttgtactatatgaaattggtcctcttttctgcaatacccaacgaaacaccttttctctttattattcagaaatgtcctaacatggatctgtttgttttaataattgtgctttttttaggcttatcatctactagaggccatttacttaaggtgaaattttaagatggagctaaagtaagatcactggtttttagaaccaaattgctatacatatgtgcctcatagaacttataaaaggagtcaaagtttcaaagcaagatagttattaagcaaaaggaaaaatggtaatgatagaaagtcagttaaaaatagatgattgttcttcattctgtttgttggctctgtgttctcctgtgcttcagattccttatgtgttgttgttttaaagacaatttgcagggggttgggagaaggactgaaaaggtacattaagtgtgctgtaaggaaaagtcttagaaacataataagctaaaatcccattcacacatggccaggctatccaaaaagaaaggagccatgttctcatgtggtttaccataccaaagcttgctttctctggcatgggaaaaataaatttaagcaccaaaaaaaaaaaaaaaagaaaa

SEQ ID NO: 923 - DNA, 2197 bp, HOMO SAPIENS
attcttcctcttgccacacccacagggcccgcactaagagcctaactgaaatcccgcgaggatcaaccgagctcgccgaaaggagggaggaacgtatcccttctggaggctgtctcagggggcagagggaccggaccggaagtgacgtgagcgggttccggttgtctggagcccagcggcgggtgtgagagtccgtaaggagcagcttccaggatcctgagatccggagcagccggggtcggagcggctcctcaagagttactgatctatgaaatggcagagaatggaaaaaattgtgaccagagacgtgtagcaatgaacaaggaacatcataatggaaatttcacagacccctcttcagtgaatgaaaagaagaggagggagcgggaagaaaggcagaatattgtcctgtggagacagccgctcattaccttgcagtatttttctctggaaatccttgtaatcttgaaggaatggacctcaaaattatggcatcgtcaaagcattgtggtgtcttttttactgctgcttgctgtgcttatagctacgtattatgttgaaggagtgcatcaacagtatgtgcaacgtatagagaaacagtttcttttgtatgcctactggataggcttaggaattttgtcttctgttgggcttggaacagggctgcacacctttctgctttatctgggtccacatatagcctcagttacattagctgcttatgaatgcaattcagttaattttcccgaaccaccctatcctgatcagattatttgtccagatgaagagggcactgaaggaaccatttctttgtggagtatcatctcaaaagttaggattgaagcctgcatgtggggtatcggtacagcaatcggagagctgcctccatatttcatggccagagcagctcgcctctcaggtgctgaaccagatgatgaagagtatcaggaatttgaagagatgctggaacatgcagagtctgcacaagactttgcctcccgggccaaactggcagttcaaaaactagtacagaaagttggattttttggaattttggcctgtgcttcaattccaaatcctttatttgatctggctggaataacgtgtggacactttctggtacctttttggaccttctttggtgcaaccctaattggaaaagcaataataaaaatgcatatccagaaaatttttgttataataacattcagcaagcacatagtggagcaaatggtggctttcattggtgctgtccccggcataggtccatctctgcagaagccatttcaggagtacctggaggctcaacggcagaagcttcaccacaaaagcgaaatgggcacaccacagggagaaaactggttgtcctggatgtttgaaaagttggtcgttgtcatggtgtgttacttcatcctatctatcattaactccatggcacaaagttatgccaaacgaatccagcagcggttgaactcagaggagaaaactaaataagtagagaaagttttaaactgcagaaattggagtggatgggttctgccttaaattgggaggactccaagccgggaaggaaaattcccttttccaacctgtatcaatttttacaacttttttcctgaaagcagtttagtccatactttgcactgacatactttttccttctgtgctaaggtaaggtatccaccctcgatgcaatccaccttgtgttttcttagggtggaatgtgatgttcagcagcaaacttgcaacagactggccttctgtttgttactttcaaaaggcccacatgatacaattagagaattcccaccgcacaaaaaaagttcctaagtatgttaaatatgtcaagctttttaggcttgtcacaaatgattgctttgttttcctaagtcatcaaaatgtatataaattatctagattggataacagtcttgcatgtttatcatgttacaatttaatattccatcctgcccaacccttcctctcccatcctcaaaaaagggccattttatgatgcattgcacaccctctggggaaattgatctttaaattttgagacagtataaggaaaatctggttggtgtcttacaagtgagctgacaccattttttattctgtgtatttagaatgaagtcttgaaaaaaactttataaagacatctttaatcattccaaaaaaaaaaaaaaaaaaaaaaaaa

SEQ ID NO: 924 - DNA, 3680 bp, HOMO SAPIENS
tgagtaaatgccgcagattctggaaagttctgatcagtgcgatacataaggctgaggaagtgggacctccccttttgggtcggtagttcagcgccggcgccggtgtgcgagccgcggcagagtgaggcaggcaacccgaggtgcggagcgacctgcggaggctgagccccgctttctcccagggtttcttatcagccagccgccgctgtccccgggggagtaggaggctcctgacaggccgcggctgtctgtgtgtccttctgagtgtcagaggaacggccagaccccgcgggccggagcagaacgcggccagggcagaaagcggcggcaggagaagcaggcagggggccggaggacgcagaccgagacccgaggcggaggcggaccgcgagccggccatgtcggtggtggggttggacgtgggctcgcagagctgctacatcgcggtagcccgggccgggggcatcgagaccatcgccaatgagttcagcgaccggtgcaccccgtcagtcatatcatttggatcaaaaaatagaacaatcggagttgcagccaaaaatcagcaaatcactcatgcaaacaatacggtgtctaacttcaaaagatttcatggccgagcattcaatgaccccttcattcaaaaggagaaggaaaacttgagttacgatttggttccattgaaaaatggtggagttggaataaaggtaatgtacatgggtgaagaacatctatttagtgtggagcagataacagccatgttgttgactaagctgaaggaaactgctgaaaacagcctcaagaaaccagtaacagattgtgttatttcagtcccctccttctttacagatgctgagaggcgatctgtgttagatgctgcacagattgttggcctaaactgtttaagacttatgaatgacatgacagctgttgctttgaattacggaatttataagcaggatctcccaagcctggatgagaaacctcggatagtggtttttgttgatatgggacattcagcttttcaagtgtctgcttgtgcttttaacaagggaaaattgaaggtactgggaacagcttttgatcctttcttaggaggaaaaaacttcgatgaaaagttagtggaacatttttgtgcagaatttaaaactaagtacaagttggatgcaaaatccaaaatacgagcactcctacgtctgtatcaggaatgtgaaaaactgaaaaagctaatgagctctaacagcacagaccttccactgaatatcgaatgctttatgaatgataaagatgtttccggaaagatgaacaggtcacaatttgaagaactctgtgctgaacttctgcaaaagatagaagtacccctttattcactgttggaacaaactcatctcaaagtagaagatgtgagtgcagttgagattgttggaggcgctacacgaattccagctgtgaaggaaagaattgccaaattctttggaaaagatattagcacaacactcaatgcagatgaagcagtagccagaggatgtgcattacagtgtgcaatactttccccggcatttaaagttagagaattttccgtcacagatgcagttccttttccaatatctctgatctggaaccatgattcagaagatactgaaggtgttcatgaagtctttagtcgaaaccatgctgctcctttctccaaagttctcacctttctgagaagggggccttttgagctagaagctttctattctgatccccaaggagttccatatccagaagcaaaaataggccgctttgtagttcagaatgtttctgcacagaaagatggagaaaaatctagagtaaaagtcaaagtgcgagtcaacacccatggcattttcaccatctctacggcatctatggtggagaaagtcccaactgaggagaatgaaatgtcttctgaagctgacatggagtgtctgaatcagagaccaccagaaaacccagacactgataaaaatgtccagcaagacaacagtgaagctggaacacagccccaggtacaaactgatgctcaacaaacctcacagtctcccccttcacctgaacttacctcagaagaaaacaaaatcccagatgctgacaaagcaaatgaaaaaaaagttgaccagcctccagaagctaaaaagcccaaaataaaggtggtgaatgttgagctgcctattgaagccaacttggtctggcagttagggaaagaccttcttaacatgtatattgagacagagggtaagatgataatgcaagataaattggaaaaagaaaggaatgatgctaaaaatgcagttgaggaatatgtgtatgagttcagagacaagctgtgtggaccatatgaaaaatttatatgtgagcaggatcatcaaaattttttgagactcctcacagaaactgaagactggctgtatgaagaaggagaggaccaagctaaacaagcatatgttgacaagttggaagaattaatgaaaattggcactccagttaaagttcggtttcaggaagctgaagaacggccaaaaatgtttgaagaactaggacagaggctgcagcattatgccaagatagcagctgacttcagaaataaggatgagaaatacaaccatattgatgagtctgaaatgaaaaaagtggagaagtctgttaatgaagtgatggaatggatgaataatgtcatgaatgctcaggctaaaaagagtcttgatcaggatccagttgtacgtgctcaggaaattaaaacaaaaatcaaggaattgaacaacacatgtgaacccgttgtaacacaaccgaaaccaaaaattgaatcacccaaactggaaagaactccaaatggcccaaatattgataaaaaggaagaagatttagaagacaaaaacaattttggtgctgaacctccacatcagaatggtgaatgttaccctaatgagaaaaattctgttaatatggacttggactagataaccttaaattggcctattccttcaattaataaaatatttttgccatagtatgtgactctacataacatactgaaactatttatattttcttttttaaggatatttagaaattttgtgtattatatggaaaaagaaaaaaagcttaagtctgtagtctttatgatcctaaaagggaaaattgccttggtaactttcagattcctgtggaattgtgaattcatactaagctttctgtgcagtctcaccatttgcatcactgaggatgaaactgacttttgtcttttggagaaaaaaaactgtactgcttgttcaagagggctgtgattaaaatctttaagcatttgttcctgccaaggtagttttcttgcattttgctctccattcagcatgtgtgtgggtgtggatgtttataaacaagactaagtctgacttcataagggctttctaaaaccatttctgtccaagagaaaatgactttttgctttgatattaaaaattcaatgagtaaaacaaaagctagtcaaatgtgttagcagcatgcagaacaaaaactttaaactttctctctcactatacagtatattgtcatgtgaaagtgtggaatggaagaaatgtcgatcctgttgtaactgattgtgaacacttttatgagctttaaaataaagttcatcttatggtgtcatttctaaaaaaaaaaaaaaa

SEQ ID NO: 925 - DNA, 3522 bp, HOMO SAPIENS
aggtcggggtgagaggccgggggcctggtctgggccggagcctgccggggacaggaactggatgacgggccaggccagattccaccgcggagccgaggcatgccgagctatccggcagtgcaggtcccggcggccgcgggcagctcacccggaaggccgcgcggggtccgggcgtggatcccggcacgcgagcccgggcgttcgcaggggaggattttccttgctgctgcttaacttggaggagtactactttgaacagcatagagccaatcacattttgcacaagggcagtcaccatgaaaggaaaatcagaggctccttaaaaatatgttcaaaatcggtgatttttgaaccagattcaatatcccagcccatcatcaagattcctttgagagactgtataaaaataggaaagcatggagaaaatggagccaatagacacttcacaaaggcaaaatctgggggtatttcactcattttcagtcaggtatatttcattaaagaacataatgttgttgcaccatataaaatagaaaggggcaaaatggaatatgtttttgaattggatgttcccgggaaagtggaagatgttgtggagacgttgcttcagcttcacagagcatcctgccttgacaaattgggtgaccaaaccgccatgataacagctattttgcagtctcgtttagctagaacatcatttgacaaaaacaggttccaaaacatttctgaaaagctgcacatggaatgcaaagcagaaatggtgacgcctctggtgactaatcctggacacgtgtgcatcacggacacaaacctgtattttcagcccctcaacggctacccgaaacctgtggtccagataacactccaagatgtccgccgcatctacaaaaggaggcacggcctcatgcctctgggcttggaagtattttgcacagaagatgatctgtgttccgacatctacctaaagttctatgaacctcaagatagagatgatctctatttttacattgccacatacctagagcaccatgtggcggagcacactgctgagagctacatgctgcagtggcagcgtggacacctttccaactatcagtacctccttcacctcaacaacctggccgaccgcagctgcaacgacctctcccagtaccctgtgtttccatggataatacatgattattccagctcagaactagatttgtcaaatccaggaaccttccgggatctcagtaagccagtaggggccctaaataaggaacggctggagagactactgacacgctaccaggaaatgcctgaaccaaagttcatgtatgggagtcactactcttccccgggttatgtacttttttatcttgttaggattgcaccagagtatatgctgtgcctgcagaatggaagatttgataatgcagatagaatgttcaacagtattgcagaaacttggaaaaactgtctggatggtgcaacggattttaaagagttaattccagaattctatggtgatgatgtgagctttctagtcaatagcctgaagttggatttgggaaagagacaaggaggacagatggttgacgacgtggagcttcccccttgggcttccagtcccgaggactttctccagaagagcaaagatgcattggaaagcaattatgtgtctgaacaccttcacgagtggattgatctaatatttggctacaaacaaaaagggagtgatgcagttggggcccataatgtatttcatcccctgacctatgaaggaggtgtagacttgaacagcatccaggatcctgatgagaaggtagccatgcttacgcaaatcttggaatttgggcagacaccaaaacaactatttgtgacaccacatcctcgaaggatcaccccaaagtttaaaagtttgtcccagacctccagttataatgcttctatggcagattccccaggtgaagagtcttttgaagacctgaccgaagaaagcaaaacactggcctggaataacatcaccaaactgcagttacacgagcactataaaatccacaaagaagcagttactggaatcacggtctctcgcaatggatcttcagtattcacaacatcccaagattccaccttgaagatgttttctaaagaatcaaaaatgctacaaagaagtatatcattttcaaatatggctttatcgtcttgtttacttttaccaggagatgccactgtcataacttcttcatgggataataatgtctatttttattccatagcatttggaagacgccaggacacgttaatgggacatgatgatgctgttagtaagatctgttggcatgacaacaggctatattctgcatcgtgggactctacagtgaaggtgtggtctggtgttcctgcagagatgccaggcaccaaaagacaccactttgacttgctggccgagctggaacatgatgtcagtgtagatacaatcagtttaaatgctgcaagcacactgttagtttccggcaccaaagaaggcacagtgaatatttgggacctcacaacggccaccttaatgcaccagattccatgccattcagggattgtatgtgacactgcttttagcccagatagtcgccatgtcctcagcacaggaacagatggctgtcttaatgtcattgatgtgcagacaggaatgctcatctcctccatgacatcagatgagccccagaggtgctttgtctgggatggaaattccgttttatctggcagtcagtctggtgaactgctcgtttgggacctccttggagcaaaaatcagtgagagaatacagggccacacaggtgctgtgacatgtatatggatgaatgaacagtgtagcagtatcatcacaggaggggaagacagacaaattatattctggaaattgcagtattaagtgccttttcctctcctgaatattaaattgaactctatttaatgcatttttaaaccaaacttttaaacggactggtgaatgtgcaatgttagtaattagaagttttaccacatggaaaatttgtggttttaaactttctaaatcatggtgacttcattgaaagccattagttgctattctcttagggcagataaaatgcggctgtgttaggaaaaacatgttacactgtaaggcagatgatcgtccccgtatgatgattgtcagaagacaggactaagtagcagagaatagctaagagataaattgggctggggaaacttgtcagaaagcactgaacaattaagaaattttccaagaaaatgtgcagtattctctgctacttctgaatctgttttgtcttcctaatctatcacaattgccacccatcgggttttgggtgtgtgttttcatagcgtggttactttctataatgctgtacccagattctaagaacctggagaaggattagcagttcttagtaagtttactgtgtataggaacggtttgtatttcattacagctattcatcttttctacattaaaaatatttttctctaaagaaaaaaaaaaaaaaa

SEQ ID NO: 926 - DNA, 3007 bp, HOMO SAPIENS
aaggagagagggagggcggagggcggaggggcggcgggaggagggcggggaggagcgctcttcctggttgggccctgccctgagctgccaccgggaagccagcctcagggactgcagcgacccccaaacacccctcccccaggatgtcggaggagatcatcacgccggtgtactgcactggggtgtcagcccaagtgcagaagcagcgggccagggagctgggcctgggccgccatgagaatgccatcaagtacctgggccaggattatgagcagctgcgggtgcgatgcctgcagagtgggaccctcttccgtgatgaggccttccccccggtaccccagagcctgggttacaaggacctgggtcccaattcctccaagacctatggcatcaagtggaagcgtcccacggaactgctgtcaaacccccagttcattgtggatggagctacccgcacagacatctgccagggagcactgggggactgctggctcttggcggccattgcctccctcactctcaacgacaccctcctgcaccgagtggttccgcacggccagagcttccagaatggctatgccggcatcttccatttccagctgtggcaatttggggagtgggtggacgtggtcgtggatgacctgctgcccatcaaggacgggaagctagtgttcgtgcactctgccgaaggcaacgagttctggagcgccctgcttgagaaggcctatgccaaggtaaatggcagctacgaggccctgtcagggggcagcacctcagagggctttgaggacttcacaggcggggttaccgagtggtacgagttgcgcaaggctcccagtgacctctaccagatcatcctcaaggcgctggagcggggctccctgctgggctgctccatagacatctccagcgttctagacatggaggccatcactttcaagaagttggtgaagggccatgcctactctgtgaccggggccaagcaggtgaactaccgaggccaggtggtgagcctgatccggatgcggaacccctggggcgaggtggagtggacgggagcctggagcgacagctcctcagagtggaacaacgtggacccatatgaacgggaccagctccgggtcaagatggaggacggggagttctggatgtcattccgagacttcatgcgggagttcacccgcctggagatctgcaacctcacacccgacgccctcaagagccggaccatccgcaaatggaacaccacactctacgaaggcacctggcggcgggggagcaccgcggggggctgccgaaactacccagccaccttctgggtgaaccctcagttcaagatccggctggatgagacggatgacccggacgactacggggaccgcgagtcaggctgcagcttcgtgctcgcccttatgcagaagcaccgtcgccgcgagcgccgcttcggccgcgacatggagactattggcttcgcggtctacgaggtccctccggagctggtgggccagccggccgtacacttgaagcgtgacttcttcctggccaatgcgtctcgggcgcgctcagagcagttcatcaacctgcgagaggtcagcacccgcttccgcctgccacccggggagtatgtggtggtgccctccaccttcgagcccaacaaggagggcgacttcgtgctgcgcttcttctcagagaagagtgctgggactgtggagctggatgaccagatccaggccaatctccccgatgagcaagtgctctcagaagaggagattgacgagaacttcaaggccctcttcaggcagctggcaggggaggacatggagatcagcgtgaaggagttgcggacaatcctcaataggatcatcagcaaacacaaagacctgcggaccaagggcttcagcctagagtcgtgccgcagcatggtgaacctcatggatcgtgatggcaatgggaagctgggcctggtggagttcaacatcctgtggaaccgcatccggaattacctgtccatcttccggaagtttgacctggacaagtcgggcagcatgagtgcctacgagatgcggatggccattgagtcggcaggcttcaagctcaacaagaagctgtacgagctcatcatcacccgctactcggagcccgacctggcggtcgactttgacaatttcgtttgctgcctggtgcggctagagaccatgttccgatttttcaaaactctggacacagatctggatggagttgtgacctttgacttgtttaagtggttgcagctgaccatgtttgcatgaggcagggactcggtcccccttgccgtgctcccctccctcctcgtctgccaagcctcgcctcctaccacaccacaccaggccaccccagctgcaagtgccttccttggagcagagaggcagcctcgtcctcctgtcccctctcctcccagccaccatcgttcatctgctccgggcagaactgtgtggcccctgcctgtgccagccatgggctcgggatggactccctgggccccacccattgccaagccaggaaggcagctttcgcttgttcctgcctcgggacagccccgggtttccccagcatcctgatgtgtcccctctccccacttcagaggccacccactcagcaccaccggcctggccttgcctgcagactataaactataaccactagctcgacacagtctgcagtccaggcgtgtggagccgcctcccggctcggggaggccccggggctgggaacgcctgtgccttcctgcgccgaagccaacgccccctctgtccttccctggccctgctgccgaccaggagctgcccagcctgtgggcggtcggccttccctccttcgctccttttttatattagtgattttaaaggggactcttcagggacttgtgtactggttatgggggtgccagaggcactaggcttggggtggggaggtcccgtgttccatatagaggaaccccaaataataaaaggccccacatctgtctgtg

SEQ ID NO: 927 - DNA, 432 bp, HOMO SAPIENS
ctttattggcagtagggcttaccctactattactagtgttcattcattatctagtattaatgctgcttcccgttttgtcattttgggttcatatccacctctgtagtaataatctctgaaggcagattttggtagactttgaaacacttgttctacttgaggttttatgtgcttcatggcttcgcaaaatgtaacagcttgcaaatcctgcagcagcggtcagttcagctgctaccactgcacaggccatggctccagcttggctcccctgccaccaccaggagggtggatcatcccagcccagaggccgcacccaccacctacttggctttaccagagagcaatgcagcagccaccacagtagtcacaaactgcccaagcacctttttcctctttaaagtggtggtgatgatgcatttaccttatcgagct

SEQ ID NO: 928 - DNA, 487 bp, HOMO SAPIENS
  misc_feature (340)..(340): n is a, c, g, or t
tcctctttccagtcaagacaggtgggatcccattgtttaatctagaaatacctgtgtgagatactagtattgatggtgagacgtcaatagtaaaatatcttggaggtaaaactaaacattcttcagtcatttaaataccagcacagcaggcctgtttgccagttcactaactaccttgttgccacagtagttgactgcctttttttcagcaaagggaataatgatttagagggtagacgagtgagtcacaatgtaacttggctcagacaagaagaataaagcaaggattactatgcagatggaattggctgttactatgatgacagtaatgtgttaaggngcttttccagcacaggatcctgaagaaacttaacccaaatctacatctgttcccttttcattgaaatctaacctcccattggccacagagcctcaagcctaatatttgaggacagtcagcatgcacgcaagaatgctttacctcata

SEQ ID NO: 929 - DNA, 299 bp, HOMO SAPIENS
  misc_feature (110)..(112): n is a, c, g, or t
  misc_feature (115)..(115): n is a, c, g, or t
  misc_feature (124)..(124): n is a, c, g, or t
  misc_feature (131)..(131): n is a, c, g, or t
  misc_feature (133)..(136): n is a, c, g, or t
  misc_feature (144)..(144): n is a, c, g, or t
  misc_feature (149)..(149): n is a, c, g, or t
  misc_feature (154)..(155): n is a, c, g, or t
  misc_feature (160)..(160): n is a, c, g, or t
  misc_feature (163)..(164): n is a, c, g, or t
  misc_feature (166)..(166): n is a, c, g, or t
  misc_feature (169)..(169): n is a, c, g, or t
  misc_feature (183)..(183): n is a, c, g, or t
  misc_feature (204)..(204): n is a, c, g, or t
  misc_feature (216)..(216): n is a, c, g, or t
  misc_feature (220)..(220): n is a, c, g, or t
ctccaggactcctgtttccagagtataattgtattgacaaagctcatccatagtcaaacccaaccctggacccacacggggctcagctctctctgcacagcaccttctgnnnccnaaaagtggnaattgcnannnncccagganactgncttcnntggcnagnngncanccctggctgggctnccctcacatcggagcctgtgnccctcagtctancagnagccactgggggccttgggcatttcattggccgtcagtgtcccaccacagaatgtcaacaggattcctagcctgcctat

SEQ ID NO: 930 - DNA, 3313 bp, HOMO SAPIENS
gcgccgagcgcgggtttccgctcggggcgggcgatagagacagcgcgtcgcgcctttagcttctttcccagactccggcccagctcctgcgatctccacagcagcctctgaggccgcccccagagagcatcaggatggctgaggaaaagggtggaaagcaagtcctggaagaatctgcatttgaagaaatggaaagagattttcagggagttctccatgaactttctggagacaaaagtttggaaaaatttcggattgaatatgagaggcttcatgctgtcatgaaaaagtcttatgacaatgaaaagcgtctgatggccaaatgcagagagctaaatgcagagattgtagtgaattctgcgaaggtcgccactgcccttaagctctctcaggatgatcagaccaccattgcatccctaaagaaggaaattgaaaaggcctggaagatggtggactcagcctatgacaaagagcagaaggccaaggagacgattcttgctctgaaagaggaaatagtgaacctgaccaaactagtggagcaggggtctggactgtcaatggaccagcatagcaacatccgagatttactgaggttcaaagaagaagtgacaaaggagagagaccagctcttatcagaagtggtaaaattacgagaatccctagctcagaccactgaacagcagcaggaaacagagcgatcaaaagaggaggctgaacatgccatcagtcagttccaacaagaaatccagcaacgtcagaacgaagcttcccgggagttccggaagaaggaaaaactagagaaagagctcaagcagattcaggcagacatggacagcaggcagacagaaataaaagccctgcagcagtatgtgcagaagagcaaggaggagcttcagaagctggagcagcagctgaaggagcagaagatattgaatgagagagctgcaaaggaactcgagcaatttcagatgagaaatgctaaacttcagcaagagaatgaacagcacagtttggtctgtgagcagctatcccaggaaaaccaacagaaggcgttggagctcaaagccaaagaggaagaagtccatcaaatgcgccttgacatcgggaagctcaacaaaatcagagaacaaattcataagaaattgcaccacaccgaagatcaaaaggcagaagtcgaacagcacaaagaaaccctaaaaaatcagattgtgggattagagagagaggtagaggcttcaaagaaacaagcagaacttgacagaaaggcaatggacgagcttctaagagaaagggacatactaaataagaacatgcttaaggcggtcaatgcgacccagaagcagacagacttggtaaagctccatgaacaagccaagaggaacctggagggagaaatccagaactacaaggatgaggctcagaagcagagaaagatcatctttcatctggaaaaggagcgtgaccggtacatcaaccaagccagtgaccttacgcaaaaggtccttatgaacatggaagacataaaagttcgtgaaacacagatttttgactacaggaaaaaaatagctgaatcagagattaaattaaaacagcaacagaacctatatgaagctgtgagatcagacagaaatctgtatagcaaaaatctggttgaggctcaggatgaaataacagatatgaagagaaagttaaagattatgatccatcaggtagatgagctgaaagaagacatctctgccaaagagtccgcacttgtgaagctgcacctggaacagcagcgaatagaaaaggaaaaggaaacattgaaggctgagctgcagaagctgagacaacaagccctggagacaaaacactttattgaaaagcaagaagctgaagagagaaaactcctgcgaataattgctgaggctgacggggagaggttgagacagaagaaggaattagaccaggtcatcagtgagagagatatcctggggtctcagcttgttcggcgcaatgatgagttagctttgctctatgagaagatcaagatccaacagtctgtgctgaataaaggggagagccagtacaaccagaggttggaggacatgagaatcctcagacttgagatcaagaagcttcgccgggaaaaggggattcttgccaggagtatggctaatgttgaagaactcagacaggagttttttcacatgcaaagagaattgttgaaggagaggacacgctgccgagccctggaggaggagctggagaatcccctgaatgtgcacagatggaggaagctcgaggccagcgaccccaatgcatatgagctgatacagaaaattcacaccctgcagaagcgtctcatcagcaagactgaagaggtggttgaaaaagagctgctcctccaggaaaaggagaaactctacatggaactaaagcacgtcttggcccgccagcctggacctgaggctgcggaacagctgaagctgtaccgacgcacgctgcatgacaagaagcagcagctgaaagttttgtcttcagaattgaatatgtatgaagtacagagcaaagaatataaatatgaggtagagaaacttaccaatgagctccagaatttaaagaagaaatacctcgctcagaaacgtaaagaacaacttcaaaaaaacaaggacacagcacccatggataacaccttcttaatggtcaaaccaaatggtcctggttttactgggggcggatttcctctcaggtcaaccaaaatgacgttctaacctgaagctgctggctgtttccagttgaacaactcatgaaatctgctctgggacattttgggggaatctcaaagtccttggatcatagaactgagtgctgagaatccaggatggaaagaaatgcagaactatcatagtcacatacatataagagggatggtgttttgtctggttcacgttgatattaacagatcataattctctctgttcagttaggctgacctattgcatgaagcaaatcttttgttgctaccccattgattgaaatgtactagaccttaatttctttattacagacattggtgtacttgaaggttttatatttaaaagtatttttgaaatgcaatgtgtcccctctcaccttattaacaataatctattttaattattcctcattaacaagtcattgcatgagatgagaaagaaggacaaactcttaagaatttaaaaagtgttttgagaatgatttctatatggaatttcttttcaggcccggaatgggaaaatctattccaaagagacacactaataaatacttcattataaaaaataaaaaagaa

SEQ ID NO: 931 - DNA, 4353 bp, HOMO SAPIENS
attggaagaagaagcatagtatagaagaaaggcaaacacaacacattcaacctctgccaccatggggaactgggctgtgaatgaggggctctccatttttgtcattctggtttggctggggttgaacgtcttcctctttgtctggtattaccgggtttatgatattccacctaagttcttttacacaagaaaacttcttgggtcagcactggcactggccagggcccctgcagcctgcctgaatttcaactgcatgctgattctcttgccagtctgtcgaaatctgctgtccttcctcaggggttccagtgcgtgctgctcaacaagagttcgaagacaactggacaggaatctcacctttcataaaatggtggcatggatgattgcacttcactctgcgattcacaccattgcacatctatttaatgtggaatggtgtgtgaatgcccgagtcaataattctgatccttattcagtagcactctctgaacttggagacaggcaaaatgaaagttatctcaattttgctcgaaagagaataaagaaccctgaaggaggcctgtacctggctgtgaccctgttggcaggcatcactggagttgtcatcacgctgtgcctcatattaattatcacttcctccaccaaaaccatccggaggtcttactttgaagtcttttggtacacacatcatctctttgtgatcttcttcattggccttgccatccatggagctgaacgaattgtacgtgggcagaccgcagagagtttggctgtgcataatataacagtttgtgaacaaaaaatctcagaatggggaaaaataaaggaatgcccaatccctcagtttgctggaaaccctcctatgacttggaaatggatagtgggtcccatgtttctgtatctctgtgagaggttggtgcggttttggcgatctcaacagaaggtggtcatcaccaaggtggtcactcaccctttcaaaaccatcgagctacagatgaagaagaaggggttcaaaatggaagtgggacaatacatttttgtcaagtgcccaaaggtgtccaagctggagtggcacccttttacactgacatccgcccctgaggaagacttctttagtatccatatccgcatcgttggggactggacagaggggctgttcaatgcttgtggctgtgataagcaggagtttcaagatgcgtggaaactacctaagatagcggttgatgggccctttggcactgccagtgaagatgtgttcagctatgaggtggtgatgttagtgggagcagggattggggtcacacccttcgcatccattctcaagtcagtctggtacaaatattgcaataacgccaccaatctgaagctcaaaaagatctacttctactggctgtgccgggacacacatgcctttgagtggtttgcagatctgctgcaactgctggagagccagatgcaggaaaggaacaatgccggcttcctcagctacaacatctacctcactggctgggatgagtctcaggccaatcactttgctgtgcaccatgatgaggagaaagatgtgatcacaggcctgaaacaaaagactttgtatggacggcccaactgggataatgaattcaagacaattgcaagtcaacaccctaataccagaataggagttttcctctgtggacctgaagccttggctgaaaccctgagtaaacaaagcatctccaactctgagtctggccctcggggagtgcatttcattttcaacaaggaaaacttctaacttgtctcttccatgaggaaataaatgtgggttgtgctgccaaatgctcaaataatgctaattgataatataaataccccctgcttaaaaatggacaaaaagaaactataatgtaatggttttcccttaaaggaatgtcaaagattgtttgatagtgataagttacatttatgtggagctctatggttttgagagcacttttacaaacattatttcatttttttcctctcagtaatgtcagtggaagttagggaaaagattcttggactcaattttagaatcaaaagggaaaggatcaaaaggttcagtaacttccctaagattatgaaactgtgaccagatctagcccatcttactccaggtttgatactctttccacaatactgagctgcctcagaatcctcaaaatcagtttttatattccccaaaagaagaaggaaaccaaggagtagctatatatttctactttgtgtcatttttgccatcattattatcatactgaaggaaattttccagatcattaggacataatacatgttgagagtgtctcaacacttattagtgacagtattgacatctgagcatactccagtttactaatacagcagggtaactgggccagatgttctttctacagaagaatattggattgattggagttaatgtaatactcatcatttaccactgtgcttggcagagagcggatactcaagtaagttttgttaaatgaatgaatgaatttagaaccacacaatgccaagatagaattaatttaaagccttaaacaaaatttatctaaagaaataacttctattactgtcatagaccaaaggaatctgattctccctagggtcaagaacaggctaaggatactaaccaataggattgcctgaagggttctgcacattcttatttgaagcatgaaaaaagagggttggaggtggagaattaacctcctgccatgactctggctcatctagtcctgctccttgtgctataaaataaatgcagactaatttcctgcccaaagtggtcttctccagctagcccttatgaatattgaacttaggaattgtgacaaatatgtatctgatatggtcatttgttttaaataacacccaccccttattttccgtaaatacacacacaaaatggatcgcatctgtgtgactaatggtttatttgtattatatcatcatcatcatcctaaaattaacaacccagaaacaaaaatctctatacagagatcaaattcacactcaatagtatgttctgaatatatgttcaagagagagtctctaaatcactgttagtgtggccaagagcagggttttctttttgttcttagaactgctcccatttctgggaactaaaaccagttttatttgccccaccccttggagccacaaatgtttagaactcttcaacttcggtaatgaggaagaaggagaaagagctgggggaagggcagaagactggtttaggaggaaaaggaaataaggagaaaagagaatgggagagtgagagaaaataaaaaaggcaaaagggagagagaggggaagggggtctcatattggtcattccctgccccagatttcttaaagtttgatatgtatagaatataattgaaggaggtatacacatattgatgttgttttgattatctatggtattgaatcttttaaaatctggtcacaaattttgatgctgagggggattattcaagggactaggatgaactaaataagaactcagttgttctttgtcatactactattcctttcgtctcccagaatcctcagggcactgagggtaggtctgacaaataaggcctgctgtgcgaatatagcctttctgaaatgtaccaggatggtttctgcttagagacacttaggtccagcctgttcacactgcacctcaggtatcaattcatctattcaacagatatttattgtgttattactatgagtcaggctctgtttattgtttcaattctttacaccaaagtatgaactggagagggtacctcagttataaggagtctgagaatattggccctttctaacctatgtgcataattaaaaccagcttcatttgttgctccgagagtgtttctccaaggttttctatcttcaaaaccaactaagttatgaaagtagagagatctgccctgtgttatccagttatgagataaaaaatgaatataagagtgcttgtcattataaaagtttccttttttattctctcaagccaccagctgccagccaccagcagccagctgccagcctagctttttttttttttttttttttttagcacttagtatttagcatttattaacaggtactctaagaatgatgaagcattgtttttaatcttaagactatgaaggtttttcttagttcttctgcttttgcaattgtgtttgtgaaatttgaatacttgcaggctttgtatgtgaataattctagcgggggacctgggagataattcctacggggaattcttaaaactgtgctcaactattaaaatgaatgagctttcaaaaaaaaaaaaaaaaaaaaaaaaaaaaaaaaaaa

SEQ ID NO: 932 - DNA, 3223 bp, HOMO SAPIENS
cggcggcggcggcggcggcggcggcggcggagcccggagcgcaggccggaggctcccggcccgccggccccggagcggagcggagcggaggatgcagcagccgcagccgcaggggcagcagcagccggggccggggcagcagctggggggccagggggcggcgccgggggccgggggcggcccaggggggggcccggggccggggccctgcctgaggcgagagctgaagctgctcgagtccatcttccaccgcggccacgagcgcttccgcattgccagcgcctgcctggacgagctgagctgcgagttcctgctggctggggccggaggggccggggcgggggccgcgcccggaccgcatctccccccacgggggtcggtgcctggggatcctgtccgcatccactgcaacatcacggagtcataccctgctgtgccccccatctggtcggtggagtctgatgaccctaacttggctgctgtcttggagaggctggtggacataaagaaagggaatactctgctattgcagcatctgaagaggatcatctccgacctgtgtaaactctataacctccctcagcatccagatgtggagatgctggatcaacccttgccagcagagcagtgcacacaggaagacgtgtcttcagaagatgaagatgaggagatgcctgaggacacagaagacttagatcactatgaaatgaaagaggaagagccagctgagggcaagaaatctgaagatgatggcattggaaaagaaaacttggccatcctagagaaaattaaaaagaaccagaggcaagattacttaaatggtgcagtgtctggctcggtgcaggccactgaccggctgatgaaggagctcagggatatataccgatcacagagtttcaaaggcggaaactatgcagtcgaactcgtgaatgacagtctgtatgattggaatgtcaaactcctcaaagttgaccaggacagcgctttgcacaacgatctccagatcctcaaagagaaagaaggagccgacttcattctacttaacttttcctttaaagataactttccctttgacccaccatttgtcagggttgtgtctccagtcctctctggagggtatgttctgggcggaggggccatctgcatggaacttctcaccaaacagggctggagcagtgcctactccatagagtcagtgatcatgcagatcagtgccacactggtgaaggggaaagcacgagtgcagtttggagccaacaaatctcaatacagtctgacaagagcacagcagtcctacaagtccttggtgcagatccacgaaaaaaacggctggtacacacccccaaaagaagacggctaaccctggagtatcacccttcctccctccccaggcaccactggaccaattacctttgaatgctgtatttggatctcacgctgcctctgtggttccctccctcatttttcctggacgtgatagctctgcctattgcaggacaatgatggctattctaaacgctaaggaaaaaaaacaaacacagaactgtttcaagtactcaagactgacttacagaccaaccaaccaccttgctggaacccttgctagcaggcattcttataaaagaaactttcgagcctccttatattgctggaaactcagctgtgctccagactagagcctccttacctatgctatggatttttaatttattttctcttatttcatgtacactgctttttttggttacagtgtatgatggatgtgtatgaaaaaaatgtatctttgggaaaacaattacagtttgttaatttgaagatgctggtcttgactcatctttatttttattcgcacatcccaccccatcccctgaactacttgggaggtggggaggggtacgagtccactgttgctttggtagagatgagaggccgcattttgctgctaaagcaagagaaacttggagctgaagcacacacctggtctgcccctagatttctcctcaaggcctctggagcaaccagcacttgcccccttggaatgcagagcctggcctgccaaactacaatgtggtaggctgaaacgatggtgttaattcttaggactacttttctagtcacagatgttttcaaatttctaagaaaaagaaaatgaggctcaagaggctgcttcgtagaattccttttgaatgaattgagtggggatggggacacagtctccaagtgtgtatgtggtcttttctgatctcagctgtgtggctgcaactcttcgctgttcattggttcctctcctggaaagtggcttctaaccagcactggatggtgatcattggtaagctttgctcacctccctctctcttgcttcatttggctttatcaaaaagaacagacctagctctgaatttgtttggcttgggaaattatggattctttcaagccactcccacaaggtgggtcctactagaaagggttagcattttaaggggggttgttctatacacctgtgtccttaccccaggctcaggaactgccagggagggaagatgaggtggggagtctgtactgagatggaactgtcagtgctgtgttgtatgtacttgctgttgtaaaagtttgggcatgactttgcatctagcgggtgctgcctgcatctctttgtctgtaagcttgctctgggactcagcctcttaggacctacgatgccagcagctctcattaacagtgaaatgacagaggccaaagatggccaagtgaagacccaagtctcagaaaacccagacttgggacaactgcctgggaactaggatgctagagcagttctgtaatgctttgagacacagcaattttcacattggccattctttcccctcccctaccccttttcttttgagggacttttaatgtttgctgctttaggtggatggagagtccaccagtcccactcaatgctgctctaactctacccacacccacctaattaggggtgctaataaaacatgctgaggttgagataaagacgggacataaggggaaaattcattccatagagctgaaatctggttttcaaggcctctgtggctttcttctgaacttaccaccagccctggctggaatgtagattgtgtttttagtaatgtgtactgtgagctgtcttctgtataatgtattttgtaatgtatttttctcatctaccaaaggatgaaacaaataaaattatttaaatagt

SEQ ID NO: 933 - DNA, 5986 bp, HOMO SAPIENS
gggcgcgcgagagctgctagggcggtttctctgcctcgggcctgttgggcagggccggctaaggtgcgcgtgctcgctggttctaacccttctgttgggcgtttctgcggagaggcgggaggcgctgagagtctgcgcggaggtccgtgcacagactgctttgcctgttgttgctcttcggaggcggcgatccccgaaggcgagctgaaatacggctgcaggctacaatttgcagccgacgattaaggaagacgacgagcgggagaggtggcccaccctcatggagcgcttgtgctcggatggcttcgcatttccccattactacattaaaccgtatcatctgaagaggatccacagagctgtcttacgtggtaatctggagaaactgaagtaccttctgctcacgtattatgacgccaataagagagacaggaaggaaaggactgccctacatttggcctgtgccactggccaaccggaaatggtacatctcctggtgtccagaagatgtgagcttaacctctgcgaccgtgaagacaggacacctctgatcaaggctgtacaactgaggcaggaggcttgtgcaactcttctgctgcaaaatggcgccgatccaaatattacggatgtctttggaaggactgctctgcactacgctgtgtataatgaagatacatccatgatagaaaaacttctttcacatggtacaaatattgaagaatgcagcaagaatgaatatcagccactgttacttgctgtgagtcgaagaaaagtgaaaatggtggaatttttattaaagaaaaaagcaaatgtaaatgccattgattatcttggcagatcagccctcatacttgctgttactcttggagaaaaagatatagtcattcttcttctgcagcacaatattgatgtgttttctcgagatgtgtatggaaagcttgcagaagattatgccagtgaggctgagaatagagtcatttttgatctaatttatgaatacaaaagaaagagatatgaagatcttcctataaatagcaatccagtgtctcctcagaaacaacgagctgagaaggctacaagtgacgacaaagattctgtttcaaatatagccacagaaataaaggagggacctatatctgggacagtgtcttctcagaaacaaccagctgagaaggctacaagtgacgagaaagattctgtttcaaatatagccacagaaataaaggagggacaacaatctgggacagtgtctcctcagaaacaatcggcccagaaggttatatttaaaaagaaagtttctcttttgaatattgccacaagaataatgggcggtgggaaatctggaacagtgtcttctcagaaacaaccagcctcaaagactgcaagtgacaagacagattctgctttgaatacagctacagaaataaaggatggactacaatgtgggacagtgtcttctcagaaacaacaagccttgaaggctacaactgacgaggaaggttctgtttctaatatagccacagaaataaaggatggagaaaaatctgggacagtgtcttctcagaaaaaaccagccttgaaggccacaagtgatgagaaagattctttttcgaatataaccagagaaaaaaaggatggagaaatatctaggacagtgtcttctcagaaaccaccagccttgaaggctacaagtgtcaaggaagattctgttttgaatatagccagagaaaaaaaggatggagaaaaatctaggacagtgtcttttgagcaaccaccaggcttgaaggctacaagagacgagaaagattctcttttgaatatagccagaggaaaaaaagatggagaaaaaactaggagagtgtcttctcataaacaaccatccttgaaggctacaagtgacaaggaagattctgttccgaatatggccacagaaacaaaggatgaacaaatatctgggacagtgtcttgtcagaaacaaccagccttgaaggctacaagtgacaagaaagattctgtttcgaatatacccacagaaataaaggatggacaacaatctggaacagtgtcttctcagaaacaaccggcctggaaggctacaagtgtcaagaaagattctgtttcgaatatagccacagaaataaaggatggacaaatacgtgggacagtgtcttctcagagacgaccagccttgaagactacaggtgatgagaaagattctgtttcgaatatagccagagaaataaaggatggagaaaaatctgggacagtgtctcctcagaaacaatcggcccagaaggttatatttaaaaagaaagtttctcttttgaatattgccacaagaataacgggcggtgggaaatctggaacagagtatcctgagaatctgcgcaccttgaaggctacaattgaaaataaagattctgttctgaatacagccaccaaaatgaaggaggtacaaacatccacaccagcagaacaagacttagaaatggcatcagagggagagcaaaagaggcttgaagaatatgaaaataaccagccacaggtgaaaaaccaaatacattctagggatgaccttgatgacataattcagtcatctcaaacagtctcagaggacggtgactcgctttgctgtaattgtaagaatgtcatattactcattgatcaacatgaaatgaagtgtaaagattgtgttcacctattgaaaattaaaaatacattttgtttatggaaaagattaataaaacttaaagataaccactgtgagcaacttagagtaaaaattcgaaaactgaaaaataaggctagtgtactacaaaagagaatatctgaaaaagaagaaataaaatcgcagttaaagcatgaaatacttgaattggaaaaagaactctgtagtttgagatttgccatacagcaagaaaaaaagaaaagaagaaatgttgaagagttgcaccaaaaagttagggaaaagttaagaataacagaagagcaatataggatagaagctgatgtgacaaaaccaattaaaccggctctcaaatcagcagaggtggaattgaagacaggaggaaataattcaaatcaggtttctgaaactgatgaaaaagaagacctgctgcatgaaaaccgcttgatgcaagatgaaattgccaggctcaggctggaaaaagacacaataaaaaaccaaaacctggaaaagaaatacttaaaagactttgaaattgtgaaaagaaagcatgaagaccttcaaaaggctctaaaacggaatggggaaacattagcaaaaacgatagcctgttatagtggacagcttgctgctctgacagatgaaaacacaacgctccgttccaaactggagaagcaaagagagagcaggcaaagactggaaacagaaatgcaatcataccgttgtagactgaatgctgctcgatgtgatcatgatcaaagtcactcatcaaaaagagaccaagagcttgctttccagggcacagtagataaatgtcgtcacttacaggaaaatttgaattctcatgttctgattctttctctgcaactttctaaagctgagagtaagtccagagtcctcaaaactgagctccattacacaggagaggctctgaaagaaaaggctttggtttttgaacacgtgcaaagtgagctaaagcaaaaacagagtcaaatgaaggacattgaaaaaatgtacaaaagtggatacaatacaatggaaaaatgcatagaaaaacaggaaagattttgtcaactaaaaaaacaaaatatgttgcttcaacagcaactggatgatgctcgcaacaaagctgacaatcaagaaaaagcaatacttaatattcaagccagatgtgatgctagagtacaaaaccttcaagctgagtgcagaaagcaccgtcttttactagaagaagacaataaaatgttggtcaatgaactgaatcattcgaaagaaaaagaatgccaatatgaaaaagagaaagcagaaagagaagtagctgtgagacagcttcaacaaaaacgagatgatgtcttaaacaaaggatcagcaacaaaagctctgctggatgcttcatcgcgtcactgcacctatttagaaaatgggatgcaggattcaaggaagaaattagaccagatgagaagtcaatttcaagaaatacaggatcaacttacagctactataagatgtactaaggagatggaaggcgacacacaaaagcttgaagtagaacatgtgatgatgagaaaaattattaaaaaacaggatgaccaaattgagcggcttgagaaaatcctgcagcattcaagtttgatgctgcaggtgtttgagagctagatgaagcatccagccaaactagactacatggagctccacagtgatcgtcttcacctccagctgtttgcatttacttcttccctctatcctacatgtgttttccttccccttcagatatcaacctatgaattgcctctaccaaaaagcctacaatattgacacaaacctgggctagtatcccttctatgtcttccaataagtgctgtcttatgcttgtcattgtatgtatgactctgtatgggaattgcctgtttgttttttcagattatagcatacagttgttgaggggcggaccgtatcatctttatcttgtaattccagtgcttgtcctagtaccttagcacatggttgctgaatacatgaacgaagagtgagaaaccagaagctctgatacttaactgccatgataatgaattcggtgtgcaactatgggcaaattatatttaatagtaattgcatattgtacatatttttcattcttattaacactgataagcttttcagcatatactgactttctcttagttaactgtgaaatcatttagataaagaatataattctttttcattctaacttctgaatttaaatctgaatcctctatagcaggggtccccaactcccaggccacacacagttccatgacctgttaggaagcaggctgcacagcaggaggtgagtggcaggcaagcgagtgaagcttcatctgtatttccagccactccctgttgctcacattatcacctgagctctgcctcctgtcagatcagcaaagccattagattctcacaggagtgaaaatcctactgtgaactgctcgttcaagggatctaggtcacatgctccttatgagactctaatgcctgatgatatgtcattgtctcctatctcttcacgatgggaccatctagttacagaaaaacaagctcaggactcccattgattctccattatgatgagttgtgtaattatttcattatgtattacaatgtagtcataataggaataaagtgcacaatagatgtaatacgcttgaatcaccatcctgaaaccatcccccaaacccccatctgtggaaaaattatctttcacaaaactgctgcctggtgccaaaaaggctggggactgctgctctatagcttctgcactagaatctactaatgagtaaaatttaaatcaataactagttttaaaagcataacaagaatatgtgctgtctggctgcagtggctcatgcctgtattctcagcactttgggaggccagtgcaggtggatcacttgaggtcaggagttcaagaccagcctggccaatatggtgaaatcctgtctctactaaaaatacaaaaattagctgggtgtggtggtgcatgcctgtagtctcagctactcgggaggctgaggtgggagaatcacttgaacccgggaggcagaggtttcagtgagccaagatcgtgccactgcactccagcctgagcaacagagtgactccatctcaaatgcaaaacaaaacagaaagaatacatgctgacgaaaaaaatctaagacaataaaattgtattactaggctgttaacatgatattttgtttcccgttaaatgtgtgacatgcaaaagtatttattaaatgaaaatattttttatctttt

SEQ ID NO: 934 - DNA, 1451 bp, HOMO SAPIENS
ggaggcgtcggggctgcgccgtacaacttccggctgtaaagatggcggcttcctagtgagtcggcggctgatttagaaggaggttcaggctacggtgagccgaaggggaggattctggcttcccctgtccgtgttccatctagccacacaggagccatggaagtggcagagcccagcagccccactgaagaggaggaggaggaagaggagcactcggcagagcctcggccccgcactcgctccaatcctgaaggggctgaggaccgggcagtaggggcacaggccagcgtgggcagccgcagcgagggtgagggtgaggccgccagtgctgatgatgggagcctcaacacttcaggagccggccctaagtcctggcaggtgcccccgccagcccctgaggtccaaattcggacaccaagggtcaactgtccagagaaagtgattatctgcctggacctgtcagaggaaatgtcactgccaaagctggagtcgttcaacggctccaaaaccaacgccctcaatgtctcccagaagatgattgagatgttcgtgcggacaaaacacaagatcgacaaaagccacgagtttgcactggtggtggtgaacgatgacacggcctggctgtctggcctgacctccgacccccgcgagctctgtagctgcctctatgatctggagacggcctcctgttccaccttcaatctggaaggacttttcagcctcatccagcagaaaactgagcttccggtcacagagaacgtgcagacgattcccccgccatatgtggtccgcaccatccttgtctacagccgtccaccttgccagccccagttctccttgacggagcccatgaagaaaatgttccagtgcccatatttcttctttgacgttgtttacatccacaatggcactgaggagaaggaggaggagatgagttggaaggatatgtttgccttcatgggcagcctggataccaagggtaccagctacaagtatgaggtggcactggctgggccagccctggagttgcacaactgcatggcgaaactgttggcccaccccctgcagcggccttgccagagccatgcttcctacagcctgctggaggaggaggatgaagccattgaggttgaggccactgtctgaaccatccctgtacatctgcaccttcttgtgcaaggaagtccttggcctaaagccttggttctcaaactgggttccttgggacctccggggtgggggggttccaggaggcacgtagggtaccttgcagggtcctaggagggaaacccaggattccaggagggatcccaggaactgtgggcacccattttctgtgtctcccagcccatttccactcctagtttgtcatggataatttttgttcttccctgtgtgatttttgccatcaaaataaaaatttgagactcgttaaccgaagtccacgccaa

SEQ ID NO: 935 - DNA, 234 bp, HOMO SAPIENS
aagggcattgagatcctaaaattgaaattgtagatagatatagctgtgggataaagaacttctgctgaatgatgatttgcaaaagtatgtcttcagtatagtactgagtactaattttatggggcaaataactctgtatttaatcttatgaccttgtataaaatcttgccctaaactaaattcaaatgtatagtcatttatacttaattacaaaatttggtgctatgttaatat

SEQ ID NO: 936 - DNA, 1918 bp, HOMO SAPIENS
ctccgggcagagcgcgtgtggcggccgagcacatgggcccgcgggccgggcgggctcggggcggccgggacgaggaggggcgacgacgagctgcgagcaaagatgtgccccgggacccccggcaccttccagtggatttccttgcggaaaggatgttggcggtccctgtgacctgtggagacacggccagatctgccctccagaccatagctgtctgcagtgcaggaagccaactattaaggggaaacaaaagtgttcttaggagtcctgctgtcactgtggattgagccggtgaagccctgagggatttcatcgctgaggtggatggagaagcagctgggggccttggctgtaaggacccctaagggcctgatcttttggccagaaggagattaaaaagatgcccctcaagatggctgtgcctgtcagctgcatggagcttcgttcaagtattttctgagcctgatggatttacagtgatcttcagtggtctggggaataacgctggtggaaccatgcactggaatgacacacgcccggcacatttcaggatactaaaagtggttttaagggaggctgtggctgaatgcctcatggattcttacagcttggatgtccatgggggacgaaggactgcagctggctgagagggttgagatctctgtttacttagatctctgccaacttcctttgggtctccctatggaatgtaagaccccgactcttcctggtgaagcatctgatgcacgttccatccggcgctcagctgggcttgagctgaccatactccctggagccttctcccgaggtgcgcgggtgaccttggcacatacagccatcatgatggtactttaagtggaggctgaatcatctcccctttgagctgcttggcacgtggctcccttggtgttccccttttactgccaggacactgagatttggagagagtctcactctgtggtccaggctgaagtacagtggcatgatcccaggtcactgcaacccccacctcccgggttcaagtgatcctcctgcctcagcctcccgagtagctggtattacaggcgtgtgccacaaagcctggctaagttttgtatttttagtagagacggggtttcaccatgttggccaggttggtctcgaactcctgacctcaagtgatccactcactttggcctttcaacgtgctgggattacaggcgagagtcaccgcacccggacgactctgacatttttgaagagtccagaatcctgttacacctgggatttaggcactttcaatctgaaaaaatacatatcctttcagcactctggacggacttgagaactgtccttacgtgacctaaagctggagtattttgagattggagaattaagagccagtcttggtgctctgtgttcacctggttcatctgaggagctgcatctaccctgcccatgccatagatcctgccctgtttgcttctcctgttgctgctagtggacatgagaaggacagaataacgggctcccagattcacaagccccaccaagaggatcaccccaggaacgcttggaggctgaggagttcactgaggctactgcatcttgagactcaggatgaagacccagcttggggctgtcaaaggttttttgcatgtctgacacccatgactccacctggaccttatggctccacccagaagcaattcagcccaacaggaggacagcttcaacccattacgatttcatctctgccccaaccactcagcagcaagcacctgttacctgtccacccccaccccttcccccaaactgcctttgaaaaatccctaacctatgagctttgaataagatgagtacgaacttcatcgcccacgtggcgtggccggcctcgtgtctattaaattctttttctactaaaaaaaaaaaaaaaaaa

SEQ ID NO: 937 - DNA, 1011 bp, HOMO SAPIENS
agctataaactccccggagcttcagtgccctcagcaaggctcagcctcaagattcacagcatctcagacacagcctaggccgcaccaggatgtcggacaccgaggagcaggaatatgaggaggagcagccggaagaggaggctgcggaggaggaggaggaagcccccgaagagccggagccggtggcagagccagaagaggaacgccccaaaccaagccgccccgtggtgcctcctttgatcccgccaaagatcccagaaggggagcgcgttgacttcgatgacatccaccgcaagcgcatggagaaagacctgctggagctgcagacactcatcgatgtacatttcgagcagcggaagaaggaggaagaggagctggttgccttgaaggagcgcattgagcggcgccggtcagagagagccgagcaacagcgcttcagaactgagaaggaacgcgaacgtcaggctaagctggcggaggagaagatgaggaaggaagaggaagaggccaagaagcgggcagaggatgatgccaagaaaaagaaggtgctgtccaacatgggggcccattttggcggctacctggtcaaggcagaacagaagcgtggtaagcggcagacggggcgggagatgaaggtgcgcatcctctccgagcgtaagaagcctctggacattgactacatgggggaggaacagctccgggagaaagcccaggagctgtcggactggatccaccagctggagtctgagaagttcgacctgatggcgaagctgaaacagcagaaatatgagatcaacgtgctgtacaaccgcatcagccacgcccagaagttccggaagggggcagggaagggccgcgttggaggccgctggaagtgaggatgccgccccggacagtggcacctgggaagcctgggagtgtttgtcccatcggtagcttgaaataaacgctcccctcagacacccgctgggttctctgatgttattatggttgagatgcaaaaaaaaaaaa

SEQ ID NO: 938 - DNA, 4008 bp, HOMO SAPIENS
aggcagtgattttggggcagagaattttgcaacacgtggtagtgaactgtgaggagtttgaggggtctgaagactgaaagagtcgaatggtttgttggcagggtgtcctggtggattggtttctgtaagttcagattctcataaatcgtgtgagcgtcgccgacacctctgagataaaagggcccctttcgactagcctctgctgaaaggacctagaagaatcccttaggatgaagctgagtcttaccaaggtagttaatggctgtcgcctaggaaaaataaaaaacctgggcaaaacaggggaccacaccatggatattccaggctgccttctgtataccaagactggctccgccccacacctcacccatcacacgctgcataatatccacggggttcctgccatggctcagcttacgctgtcatccctagcagaacatcatgaagtcttgacagaatataaagaaggagttggaaagtttataggcatgccagaatcactcttgtactgctccctgcacgatccagtcagcccctgcccggctggttatgtaacaaacaagtctgtgtctgtgtggagtgttgcaggacgagtggaaatgactgtttccaagttcatggcaattcagaaggcccttcagccagactggttccagtgcctctccgatggagaagtatcttgtaaggaagcaacttccataaaaagggtcagaaagtctgttgaccgatcacttcttttcttggataactgtctgcggctgcaggaagagtcagaggttcttcagaagagtgtgatcattggagtgattgaaggtggagatgtgatggaagagaggctgaggtcagcacgagagacagccaagcggcctgtgggtggcttccttctggatggttttcaaggaaatccaacaaccctggaggctagactacgcttgctgtcatcagtcactgcagagctgccggaggacaagccaaggctcatatctggtgttagtcggccagatgaggtgctcgagtgtattgaaagaggagtggacttatttgagagttttttcccttatcaagtaacagagcggggatgtgccctgactttcagttttgattaccagccgaatcctgaagagacactactacaacaaaatggaacacaagaagaaataaaatgtatggatcaaataaagaaaattgaaacaactggttgcaaccaagaaataacatcatttgaaattaatctgaaggaaaaaaagtaccaggaggactttaacccgctggtgagaggatgttcctgttactgctgtaagaatcacactcgggcatacatccaccatctgctggtgaccaatgagctgctggccggagtcctgcttatgatgcacaactttgaacactactttgggtttttccattacatccgggaagcactaaaaagtgacaaactggcacagttgaaagagctcatccacaggcaagcatcttgagatcttgcaaatacaagtctcactcttcacactgagcctgtaccactgttgtaacatgggaagacgtgaagaagaaataatctgagctttaattatttatatttggatataaggtctgcttaaataaagaatctttgtaccaaactgcccacatgagggtgaagagatttcctcaaaagacttaaatgacctggattgatcagagagaattgaactgtgacctttaagacttctagactaattcttttagttgatagagattcatttagtcaaagacaaaagctttaactgtgagggcacagccttgaagtgggagtgatgagattctgagggacccatgaattggattgaggcttgaggggaaatggtgtgagacgaatgggctctggacatatgcctgttgatttgagaagaaatctggctggtttgagggtttcctttagttcaccctcatactctcaggagactcttctggatacttttgtcttccaccctgccctggcagtgcagccaatcagaaatggctcttgtgacttaactgggcttggatatccctggaatgtggggcttgaacattgctcctgtgatgatcatctgtcccaggtcacactccttcatttgaccacatggcctatttgcaacttctttttagagccaatgtaattgcctgttaggagccagaagtttgcccagctgctttcttctggttgtacagatccattgtggtctgccttccaggctcattaatagtctaactacgtaataactgaagacctatctcttgtgaagattcattctcaatgtgttcacttggacagagccctgcctggcctaacgattagagggttagtctccatcctgctcagatatgactcctgggcaattcacttaacttctccatggctgcttcctgctgaataaatagggacaggcataatggataggaatgaatgaacttttaagatactgtctagctctaaaattggaagaacaaaaagttttagattagagtcatagccttaatagccctagttgtcatcctgggagacaggcaacagtagagatatttgagagcctaaagagaggtttggcctgtgggtttttaagtggttattgaattggtatcaggagatcctgaggctggtaggggaaggtaattctttctaagttacctctgtatttttcaagttttctataaggaatacacatacacccacatgcacacaccatagtttttatacaaacagcaataacaaaaccaaaaagatgcccctttttttgtagggataagaaatacatttgttttatacttctatgctatattttgctattcaaaatttagtgggcattacttaacattgtttctaattattttgtggctgctgtatgttttatgtgttgggagcccattgtattaggccgttcttggattgctataaagaaatacctgagactgggtaatttggttttttggttttttggggttttttttgagacggagccttgctctgtcgcccaggctggagtgcagtggcgcgatctcggctctatgcaacctccacctcctgggttcatgccattctcctgcctcagcctcccgtgtagctgggactacaggcgcccgccaccatgcctggctaattttttatatttttagtagagatggggtttcaccgtatgagccaggatggtctcgatctcctgacctcatgatccacaagactgggtaatctgtaaagaaaagaggtttaattggctcatggctctgcaggctttacaggaagcatggtactggcatctgcttggtttctggggaggcctccggaagcttatagtcatgacagaaggtgaagggggagcaggcacatcacatgacaaaagcaggaacaagactcagagcaagaagtcacttatcaccaaggggatggcccaggccattcatgagggatccacctttgtgctccaaacacctcccaccaggccccacctccagtattggggattacatttcaacttgaggtttgggcgggaacaaatagtcaaattatattacccatctacatggttttctttttcttagtatgggagtgtccatgaataaattcatgggcatcctcataactcttccatgaatggcaaggggtacttatggaaaacagttttccaaagatctgattgttttgaaatgtgttagattggacttgttcaaatgttcatatttttgttctatgctaaatgcatcgttaggggagtagtggtaaatattccagaatccatatgaaattcatgagtttatttatgtctaaaacactgaaaactgtgtccaatatcgttcagtttcctgggtctttttcttattagcacatttgagaaaaatattcctttcctttattgtagtaaatctattaaaggcaatagccaataaaacatttttaattttaaaaatttactgtgtttggctttctgtaaatgtagtaggtctgttaaacaaaatattaaatttccatagtaccagaaaaaaaaaaaaaaa

SEQ ID NO: 939 - DNA, 1221 bp, HOMO SAPIENS
gggtcctcggagctgctctggctgcgcgcggagcgggctccggagggaagtcccgagacaaagggaagcgccgccgccgccgccccgctcggtcctccacctgtccgctacgctcgccggggctgcggccgcccgagggactttgaacatgtcggggatcgccctcagcagactcgcccaggagaggaaagcatggaggaaagaccacccatttggtttcgtggctgtcccaacaaaaaatcccgatggcacgatgaacctcatgaactgggagtgcgccattccaggaaagaaagggactccgtgggaaggaggcttgtttaaactacggatgcttttcaaagatgattatccatcttcgccaccaaaatgtaaattcgaaccaccattatttcacccgaatgtgtacccttcggggacagtgtgcctgtccatcttagaggaggacaaggactggaggccagccatcacaatcaaacagatcctattaggaatacaggaacttctaaatgaaccaaatatccaagacccagctcaagcagaggcctacacgatttactgccaaaacagagtggagtacgagaaaagggtccgagcacaagccaagaagtttgcgccctcataagcagcgaccttgtggcatcgtcaaaaggaagggattggtttggcaagaacttgtttacaacatttttgcaaatctaaagttgctccatacaatgactagtcacctgggggggttgggcgggcgccatcttccattgccgccgcgggtgtgcggtctcgattcgctgaattgcccgtttccatacagggtctcttccttcggtcttttgtatttttgattgttatgtaaaactcgcttttattttaatattgatgtcagtatttcaactgctgtaaaattataaacttttatacttgggtaagtcccccaggggcgagttcctcgctctgggatgcaggcatgcttctcaccgtgcagagctgcacttggcctcagctggctgtatggaaatgcaccctccctcctgccgctcctctctagaaccttctagaacctgggctgtgctgcttttgagcctcagaccccaggtcagcatctcggttctgcgccacttcctttgtgtttatatggcgttttgtctgtgttgctgtttagagtaaataaactgtttatataaaggttttggttgcattattatcattgaaagtgagaggagg

SEQ ID NO: 940 - DNA, 2591 bp, HOMO SAPIENS
cggaggtgcgcgggcgcgggcgagcagggtctccgggtgggcggcggcgacgccccgcgcaggctggaggccgccgaggctcgccatgccgggagaactctaactcccccatggagtcggccgacttctacgaggcggagccgcggcccccgatgagcagccacctgcagagccccccgcacgcgcccagcagcgccgccttcggctttccccggggcgcgggccccgcgcagcctcccgccccacctgccgccccggagccgctgggcggcatctgcgagcacgagacgtccatcgacatcagcgcctacatcgacccggccgccttcaacgacgagttcctggccgacctgttccagcacagccggcagcaggagaaggccaaggcggccgtgggccccacgggcggcggcggcggcggcgactttgactacccgggcgcgcccgcgggccccggcggcgccgtcatgcccgggggagcgcacgggcccccgcccggctacggctgcgcggccgccggctacctggacggcaggctggagcccctgtacgagcgcgtcggggcgccggcgctgcggccgctggtgatcaagcaggagccccgcgaggaggatgaagccaagcagctggcgctggccggcctcttcccttaccagccgccgccgccgccgccgccctcgcacccgcacccgcacccgccgcccgcgcacctggccgccccgcacctgcagttccagatcgcgcactgcggccagaccaccatgcacctgcagcccggtcaccccacgccgccgcccacgcccgtgcccagcccgcaccccgcgcccgcgctcggtgccgccggcctgccgggccctggcagcgcgctcaaggggctgggcgccgcgcaccccgacctccgcgcgagtggcggcagcggcgcgggcaaggccaagaagtcggtggacaagaacagcaacgagtaccgggtgcggcgcgagcgcaacaacatcgcggtgcgcaagagccgcgacaaggccaagcagcgcaacgtggagacgcagcagaaggtgctggagctgaccagtgacaatgaccgcctgcgcaagcgggtggaacagctgagccgcgaactggacacgctgcggggcatcttccgccagctgccagagagctccttggtcaaggccatgggcaactgcgcgtgaggcgcgcggctgtgggaccgccctgggccagcctccggcggggacccagggagtggtttggggtcgccggatctcgaggcttgcccgagccgtgcgagccaggactaggagattccggtgcctcctgaaagcctggcctgctccgcgtgtcccctcccttcctctgcgccggacttggtgcgtctaagatgagggggccaggcggtggcttctccctgcgaggaggggagaattcttggggctgagctgggagcccggcaactctagtatttaggataaccttgtgccttggaaatgcaaactcaccgctccaatgcctactgagtagggggagcaaatcgtgccttgtcattttatttggaggtttcctgcctccttcccgaggctacagcagacccccatgagagaaggaggggagcaggcccgtggcaggaggagggctcagggagctgagatcccgacaagcccgccagccccagccgctcctccacgcctgtccttagaaaggggtggaaacatagggacttggggcttggaacctaaggttgttcccctagttctacatgaaggtggagggtctctagttccacgcctctcccacctccctccgcacacaccccaccccagcctgctataggctgggcttccccttggggcggaactcactgcgatgggggtcaccaggtgaccagtgggagcccccaccccgagtcacaccagaaagctaggtcgtgggtcagctctgaggatgtatacccctggtgggagagggagacctagagatctggctgtggggcgggcatggggggtgaagggccactgggaccctcagccttgtttgtactgtatgccttcagcattgcctaggaacacgaagcacgatcagtccatcccagagggaccggagttatgacaagctttccaaatattttgctttatcagccgatatcaacacttgtatctggcctctgtgccccagcagtgccttgtgcaatgtgaatgtgcgcgtctctgctaaaccaccattttatttggtttttgttttgttttggttttgctcggatacttgccaaaatgagactctccgtcggcagctgggggaagggtctgagactccctttccttttggttttgggattacttttgatcctgggggaccaatgaggtgaggggggttctcctttgccctcagctttccccagcccctccggcctgggctgcccacaaggcttgtcccccagaggccctggctcctggtcgggaagggaggtggcctcccgccaacgcatcactggggctgggagcagggaaggacggcttggttctcttcttttggggagaacgtagagtctcactctagatgttttatgtattatatctataatataaacatatcaaagtcaa

SEQ ID NO: 941 - DNA, 4748 bp, HOMO SAPIENS
cctcgcggggttgcggcgagcccggcccgcgaacgtcacgtccctgcgcgctccctgcactctcccgagctgcgctaggcgggcgccacggctgcccggcgaaggaaaccgaaaccgagtccgggcccgtccctccgcggccccatccgcccggtgcacccggggccgcgctcgccaggccgcggagcccagagctgcgcgcacgaaccgtgcgccgggagggcgtgggcgtggcgccgaagggtcccgggtcttcgacgcctctgcggcggctcctccctccttgcagttggatccctggcgggtgcggcccggcccggcccgtgagcggcgcacagaatgggccgatgctgcttctacacggcggggacgttgtccctgctcctgctggtgaccagcgtcacgctgctggtggcccgggtcttccagaaggctgtagaccagagtatcgagaagaaaattgtgttaaggaatggtactgaggcatttgactcctgggagaagccccctctgcctgtgtatactcagttctatttcttcaatgtcaccaatccagaggagatcctcagaggggagacccctcgggtggaagaagtggggccatacacctacagggaactcagaaacaaagcaaatattcaatttggagataatggaacaacaatatctgctgttagcaacaaggcctatgtttttgaacgagaccaatctgttggagaccctaaaattgacttaattagaacattaaatattcctgtattgactgtcatagagtggtcccaggtgcacttcctcagggagatcatcgaggccatgttgaaagcctatcagcagaagctctttgtgactcacacagttgacgaattgctctggggctacaaagatgaaatcttgtcccttatccatgttttcaggcccgatatctctccctattttggcctattctatgagaaaaatgggactaatgatggagactatgtttttctaactggagaagacagttaccttaactttacaaaaattgtggaatggaatgggaaaacgtcacttgactggtggataacagacaagtgcaatatgattaatggaacagatggagattcttttcacccactaataaccaaagatgaggtcctttatgtcttcccatctgacttttgcaggtcagtgtatattactttcagtgactatgagagtgtacagggactgcctgcctttcggtataaagttcctgcagaaatattagccaatacgtcagacaatgccggcttctgtatacctgagggaaactgcctgggctcaggagttctgaatgtcagcatctgcaagaatggtgcacccatcattatgtctttcccacacttttaccaagcagatgagaggtttgtttctgccatagaaggcatgcacccaaatcaggaagaccatgagacatttgtggacattaatcctttgactggaataatcctaaaagcagccaagaggttccaaatcaacatttatgtcaaaaaattagatgactttgttgaaacgggagacattagaaccatggttttcccagtgatgtacctcaatgagagtgttcacattgataaagagacggcgagtcgactgaagtctatgattaacactactttgatcatcaccaacataccctacatcatcatggcgctgggtgtgttctttggtttggtttttacctggcttgcatgcaaaggacagggatccatggatgagggaacagcggatgaaagagcacccctcattcgaacctaaacattgcctttgcttggtgaagaaactgtgtgagctgtcctgacctggacgatgacgtggggaaaccctccacctccttgcaggcttgttgcctgttgaaagaaggaaaaagacacggcgctggcaagtgataggaacattctggccagaggttaaagagcaggctgacatggctggccattaagctttataaaatcatgtgggctctgaaattgttcttttatgtgtctagcaagtatttaataaacccttgtatagtaattttgttgttgttgggtgctggtagctccagaattttgtgaccactattgtgggtaaaatgtctctgcatcacttgttaatgctactggtctaacttcattcagtatgcttcattcaccgaactttgtgctcaaaatgcgtatataccattttatgttgtattcctccatttcacttgcaaaacagaagtaaataagagttcgggacccagggtaaaatggtagcttcatccaatatatcattcaaatgcatctgatttctaaaacatattacattttatgctgatcttcagttcataattcttccaggaaaactcagtcttccaactgcaataaaatactgggtagaatcaaatgggaaaggggttgggtggggcaatacccatgagttgatagtgataagctcctaaggatttttaacttgtacttttgtgaacgaagagaatgcataaataatgttggtgaggataaagtacagatatttcatgtagaattaattgctagttatgatgcttgtggatagttaactgttttttttttagtcaaaatgatcatgctacgaaaagatgcttctgagagaatgtaatgagtaactgatttttcttcctgagtcgcccttgccaaatatgttactgtattaattaatctaatattgagtgattatttgtaaaattatgaatatgggaaatccatctatctacagcctaagttacacataagtttcagaaagtctgattagactaaagagatatttcttctgggacagccgccttcttggtaattttgaagttctttttacaagttccttcctcagtttcagttctttccagtgttttgtagctcactgtcactcactgaatagagaaacgtgtgccctatacttcctgtgacaatcattttgctgacagaatgatggatgtttaaaatattgcacaaagtactttaaagaaaggtctgttaggaccagaagcagagacaccacttttcaaaggacttcttggtttcagcataacctaagacagggaattgggagccatcatatgtcacagtgttcagaattcaagcatatttaagggcattttctttgattctcaaagttcagcattcattttgaattgagaagcctatacatttagctgacaaagtgcttatagaatttcttaacaactgaaccattcaaaaggattttttttgtttaaaactggatttcaatgtaagcaaatgaagaaaaaaatatagatttcatttccatagcttcttatccctgtattgaggtaataaattgttttactgacaatttttcctttttctacactaaaacaatatgtgatatatttcccctcttgaagaggcaattcattaaactctcaaattttctatagaatcaagatagaacctttagatactccaactcaccaaaatgtaaaaaaactaacaaaaatatttggtcttcaataatgctaaatatctacatttttagaatttatcaacatttaactagataattgggcatgtcttaattatgcatgtacttatccatactaataaaattgacaatgctagtgcatacttattggtttagtcctattatcaggatataatcatctgtgaggaggatattttaaatactgtaaatgataacagttaatgatatacacatttagactgagttgcacactggcagggagaccaaaaacattacttccatacttgtgtcatgattcttttttttttgagagagtctcactctgtcgccaggctggagtacagtggcatgatctcggctcactgcaacctctgcctcccgggttcaagcaattctcctgcctcagccacccaagtagctgggactacaggtgcgtgccaccacgcccagctaaattttgtatttttagtggagacggggtttcaccatgttggccaggatggtctcaatctcctgaccctgcgatctgcccacctcagcctcccaaagtgctgggattacaggcgtaagccaccgggcctggcctgttttatgattcttaatagttacttggtttaaatcacatttgatactatccttctgaaaagtctgagacagatctacaaactacagtcaaaattatagattaagaggaatgaatgcacctatttggctttaagttgaagatgaattatttctcatgctcattttcttgcggcagttatcttagaaagacccccaaaggctttgtgattgtaagcactgtcatgatcacagaatgcaagcttctggtaccatgatcctcaacttagagaggaagaaaccaagacagagagcttaactcacttctctcagggaaaattaggagttgagcacaggacaggaaatgggctttgccacttttagctccaggcttttctaaccagacttgatttcctcatgttctagaaagatcactaatggtcaagtggaacaagcactacacgactaacccctattggggtttttaacttaagggaggctaatttttaatttaaactgctcgagatatgagttctgcaaaaggtggtccgcatccttggccctctggacattatcactaaattgcttgtgcctgttaacaagaatactgaccagaatgctcttcatgtagcttatacagttggttcacttcatgcggttcttgacatgtttatttctacccttaatgcaatgaaatgtttcattaataaaaaaccactttatat

SEQ ID NO: 942 - DNA, 1308 bp, HOMO SAPIENS
gtcagccgctgtccccttagccgcgatgccgctggagaacctggaggaggagggtctgcccaagaaccccgacttgcgtatcgcgcagctgcgcttcctgctcagcctgcccgagcaccgcggagacgctgccgtgcgcgacgagctgatggcggccgtccgcgataacaacatggctccttactatgaagccttgtgcaaatccctcgactggcagatagacgtggacctactcaataaaatgaagaaggcaaatgaagatgagttgaagcgtttggatgaggagctggaagatgcagagaagaatctaggagagagcgaaattcgcgatgcaatgatggcaaaggccgagtacctctgccggataggtgacaaagagggagctctgacagcctttcgcaagacatatgacaaaactgtggccctgggtcaccgattggatattgtattctatctccttaggattggcttattttatatggataatgatctcatcacacgaaacacagaaaaggccaaaagcttaatagaagaaggaggagactgggacaggagaaaccgcctaaaagtgtatcagggtctttattgtgtggctattcgtgatttcaaacaggcagctgaactcttccttgacactgtttcaacatttacatcctatgaactcatggattataaaacatttgtgacttatactgtctatgtcagtatgattgccttagaaagaccagatctcagggaaaaggtcattaaaggagcagagattcttgaagtgttgcacagtcttccagcagttcggcagtatctgttttcactctatgaatgccgttactctgttttcttccaatcattagcggttgtggaacaggaaatgaaaaaggactggctttttgcccctcattatcgatactatgtaagagaaatgagaattcatgcatacagtcagctgctggaatcatataggtcattaacccttggctatatggcagaagcgtttggtgttggtgtggaattcattgatcaggaactgtccaggtttattgctgccgggagactacactgcaaaatagataaagtgaatgaaatagtagaaaccaacagacctgatagcaagaactggcagtaccaagaaactatcaagaaaggagatctgctactaaacagagttcaaaaactttccagagtaattaatatgtaaagccatgtaactaacaaaggatttgctttagagataattatttggaatttttatagcttacttcacaatgtgcccaggtcagctgtataaaataaatactgcattgttgtttc

SEQ ID NO: 943 - DNA, 1234 bp, HOMO SAPIENS
gggccgcgagcactggcgggttctgggtcctgtgaccggtcaggcggcgtcagcgggcgcggcggagggctggccggcctcgggggagtttccgcggccgccgggggcgcggcggcagagcgcgaggccgggcagggggccagactcggagtcgaggcgcgcccgacagccgcagcgctcatggcgggcggaggagccggggaccccggcctgggggcggccgccgccccagcgcccgagacccgcgagcacctcttcaaggtgctggtgatcggcgagcttggcgtgggcaagaccagcatcatcaagcgctacgtccaccagctcttctcccagcactaccgggccaccatcggggtggacttcgccctcaaggtcctcaactgggacagcaggactctggtgcgcctgcagctgtgggacatcgcggggcaggagcgatttggcaacatgacccgagtatactacaaggaagctgttggtgcttttgtagtctttgatatatcaagaagttccacatttgaggcagtcttaaaatggaaaagtgatctggatagtaaagttcatcttccaaatggcagccctatccctgctgtcctcttggctaacaaatgtgaccagaacaaggacagtagccagagtccttcccaggtggaccaattctgcaaagaacatggctttgccggatggtttgaaacctctgcaaaggataacataaacatagaggaagctgcccggttcctagtggagaagattcttgtaaaccaccaaagctttcctaatgaagaaaacgatgtggacaaaattaagctagatcaagagaccttgagagcagagaacaaatcccagtgttgctgatatatggcttctgcttctcttgtgtgtgcctcagctctgaagaagttcctgagaatgggttacagatgtcatgttagctgggagtcttcccacatgtggcacttcaaaaggcagcaccactgggcgcctgcacttatttgaaaatggaactttgggagaagtatccctgctagtggctctgtaacttaacagatgacaattaggcttttgtcattgttgccatcatatggaagataatgtttacatccttttaaacatttttatatgacaattcctcaggatttggtaaggcttccaagttgtagcttttagtgtaagtgctggggtggtaataaaatgttacctgcaaaaaaaaaaaaaaaaaaaaaaaaaaaaa

SEQ ID NO: 944 - DNA, 3426 bp, HOMO SAPIENS
ccggaacatggctgccgccggccgccaaccggtcttgctgtctcacccaggctggagtgcagtggcacgatcacagctcactgcagccttgagctcctgggctaccaagtagctgggacttcagagatggctggagccgtgtggatgggcataaatggctaatgtccagcaaccatcgatgtcaagtatccacacacctggcctgaatggatccctctgcctttcagagtttgggatatgagattgaaaatgacgactcggaattttcctgagagagaagtaccctgtgatgtagaagtggaaagattcacaagggaagttccctgcttgtccagtttaggtgatggttgggactgtgagaaccaggagggacacttgaggcaatcagctttaactctggagaaaccagggactcaggaagcaatttgtgaatatcctggttttggggagcatttgattgcaagctcagaccttccaccgtctcagagagttctggcaacaaatggtttccatgcacctgactcaaatgttagtggtctggattgtgaccccgccttacccagctatcctaaaagttatgcagataagagaactggtgacagtgatgcctgtggaaaaggcttcaaccattccatggaagttattcatggaagaaatccagtgagagagaagccctacaaataccctgaaagtgttaagtcttttaatcattttacctctcttggtcatcagaaaataatgaaaagaggcaagaaatcgtatgaaggtaagaattttgagaacatctttactctgagctcatcgcttaatgaaaaccagagaaatctccctggagagaaacaatatagatgtactgaatgtggcaaatgcttcaaacggaactcttctcttgttttgcatcaccgaactcacaccggagagaagccttatacttgtaatgagtgtggaaagtccttctccaagaactacaacctgattgtgcatcaaagaatccacacaggagagaagccctatgaatgcagtaaatgtgggaaagctttcagtgatggctcagctctgacacagcaccagagaattcacacaggcgagaaaccttatgaatgcctagagtgtggaaaaaccttcaaccgaaattcatccttaattttgcaccaaagaactcatacaggggaaaaaccatatagatgtaacgaatgtgggaaacccttcactgacatctcccaccttacagtgcatctcagaatccacaccggtgagaagccctatgagtgtagcaaatgtggaaaggctttccgggacggctcgtacctcacccagcatgagaggactcacactggagaaaagccctttgagtgtgcagagtgcgggaaatccttcaacagaaactctcacctcattgtgcatcaaaagatccattctggggagaaaccctatgaatgtaaagaatgtggcaagactttcatcgagagtgcgtacctcatcaggcatcagaggattcatactggcgagaagccctatggctgcaaccagtgtcagaaacttttcaggaatatcgctggcctcattaggcaccagaggactcatactggtgagaagccctatgagtgtaatcagtgtggcaaagccttcagggacagctcctgtctgaccaagcaccagagaattcacactaaggagaccccatatcagtgtccagaatgtgggaagtccttcaagcagaactctcacctggcagtacatcagagactccatagcagggagggtcccagccggtgtcctcagtgtggaaaaatgttccaaaagagctcatcccttgttcgacatcaaagagcacacctgggagagcaacccatggaaacataatggttgggggccacatgagtcttccagttcactctcactcctgtgtttaggaggcgtgtcttagatctgactcctctctggtcagtagaaaagaatcctttaagctatccagtgaattgatgaatgtgagacattgctgagccacactgttaagtctgctcattggggaactccagagacaacttaggatgagggcagaaaagtctttggggatgattcagtctgtaccagacatgacaacacacacactggaatgaaatgtgcaaacatgggggtgacaccacagagagaacctgtgaatgcattcagaacatgattggaatgaagagccctgtagtagggagtttccaccttgtacgtaagcaaacactgaatcaacttttttttttttttcggacagagtctcactgtgcagtggcatgatctccactcacagcaacctctgcctcccaggttcaagcagttctcctgcctcagcctccaaagtagctaggattacaggtgcctgccaccatgcctggctaattttttctatttttagtagagacagggtttcactgtgttggccaggctggtcttgaactcctgacctcatgatccgcccacctcagcctcccaaagtgttgggattacaggcatgagacactgcctggcctgaatcaaccttttttaagtgtaatcagaaagagaggctttggcaggggctcttactgtgttttctgtaacaacaaaggtgtacaatgagagagtccacacagtgctgtactgcacacaccacagaatgtgtgagattttcctgtttgaatgtatgtctgcattatactcctgcaataatgctgaggactcgttgcaggagggcaaactaggtgaataaattacctgtgaatgaacaatgaagtcgttcctcttaagactgaaacaagcaggccagatgtggtggctcacgcctgtaatcctagcactttgggaggccgaggcggccagatcacaaggttaggagttcaagaccagcctggccagcatggtgaaaccccatctctaccaaaaatacaggaaattatctgggcatagtagtgtgtgcctgtaatcccagctacttgggaagctgaggcaggagaattgcttgaacctgggaggtggaggttgcagtgagctaagatcgcaccactgcactccagcctgggtgacagagcgagactccatttcaaaaaaaaagactgaaacaagcttgtgctaagatggaaagggctgcttctaacagatgtggtttgttgctttagttgttgaagcaaaaatactgagttgttatgtttatgttatcaccccaccactacctccatggttgttcatttaggatgcttctaattcagccactgtgaaccattataaaggttttattgccatgttgaaaatgtttataatatggcaaaaaggggcatcaaatagaagatttactattattccagccatgtaaaaatatgtgcacatatggatgtatgttgaaagtggatgatggagaaataaaatgtggttttctttggggactggaaaaaaaaaaaaaaa

SEQ ID NO: 945 - DNA, 1627 bp, HOMO SAPIENS
gcccccaccatcaaggggaagaaagtgctcttcggattccggttcgccctggcctcccgcagccgccgcgggaccggcccccagcacacccccggggcgccgggcgcggggcagccgcccggacgcgcgcgggcctcaggcgccgccgggaccccagccccccaaactttggcaagttgcgggcgccgagcgcacccggaggcgcggggcgcggccgcaggcggagccgccccctgacgccgggccgccccctcccggccccggccgccccgccggctccgcggaaagtttgcggccgcccctgcgccgcacccggggcctgggtgagactgcggcggcggcagggcgcggacggccatatttgccggcgcggcccgagccgccgacaacaaaaagtgcgcgggcgctcggcgggcgctcggacgggcgcggggctgcagcgctaccgcccggcctcgccgccgccgccgccgccctcgcggcctggccccgccgcgcccggcgcgcccgccgcccggggggatgtcttacaaaccgaacttggccgcgcacatgcccgccgccgccctcaacgccgctgggagtgtccactcgccttccaccagcatggcaacgtcttcacagtaccgccagctgctcagtgactacgggccaccgtccctaggctacacccagggaactgggaacagccaggtgccccaaagcaaatacgcggagctgctggccatcattgaagagctggggaaggagatcagacccacgtacgcagggagcaagagtgccatggagaggctgaagcgcggcatcattcacgctagaggactggttcgggagtgcttggcagaaacggaacggaatgccagatcctagctgccttgttggttttgaaggatttccatctttttacaagatgagaagttacagttcatctcccctgttcagatgaaacccttgttttcaaaatggttacagtttcgtttttcctcccatggttcacttggctctgaacctacagtctcaaagattgagaaaagattttgcagttaattaggatttgcattttaagtagttaggaactgcccaggttttttttgttttttaagcattgatttaaaagatgcacggaaagttatcttacagcaaactgtagtttgcctccaagacaccattgtctccctttaatcttctcttttgtatacatttgttacccatggtgttctttgttccttttcataagctaataccactgtagggattttgttttgaacgcatattgacagcacgctttacttagtagccggttcccatttgccatacaatgtaggttctgcttaatgtaacttcttttttgcttaagcatttgcatgactattagtgcttcaaagtcaatttttaaaaatgcacaagttataaatacagaagaaagagcaacccaccaaacctaacaaggacccccgaacactttcatactaagactgtaagtagatctcagttctgcgtttattgtaagttgataaaaacatctggaagaaaatgactaaaactgtttgcatctttgtatgtatttattacttgatgtaataaagcttattttcattaacaatttgtattaaaaaaaaaaaaaaaa

SEQ ID NO: 946 - DNA, 2222 bp, HOMO SAPIENS
gggggcgaggttgctgcagtgcattcggtggtagtttggtgtcagtcctgtgtcttgtcggtccttctaaacgtgtccccttacgatgctggctcgcaaccacctggaagttgactaaggggagaaggagtctcgttggaaaacggaggcacaattctgtcttctcttgaactgcataactgagaactctgcaaattccccaaagaaggaggaaaaatgaccatgttcaaggaggcagtgaccttcaaggatgtggctgtggtcttcaccgaggaggagctggggctgctggacgtttcccagaggaagctgtatcgagatgtcatgctggagaacttcagaaacctgctatcagtggggcatcaactttcccaccgagatacttttcacttccaaagagaagaaaagttttggatcatggagacagcaacccaaagagaagggaattcaggaggcaagatccaaactgagttggagtctgttccagaaacaggaccacatgaagagtggtcttgccagcaaatctgggaacaaactgcaagtgagttaactagacctcaagactccataagtagctctcagttctccacacaaggtgatgtcccctcccaggttgacgcaggactatctataattcacataggagagacaccttctgagcatgggaagtgtaaaaaattcttcagtgatgtctccatccttgatcttcatcaacaattacactcaggaaagatatcccatacatgtaatgagtacaggaagagattctgttatagctcagctctttgtcttcatcagaaagttcacatgggagagaaacgctataagtgtgatgtgtgtagtaaggcatttagtcagaactcacaactgcaaactcatcagagaatccacactggagagaaaccattcaaatgtgagcagtgtgggaaaagtttcagccgtagatcaggaatgtatgttcattgcaaattacacacaggagaaaaacctcatatttgtgaggaatgtgggaaggccttcattcacaattcccagcttcgggaacatcaaagaatccatactggggagaagccattcaaatgttatatatgtggtaagagcttccatagtagatcaaatcttaataggcattccatggtccacatgcaagagaaatcatttagatgtgatacctgtagtaatagctttggtcagagatcagcacttaatagtcattgcatggaccacacaaaagagaaactatacaaatgtgaagaatgtggaaggagcttcacttgtaggcaagatctttgtaagcatcagatggaccatacaggagacaaaccatataattgtaatgtatgtgggaagggcttcaggtggtcctcatgtctttcaagacatcagcgggtccacaatggagaaacaacattcaagtgcgacggatgtgggaagagattttatatgaattcacagggccattcacatcagagagcctatagagaagaagaactgtataaatgtcagaagtgtgggaagggctacattagtaagtttaatcttgacttgcaccagagggtccacacgggagagagaccttataattgtaaggaatgtggaaagagcttcaggtgggcctcaggtattttgagacataagagactccatactggagaaaaaccattcaaatgtgaagagtgtgggaagaggtttactgagaattcaaaacttcgtttccatcaaagaattcacactggagaaaagccttacaaatgtgaggagtgtggaaagggattcagatgggcctcaactcatctaacccatcaaagactccacagcagagaaaaactattccaatgtgaggattgtgggaagagcagtgagcacagttcatgccttcaagaccaacaaagcgaccacagtggagaaaaaacatccaaatgtgaggactgtgggaagcgctacgagaggcgcttgaatctagatatgattttatcattatttttaaatgatatataattattgtccatatttatgggttacagcatatttcaatacatgtatacaatgtataatgatcaaatcagtgttattagcatatccatcacctcctttatcatttatttgtggatcatttatcatttctttgtgctttgaacgttcaaaaactgctgttctagttatttgaaaataagttattattaattatagtcacctttagtgctgtggcaaaaaaaaaaaaa

SEQ ID NO: 947 - DNA, 2100 bp, HOMO SAPIENS
gtggtgcggggtggggcctgggcgagtcacgtggggacggtgcgcgctcagtgcggctgcgccggccggtagctgcagctggagcagtggcgtttggaggagactcggatataccttctcagaagctgcacaggaggaaagcagtgacaaagaaagaagttgtcattctttgcacgaaactggatggcttctacagggagccaggcctctgatatagacgagatttttggattcttcaacgatggcgaacctcccaccaaaaagcccaggaagctgcttccaagcttaaaaactaagaagcctcgagaacttgtgctagtgattggaacaggcattagtgctgcagttgcgccccaagttccagccctcaaatcctggaaggggttaattcaggccttactggatgctgccattgattttgatcttttagaagatgaggagagcaaaaagtttcagaaatgtctccatgaagacaagaacctggtccatgttgcccatgaccttatccagaaactctctcctcgtaccagtaatgttcgatccacatttttcaaggactgtttatatgaagtatttgatgacttggagtcaaagatggaagattctggaaaacagctacttcagtcagttctccacctgatggaaaatggagccctcgtattaactacaaattttgataatctcttggaactgtatgcagcagatcaggggaaacagcttgaatcccttgaccttactgatgagaaaaaggtcctcgagtgggctcaggagaagcgtaagctgagcgtgttgcatattcacggagtctacaccaaccctagtggcattgtccttcatccggctggatatcagaacgtgctcaggaacactgaagtcatgagagaaattcagaaactctacgaaaacaagtcatttcttttcctgggctgtggctggactgtggatgacaccactttccaggcccttttcttggaggctgtcaagcataaatctgacctagaacatttcatgctggttcggagaggagacgtagatgagttcaaaaagcttcgagaaaacatgctggacaaggggattaaagtcatctcctatggagatgactatgccgatcttccagaatatttcaagcgactgacatgtgagatctccacaaggggtacatcagcagggatggtgagagaaggtcagctaaatggctcatctgcagcacacagtgaaataagaggctgtagtacatgagcgagctagagaaatcaccaccgtttagaccaagctgtaaggccctactacagacagtgtttaacaagtaaacttacaagaacccaacacaattcccagaaagtaacaatagccagaggttgaagggcggggtagaagaggggggaatgttgcagcgtaatccttcataccacctggttcttgatattctgccgcctgttcaagttcaagaataaaagcgacagcaggacccaaatgcagctcccaacccactccccaggctagacatgcttgtgtccacacagcacaccaatgtgatacttccactgaccggctgcagctctgcatgaaggactcggggtctggatgccatggaatcactgtggctcttgttgcagttttgtactctatacttggtttttcaattaagcttaatggcttttttaaaacatgacttgaagctctagttttctagatcttttacagtgtacagtattttacataactaagctgtattaaaagcttgttcatttacttgccaggaccctggctctacttttagagtcattgtaagaaactctaacttgcatcaaggtactaataagcttaattttaataacccaaagtttaaaggttccgatctttctccttggggtggagtgatctcattctcaggacaaccgtttacttacctgattcctcggagcattatcaacttctgctctgttgtcctgaccatacatatgtcctagaactacagttaagtgtgttgtggaattttagttttgaatcctgtataaaagaactccaagacctaaaaggcaatttatttatgaaatttattttcttatataaattacttatttctctggaaaaaaaaaa

SEQ ID NO: 948 - DNA, 420 bp, HOMO SAPIENS
  misc_feature (97)..(97): n is a, c, g, or t
  misc_feature (277)..(277): n is a, c, g, or t
  misc_feature (318)..(318): n is a, c, g, or t
  misc_feature (323)..(323): n is a, c, g, or t
  misc_feature (339)..(339): n is a, c, g, or t
gaggctatcacttccaagtatcctgcacccctgggctcaagacctcactggggagggagtcttttgggccacccaccaaacagcactggcattatgnctctcaccctagaccatggttacacgtggtaaaacaaccccttctggtgatacattcacaactctctagtttcccccaaatggcactatggggagcgggagcttgccttttcctcagacttaaaacaataagttttccccgtgtttcccctctaatgctgttttcttttgaccaagcatntctgaattctagagaagtcaggaggaacacacccattctcnggttngaagggactgatgttntgaagtacaactgggcacagtcccaggctcttcaggacgcttcctccattcacacagcggggatgtgattgttactgcggg

SEQ ID NO: 949 - DNA, 459 bp, HOMO SAPIENS
  misc_feature (181)..(181): n is a, c, g, or t
  misc_feature (287)..(287): n is a, c, g, or t
  misc_feature (316)..(319): n is a, c, g, or t
  misc_feature (324)..(325): n is a, c, g, or t
  misc_feature (328)..(330): n is a, c, g, or t
  misc_feature (362)..(362): n is a, c, g, or t
  misc_feature (375)..(375): n is a, c, g, or t
  misc_feature (381)..(381): n is a, c, g, or t
  misc_feature (386)..(386): n is a, c, g, or t
  misc_feature (397)..(397): n is a, c, g, or t
  misc_feature (403)..(403): n is a, c, g, or t
  misc_feature (408)..(408): n is a, c, g, or t
  misc_feature (411)..(411): n is a, c, g, or t
  misc_feature (418)..(418): n is a, c, g, or t
  misc_feature (420)..(420): n is a, c, g, or t
  misc_feature (430)..(430): n is a, c, g, or t
tattcatgaattcttgcacattatgaagaaagagtccatgtggtcagtgtcttacccggtgtagggtaaatgcacctgatagcaataacttaagcacacctttataatgaccctatatggcagatgctcctgaatgtgtgtttcgagctagaaaatccgggagtggccaatcggagattcngtttcttatctataatagacatctgagcccctggcccatcccatgaaacccaggctgtagagaggattgaggccttaagttttgggttaaatgacagttgccaggngtcgctcattagggaaaggggttaagtgnnnntgctnnatnnnctgcatgatgtttgcaggcagttgtggttttnctgcccagcctgncaccancgggnccatgcggatntgttgntccanccnaacaccncnggaccatttntgtatgtaagacaattctatccagcccgc

SEQ ID NO: 950 - DNA, 490 bp, HOMO SAPIENS
  misc_feature (94)..(95): n is a, c, g, or t
  misc_feature (259)..(259): n is a, c, g, or t
  misc_feature (423)..(423): n is a, c, g, or t
  misc_feature (455)..(455): n is a, c, g, or t
cttcgggcctagggttttgagatgaatgtgcagtgtgtgtggccgctctgtgtgtcccgcttccaccagcttggcattaagcacccggagcatnncctgctgggcaggcctggccaggggtgagcccctccattcgggggctcagggtcaaggcagattccttgcttggctttcctgctgatttcctcatgaagatgccaattcgtatttaaacatttgttatcaatggtggtgtttgtgtgctgatttctataggtanaggctgttgttttaggagccaggtttgctgggccagctcagacctcttacaaagtgaagatactaatgatcgtcttgcaaggtgccatagtgtcgtgagggtgaactgaggcagtggctatgcatggtgtctgcagcagcgtttctgaggctccaagaatatcngttcctttttcagaaatggggccagattcttnggatgtagacagtgttctcttcacggatgctaaca

SEQ ID NO: 951 - DNA, 6971 bp, HOMO SAPIENS
cccgcctcctcgcttcctcggctccagcctccgccggcggagcccactatgccagacagtttcgacactttgcaaagacaaagagccctagaccggagggaggaggaggaggaagaagagcggagagagaaggaagaggcgatgtgagctgggaagggggcaagtgtccgggacacccacacccctgtattctcctccgaaccccttcatgcccaaatcccggaaactccagcgtgtctccagccgtgttggtaccattttcagatttcatcttcctaaactggaaatgtcaatgagaggaaattaacacccccaagagctgcagtgagcaaatgcattgagcttgggtcaggacaattccatttggggaccagagatggacggtcactcagcctatggagatgaagaaactgaggttcagagaggttaagagactccactgaggtcacacagccgatgacagacaaccttctgtgccttcatcaagctggttgtgtacccaccatgtccctggcgacaggatgggaaagaaaaagccctaattaaggatcgtcagaaaccacagttggaggaggacggcagagacagtttccctccccgctataccaacacccttccttcgaggtcctcgctcctgagggaccctggactgtcacagagattaatgaccccttatcttctttggatgtgaaaggaaatcactggttaaagcttgatcgagagacattatcagctctttaaggattgcagaagaataggctactttattttctgaaaaggtaaatatatgcaagcaaagccaacatgccacgaatggcgttggtctaccacacagccgtgtctgggacacagttgggggtcatcccccagcaggagtgaagtcgagcttagcggcccttgtgtcctcccttggaattcctgccatcccttttgattgagcctccacctctgggatttttcttccatttttctcctctcttaggagggagttcctgctacccatcgtgggaggccaccatcaggactgcgaagatggtgaccctgcggaagaggaccctgaaagtgctcaccttcctcgtgctcttcatcttcctcacctccttcttcctgaactactcccacaccatggtggccaccacctggttccccaagcagatggtcctggagctctccgagaacctgaagagactgatcaagcacaggccttgcacctgcacccactgcatcgggcagcgcaagctctcggcctggttcgatgagaggttcaaccagaccatgcagccgctgctgaccgcccagaacgcgctcttggaggacgacacctaccgatggtggctgaggctccagcgggagaagaagcccaataacttgaatgacaccatcaaggagctgttcagagtggtgcctgggaatgtggaccctatgctggagaagaggtcggtgggctgccggcgctgcgccgttgtgggcaactcgggcaacctgagggagtcttcttatgggcctgagatagacagtcacgactttgtcctcaggatgaacaaggcgcccacggcagggtttgaagctgatgttgggaccaagaccacccaccatctggtgtaccctgagagcttccgggagctgggagataatgtcagcatgatcctggtgcccttcaagaccatcgacttggagtgggtggtgagcgccatcaccacgggcaccatttcccacacctacatcccggttcctgcaaagatcagagtgaaacaggataagatcctgatctaccacccagccttcatcaagtatgtctttgacaactggctgcaagggcacgggcgatacccatctaccggcatcctctcggtcatcttctcaatgcatgtctgcgatgaggtggacttgtacggcttcggggcagacagcaaagggaactggcaccactactgggagaacaacccatccgcgggggcttttcgcaagacgggggtgcacgatgcagactttgagtctaacgtgacggccaccttggcctccatcaataaaatccggatcttcaaggggagatgacgcagtgaagggctgaggatggacgcactgtcacacctctgcatttccagccccagcatcttgctggagccgttccatcccggagcttggaggggcagcctcaggtgtgtgcctgggcaccgctcacagcctcttgcacccagccgttggcagcatctactcagcaaggtcactaagctctgccagcgtggcagagcatgtcttggaacctgtcttgagtggggacaacgtccccccactgctgccctagagctggggagacgctgggaaaggttcaacctccacacactaaaatcattttggctcctggggcaagcttggggaatgaatgtggaagatgcctatattctgagagacaggacagtttcccaggaagatgggcagagacttgagtggcgattacctccagcacagagacgtgccaggcggtgttggcgctcggggcgagatgctgcccttctttgcacgaagcctggcctcttgcttggcgtgataaccctgtcatcttcccaaagctcatttatgagccaccagaggctcctaccccaaagattttcacagaaacttgaggccaggtgccgtggctcacacctgtaatctgaacactttgggaggccgaggcgggaggatcacttgagcccaggagttcaagaccagcctgggcaacatagtgagactcctgtctctacaaaaataaaagatttaaaaaaattagccaggcacggtggcacacacttgtagccccagctactagggaggctgaggagggaggatctcttgtgcctaggagttcgaggctgcagtgggctgtgatcacaccactgcactccagcctgggcaacagagtgagaccctgtctctgaaaaaaaaaaaaaaagaaaagaaaaaaaaccccaaacttggcaccgtgtttctgactcctgcagatgcctcttcccaagcagttgttcctttgagtagtcagtctcatggttctaatcgtggcgagagcggatctgaccacttccatgtgcctttgtatttgggaaagaaaagcatgcattggctgaaatgaaacaaaagcccttacttgggaaaagggacccccaccagcggccctgcttgctccgtagctgggaacatcttttctggtttcctgagccagcacctgaattgcaacgaagctctgaggatactcaacaccacccagcagtgcgtcagaatggaacgtacattctcattctcagactgttcaatatggtgcccgtaacctccaaagccacacaggaggctgccagcagcattttccccaagggcctgagctcagggtcaagtccctgctggccatcttggggctgtcactgggggtctgggtcaaggacatcccaggaatggtaactgccacatacctcatcttcttactccccagctactctcttttcctcattagccttcctgattatttattgatttcttttttttattcaactgacattgtttgcaccctggctctgttggtggtcctggtgttttaatgaagcttgcctcacccagtagctgggaaattaggtgggggtgcttaagggaggtttgtaggagtcctcggacgtgggatattgggggtatctagggcttggatggtttgtggaatgtcctcagcatcctcccgtcccaacccaaccttccttcttcctcattgtggacttggatttattctcaggctaggagtctccaaaactccgtgaaaccttattgctgctgggtgtggagtggagagtgacaggaatgtgggggacggtgattgttggctccagttactaatgtttaagcagaaaaaccactttcttgttgaaaatatccctgaaaaggtcgctgctgctttgaggaggcgtgactttttcctggtggagtgtgacggaggcatggggcctgtgctcccaggctcgggggagccccctctgcacacggggagggaggaacttggggacatcagtcatgggtcacaggtggcttcaggccattcacaagagtccccggaagttgcgtgccaagtttggttttttccctgaatctctgcatatgagcatttttctggagaaaggaccatagcttttattagattctcaaaggttcagaatggggaatgtgttaaacaaaccgaaaacctgtttcagctttaaaatcctccaaaactttaaagacttttcttttttctgagaaaggctggtaaatcactgagtcatcattcagaacatacagcctcgaagggcagagctcacacccatatatgacgttaagagctcaacaaatgtttgttgagtgactgagtgaccccaggggcagactccagatcatcagacactgatacagagagcgatgctatctcctcaactctccctcttctcctaaaagctgagtctatatagggatgacaggctcaggctgagcagtcgacttctctgggttttgctgtgtaagaataggtccctcaacatgaagatgtgtctgcgtctgagccagatgctgcctgggtcggttgcctggcctccgtctggtctccctccctcctactagggtggtcaagctgtgagatctcttccagcctccaaatccagctttcccattttactgatgagaaaatcaaggccacattgcagctgggtggggagtggagcgtgacaggcacgggagaggacagcgattgttgactctagttcctgatgtttaatcagaaaaaccacttttcctgtagagcacatttcctaaaaggctgctgctgtgtagggaggtgtggccttttcctggtgcagtgtgaaggagggaagtgacgggcagtcgtgaactgtctgggacagatagcacaagtcagagtttgagcaaaactagggtgttaccggcgctatgttgaaattgtctggaggcgggctttcccagcgagtctccattcagcatctggaaaaagtgtaaccagaatggaggtgtctgactctcctgtgctctctcagcgccgagctctagctgcaggctgcctgggtggccttctcacaccctcccgtgcaggagactgcatttctctttcccacagcccagcagatagctcattggcttagcaatgggcacttaacagaatccagttgttgcagccagaattaaatgcaccagtctggcttaaaccaactggaactcatccctggggtgaaggtggctgggaattagacaagagtgtgtgttagccaaaaggcacatgcatgctgtcagcaggagaatgaggagcactggttctgggcaggcagtggcaggggctccctcaggcccctgattcccagcccacagctctttctactctgcagacagagttccttggagactggccctgcattcaggcagggagcagaggggtccctgcctgcagcacccagagctgaacctgaagctacaaagatgggctgatgaggtggcccatgaggtgtcagcaacatcccaaccccctgggtctccccagtgagtcagggcactgatttgctatagctggagctacatgcacctctcctcccctcagccaccttttaggggagaaaggagggcagatttgtaacctctggttctctgcagggatcctgggctggaagaaagttcataaatggatgaatgccttttaaaactccagcttttccaagcatcattcaccaaagcatttggttaggcttagagagaaaagctggatatgagaaaatagaatgtaaaataggagggaaaaaaaaaaagaaggtggagagggcagttaagatctgggtgattctttagggaaacggctggttgagaggctttgatggaatcccattctctgctgtggccagaaggtggtgctagaggccagtcccacttggatgtgaccctggcctctgccaggattcaaaccacaaagaacatttggaactgggatgtttgctttgaagcagcccgaaaacaagtgaaaggaaaccaagataactctctctccctccgctggcaaggatcaaaaataccttgtgcagggaagcccgagcctcgaggggccactgcccagctaaagatgactggacaccagccatgcaccatcaggaaccagcacctgtcctcacccctgagaagagccccgggggtatcattatatccatcgcagacatctggtttgcagcaaatgtggctacacgccatcaggattatcctgccctgtggactgggctagctagttttgagatagagtcaacctccccatttttgtttgtcatgaaaacaccagctcctgcacccctggggtgctacctgacacctgtgcaaagaaaaggaggaaaacttagaagaaaaggcagagacaggcaagacagcatctcacagcttgtcaggatcagggcattaccgactattttttcttaccaaaagagcactgaatttcctaggggaaggtgagccacctttacacctcctgtcctccctcccagcccgtcaagcgatcccatcacccagcctcatcactcagcttcttcctagtacaaaactgccatcggttgtacgtcctgagctgtgggacgtcagctttaaccctagcctgtctcagggcctcgccctccagccccccgccccttagggtgatcgtgggtttcttcccttcctcctgcacaatcgcttcccttcactgaattcccttcaaagccaaagtttcttgagcactttttcttgtgtgcagtcttgtgtgtttgggtgttggtgtttttaaatttgctttctattcccccctgcctctctccatgtcgttacgcagctgagcactggttgggatgcattcgaatgacttcagcaagatcctgctttcctcagcccccgctctgttttatttattgtttaatatttccaatgatccaaatcaaagtgaataaacaaagagctattttattgtt

SEQ ID NO: 952 - DNA, 3060 bp, HOMO SAPIENS
gctggcccggtttcctggcgacgcggccctgcaggcggttgcgttccccgtcgttaccctctttctcttcccgacgcgtgagttaggccgtaatgccttggctgctctcagcccccaagctggttcccgctgtagcaaacgtccgcggcctctcaggatgtatgttgtgttcacagcgaaggtactcccttcagcctgtcccagaaaggaggattccaaaccgatacttaggccagcccagcccctttacacacccacacctcctcagaccaggggaggtaactccaggactatctcaggtggaatatgcacttcgcagacacaaactaatgtctctgatccagaaggaagctcaagggcagagtgggacagaccagacagtggttgtgctctccaaccctacatactacatgagcaacgatattccctatactttccaccaagacaacaatttcctgtacctatgtggattccaagagcctgatagcattcttgtccttcagagcctccctggcaaacaattaccatcacacaaagccatactttttgtgcctcggcgagatcccagtcgagaactttgggatggtccgcgatctggcactgatggagcaatagctctaactggagtagacgaagcctatacgctagaagaatttcaacatcttctaccaaaaatgaaagctgagacgaacatggtttggtatgactggatgaggccctcacatgcacagcttcactctgactatatgcagcccctgactgaggccaaagccaagagcaagaacaaggttcggggtgttcagcagctgatacagcgcctccggctgatcaagtctcctgcagaaattgaacgaatgcagattgctgggaagctgacatcacaggctttcatagaaaccatgttcaccagtaaagcccctgtggaagaagcctttctttatgctaagtttgaatttgaatgccgggctcgtggcgcagacattttagcctatccacctgtggtggctggtggtaatcggtcaaacactttgcactatgtgaaaaataatcaactcatcaaggatggggaaatggtgcttctggatggaggttgtgagtcttcctgctatgtgagtgacatcacacgtacgtggccagtcaatggcaggttcaccgcacctcaggcagaactctatgaagccgttctagagatccaaagagattgtttggccctctgcttccctgggacaagcttggagaacatctacagcatgatgctgaccctgataggacagaagcttaaagacttggggatcatgaagaacattaaggaaaataatgccttcaaggctgctcgaaaatactgtcctcatcatgttggccactacctcgggatggatgtccatgacactccagacatgccccgttccctccctctgcagcctgggatggtaatcacaattgagcccggcatttatattccagaggatgacaaagatgccccagagaagtttcggggtcttggtgtacgaattgaggatgatgtagtggtgactcaggactcacctctcatcctttctgcagactgtcccaaagagatgaatgacattgaacagatatgcagccaggcttcttgaccttcactgcggcccacatgcacctcaggttcaaaatgggtgtcttctggcagccctgcacgtgtgctttctgagtgtctctgtgtgtgcattaatatatgcattccatttgggagcatagcagctgtgtgaatgtatgtaattgtgtgtggggggttttttgttttaagtagttagaagtctgggaaaatgaatttttgaatagtatgttactgcagctttggtaacattaattctatagaattaatgatcagagcaagtttaatttttaaacataaaggtcttggttacacatgtccatgcattccagttaacacatttaaacatatagaaaattcacttcttctttcaagtccttccctttctatacttttgctgagatcaacccaatatcataagaagtttgtgtgatgcctgtatttttagctaattaccaaggtctctgcctatgcaaaaattcatctttcggtgattgtgggcggccaatacataccttctgtaactcctccctacctattctagatcctgcatatctactggagccatatgagccctcaggggcactggtgtcctgcagtcttactagtcagccacagtccaggttccagcaacactagctacctaccaaacaaaacacttctgagcttttcttgccatttggttgcctgggacctggaaagtgtttagattcttgataaagatggaaatggaagagaaagaaaattatatatgtatatactaaagatccagacatcagggctgggcacagcggttccgcctgtaatcccagcactttgggaggtccaggcaggtggatctcttgagaccaggaggtcaagaccagcctggccaacgtggtgaaacactgtctctactaaaaatacaaaaatgagctgggtgtgatgatacatgcctgtaatcctggctacttgggaggctgaggcatgagaattgcttgaacctgggaggtggaggttgcagtgagctgagctcatgcgactgcactccagcctgggtgactgagcaagactctgcctcaaaaaaacaaataaataaataaaatcctgacatcctgccatcttttctcttcaatttaaagttgatttcttaatgatgacttcaaaaattaataaaaagaaaagaaaaaaatgatttctggccgggcgtggtggctcaagcctgtaatcccagcactttgggaggccgaggtgggcggatcacgaggtcaggagattgagacctcctggctaacacggtgaaaccccgtctttactaaaaatacaaaaaaaattagctgggcgtggtggcggatgcctgtagtcccagctactcaggaggctgaggcaggagaatggcgtgaacccagaaggcagagcttgcagtgagccaagatcgcgccactgcactccagcctgggtgacagagcgagactccgtctcaaaaa

SEQ ID NO: 953 - DNA, 6320 bp, HOMO SAPIENS
aaacgcgccgcggggctgttagctcggctgggcacgggcggctccgtggcgcttcctgccacgccaggcctgcctgggccgcgccagcgccgctccaccgagggccgcgcgtcggccgccgccgggcctggatggggccttacctgccaggctgatcccttggagtagttctgaggcatgatgagtcatccgtgtgtgtctcttttgggcgttcctgttttaaatcctgccttggtccctcacctggcacaaggacaagtgctactggtgtcagacccatcgcccaacactgatcctgctaagtactctgaaagcacctccgcgacccgacaccagatgaagggggaagatgcccagccacaggagatggcgtccacaagcttcccaagggccagtggtcccagtcctgaattcagacagcacggggactctgacgggaagagagggagcccacagaatctgcccatagaacatcattttgcttgtaaagagtgtggggacacctttcggcttaaagtcctgcttgtccagcaccagagagtccacagtgaggagaagggctgggaatgtggcgactgcgggaaggtctttaggggggtggcggagtttaatgagcacaggaaaagccacgtagctgcggagccccagcccggccccagtagggccctggagaatgccgcggagaagagggagcagatggagagggaggcaaagcccttcgagtgcgaggagtgcggaaaacggtttaagaagaatgcaggcctgagtcagcatctgagggtccacagcagagagaagccctttgattgcgaggaatgcgggcggtcgttcaaagtcaacacccacctcttccgacatcagaaacttcacacttcggaaaagcctttcgcctgcaaggcgtgcagcagggatttcctggatcgccaggagcttctcaagcaccagcgcatgcacactggccacctgcccttcgactgcgacgactgcggcaagtccttccgaggggtcaacgggctggccgagcaccagcgcatccacagtggggccaagccatacgggtgtccccactgcggcaagctcttccgaaggagctcggagctcaccaagcaccggcggatccacacgggcgagaagccctacgcctgcggccttccgtgggccctctgacctcatcaagcaccggcgcatccacagcggactgaaaccctatgagtgcgacaaatgcggcaaggccttccgccggagctccggcctcagtcgccaccggcggatccacagtggggcgcggcgctgcgaatgcagccagtgtggccgcgtgttcaagaggcgctcggcactgcagaagcatcagccaacccaccacgagtagaaacgccctgtggtcccgcgggacagggacggagtccccagaggggatggcagagtcaaaggagatgaacagttttgtagcgcttatatattttgtcttccaaaaggttgagaccgatttatactgccaccagcaatttataagtgttacgttatgcccatcaagagtagcttgtaccatttaacttagtttggctagtttaactggtaggaagtaccatcaaggtatttcagtccacatgccttgaatccaagaatgagagaggacaaatctggatgtggggtagggaggggcttagaggtcatcaactccaagctccccccgccccagagaaacacacagagctgttccacgatggcgtcctcataatgtgatcccagctttcctgaagagaacgttgccctcatgatttttggcctacttgaatttataaatttttagggatgtaaatagaacactcaaatgtcttaaaatatttaatttattaatttagttatacatacatactgtaaatcacatattatataaaataatatattaatttagaaaataccccatttttgccaccctccctttcacgaaatcattttactctgactcctcaccgtcttcaccaacatgggaaccctgtttgagtcatcagacagtttcaagacacacccagtcacttccatccgagctctgcacggtcgctcagtgacgatcccttcatgaggctctcattagaaattttctcccaagccataagaccatatttgcagaacattaggacgatttctcttgtcgttttttaatctgtcctgtgactgtacaatataaccacttaaggtcatactttttcaaacaacctttaaacgtcttttcttttaaagcacccaaaatgtcattgtgaggccaaacgcctagtaacagttactgaatctgggttaaatgtcggtatctttttttcttaaaccatttcaatttggtgtcccctatacatatccaaaactagcatcgattggggttgttttgaactaatgggtcttgtcctcaagcagcactattttgttcaaaataaaatagttgagagcatgcccctaagaagagatacatctcaaggactcaagtgcagggtgacgcctccttttggaaatgagcctctcctggtatcaggcctagatggtacttctccagccttccgtttcttgttctataaaacaggggtgatcacagcacctacctccgaaggttatcacgaggactgccatcgtggctgcagagtgccaggaccaccggcctggtatggaggtacacactcagtgaaggccatctgctgtcattgtcattgtcatagttattgccgtcattctgtggcttgtcaattccagaactggggatagaccccaggcctcctgaccaccagtctcatctttctcttatgcgatgacttaaatggtgtttctgttttttgcatgcaaatggtccgttcatctcctttgactagttatcaacttaccttcggatatattaactttatgtagcagttctttctatattgatggtgatgttctcttttccaattttattgctttgctttttgtagcagttttattacgtttttgttgtgaaagcttttaatttttacatatccaagcattcattttttgtccactcagtcataactttcattgcttctgtagctagatatgatgacattttctctagaattttaattacaaacaaaaagctgcaaccccagcccatcagaaggtgagtacaccaggtgggcaggctggatggaaatgggccagagaagcaggctctttcctcatccgagatgcggactccctgtctatctgtgggcaccacttgactatccaacctgaccactgcggcacactggagatgctcccatcatagattagccagaactctgtgactgctcatcattatagaccccgccagcagcagtggggcttggcctcacctagatcaatggagtggtccaaacttggtctgggagcaagcagcccagccatcctttgagctcctgggagccttggcaatgctccgagtggattcagtgactgagcagcagattcacccaagaaacatctccttggacacaagaagacttgcctagaccacatcctcctttcagccggtgactctagaactagaaagagattggttcataggcttctgctgtgggcagctaggggaaaattcacccatgtgttctggcatcacttcctatagccacacctaagtgagggcaacagagcagaggctcggagaggaaccctgcccctccgatggcttgtgcgttatgctgatagaagctggcagcactgccctgggctatgatttgcaacagccatgcccaggaggagcactaaagcaaaggtttggagggcagtggaacccttctgaaagcctgtgtggcatagaagtagaagctggtcctcctgggtctgagctaccatttccagtgggctcccccaagaggaacagcagcaagggctagcgaggaacctgcccctccagtggcccacagaagccacagatagaagccagccccaccagggctgtgctgtgacttcccagcagctgtggctggggacagggacactaggagggcctggcaaggaagtgtgcccttctcgtgggcccaccaaggctgaggcagagcttcctagcagacacaacttggaagggcttctcaggcacccatcctgacccccaggctggagaggagccaaaagcacttgttacatagtgattccttttgccctgtgggcctcagttcttgcagtagttgtgaatctgtgtctgaaatcactactttcttctcggatcctttttctcttttcgagttgttaggatgtgttttgtacagctgtcatttgataaagaaggttgacctctaccaggggcaagtctggcacctttacctagaagtactctgccatgtcttgcccgttcatttatcgtttgttgggtttcatgagggatcccattgaagtagatcccttttatgaagggatcccattgaatgcagcattaactcagaacgtagcataaagtcgtcactgctcccagctgggacgtggtgtcttggcatcccttcctgccgtccttgactctttcccatcttcagttctataattttctcccaaacaaatgctcttttagagttaacactaaagatctggtctttgccgtcaaggttgacagaacagctgttcatggtgtttgcggtgaaacccgtgttctctttcaatgcagtctgtggctttaacgtgtgtcctgtaatttcgccaagatcatttcttgcctctggtaacttgggggtggatttccttgggctctctaggtgtactgctatgtcagatgcaaaatgtcacccagcttcctgtcacatatccttgtctgtgcattcatgcatctacctcattccggttttctttctaatctcatgtattcctgttgtgaggaaatgtgttcttttcccgatccttttgtagttcatacacatgacaattgggtttccacgcacgtgcatgagatgttcctccttcaaaccttgttactatgtcagcacattaactgcctggcatggaaaaagaaaaaaaaaaaagaaatatgttcttttcctaccatttgaaaaaaatcctccattgcttttattagagttttgaatacttgtgaaaattttcaaaagaaagtaattgattaccatttttgctgcttattacgatgagctgtgtccattagctgtgtcaccccactcttgcatttccagaatagtccctacccaattgcagcgggcatgtttttgagtggtgttgcattccatgtgcttgattttgtcctagaactggcacagcgcctgccctacctgcagccctgggttgtggccctgttgcgtaccatgtgatttgccaccccgcttctaggccatattaattcagccagaactgaacacctgacccaagggcagcaagcaatcatcagagcatagagctgacagaacatgatggaccacggacaccaccaggccttccagatctgaaatgcaaacaaggaaacagaagcttctaggcatcagaaggtgtggggagcagcacagtactcagaggagtgaggagcgtggcgcctgctgggaggaaggcctggccatggtatgttcttggatttctggcagcagccctcattggtccacgtgcgtccccactacagactccttgacttgagccagcttgagtgggtctctactcttttctattgtgttttgccacttggctgcttcctggccaagtcgcacctgactgcatgaacacctgttcaaacgtgtgttctctgttctctaagatgggtgaaagtcgatgccttctagtctcagtgaatttaacctgtgattttatgtctacgtatattgttcctttactgaacccaccacatgcgggccataaaatgagtgaaatcacagtgcaccctgttctcttatttttgaagtgtttcacgatttccagcatgtccatcagatggggggattgctaacttctctcttactcatgtacttacattctgtagttctcattgcatcactttggatgtttactttgaaaagcagaaactgtctctttaaacttggccctcaatgtcatttgcgtatctctgagaacaatagctatgtcccaccccagtttgtatttccgttggttgttggcacttttttctcattcccccatctcattaccttgtctgttttctggcactcactataatcagccttgcactagagctgtttgtggacttggcttcaccccctcctcctcagccctcccccacccattaaattgtgagctcttagaagacaggggtggcctttcatgtctgatcccctaccaaatctagcacagtgccttgcatcaagtagatttcaataaatatatgttaaatggca

SEQ ID NO: 954 - DNA, 2866 bp, HOMO SAPIENS
tccattccaaataaaatctataacaaattaggtatagaaagaatatacctcaaaataaagagatatgttctttataagctataggacaatcccatggttaacattattgtcaatggtgaaattttggaattgtttttaagatttattataagaaaaagatgcccactctcactacttctttcaacaccgtattggaaatcctgctcagaatctaagacaagagaaaaaagagcatttaaataagaaacaacaagttcttctattcatggagattaacgctcaggtttttgcagattagatttaacagcatgaaatctgtaccatccaggaatcaaaggatataggactttagggcatcaattattaagaggctataggaaagcagaaatgctcctggatgtttccattgtccacacacaaaatttcaacagaccagccccaggaagtaaaggcacattcctgactactgttagttgatgagcttttcaccaaaagcagagatgtgagacctggcaggtttcaaagacccctcaagtgctccataccttgaaattcacttccacaaagctagaacaccatctgttcctgagggatcaggttatcgtctgtttcttttaggcactggccagtcaggctttagtggacacgaagccacagatttttagtgtaaaatgcctaatctatcataatctttaggtagatatttggaggcctgcacacttaaatgggttggtgaaatgtcataccagacacatggctgggaattgggtttttctcctccgctcttagcagcacctttgtaacccagtgattacccccctcatggctccacggccacatccgcaaaaagggtactggtgaacgtgacattttcacgaagccacagcccatggtcactccctgcaaagctctgaacttgcgcattcccaggccaggccgtggttgtctttccaaggcggctcagcttgtgctttgcttggagagagcggagggcagcagcacagtgacagcgtctgggacctcagaccagtttccacagccacttatgaaagcagacggctccatgggctggaggaggtgggacgctctggaaagaactcgggtgcgagtgggaaagaaaatcgagctgagcagctggaagtcgaagtcgcgtgagtgaggaccagacactctcgatttaggcaaaggcggggtgcacttcccaacaacacatcctcctcactggcgagaccaggcctgcccttcaagttcctctcctgatttaatccccttggcgagggtttggcatgaaatcaatggccagcaagcttggtaaacgaagccgcctacaccgccctccccctccctgcacggccgcgccccgcctccgctcctgtctcaatctgggattgtcctcctgtagccccaccatccaccgtggggaacggtggagagactacaactcccagtatgcaccgcgatgcgcgcctcaccctgcatctcccagcccgcagccagctggcatcctagaccctctgccctgcgaccaacagccgggagcggaccagacaccagaactcccggaacggttgaagacggttccgctccctgtcccgcctttcgcagcccagcagtttcgccctgcggagaggagccttgctgtttccaaatctctcctgctgaagagacattggagctagggcggctagtttcacctggtaattgtgacaccctgtctcctcgagctgcaggcttttatgcttgtcatgttcgaagtttgataccttgcagatcaacaaagggccggtggcctctcactgcctccgcggcagggttgtcaagtttttcaggttaagtactgcacgactactcgcttctgaaactgatagacactgcctcagctccgtgcagggcagacgcacaagagcagaatctccgtgggacatctctctggagcatcaatattactgcagtatttggaagaaacaaatttaaataagttctaaggtgaagaatggaacatttaagacaagtctggaaagtcatctgcctttaataactgtcgtttgtccttaacgtcagactttctccaagaccaaaactctaagaacttatttccattcttacaaatagtaaaaatgataaatcatatcaagtcaattgaaagtcctgcctgctgctttcctaaattgcaatatggccttggtatggttttatttgtacttttgtgggggattcgtggatctttagattaaaaaaaaaaaaataggtttttgaacaatttttgcaagtttgcagctgttagttattgatttatttttccaacccatctaattcttctgtctctctcctctcctcaggctcaataattccatgggtctctaaggctgtgtttattttctttaaattttgttgatttacttttatactccatttgattttttctatctctcaccttttctcagactcagtcatcccacaggtctgtaaggctctgttcattttctttaaacttcttttttttttcctctcctcagattggataaattatattgctatgtctctgtttctgaactatagaaaagctcaaaattattatttttatttctcattttttatatggctattttttctctgctgatgtttcacatctattcatttatgagaatattttcctttgccctcatgagcgtgtttataatagctgccttcaaattcttgtctgccgtttacatcttggacatcttggagatggctactgcctgctttttatcttgtgtatttattacattttcacgtgtcttcacgcatcccttgaattggaaattgtgccctggagactgtatacaagactggattaaaaagactggattctgttttgtccctg

SEQ ID NO: 955 - DNA, 2251 bp, HOMO SAPIENS
cgaagcactaggccgtttgaggatctccgctccgctttgcctgggaccaggaaaagacgcgagagacggaactcggcatcaggcactgcttggggcaggaggagagtaggggaaaccaaggaagagaacagaaaggtaagcaccagccacaaaaacctacaaaagaagggaaattactgtctttaaatattaaaaaaaaacaagatccatgagtgggcatcgatcaacaaggaaaagatgtggagattctcacccggagtccccagtgggcttcgggcatatgagtactacaggatgtgtattaaataaattgtttcagttaccaacaccaccattgtcaagacaccaactaaagcggctagaagaacacagatatcaaagtgctggacggtccctgcttgagcccttaatgcaagggtattgggaatggctcgttagaagagttccctcctggattgccccaaatctcatcaccatcattggactgtcaataaacatctgtacaactattttattagtcttctactgccctacagctacagagcaggcacctctgtgggcatatattgcttgtgcctgtggccttttcatttaccagtctttggatgctattgatgggaaacaggcaagaagaaccaatagtagttctcctctgggagaactttttgatcatggctgtgattcactatcaacagtttttgtggttcttggaacttgtattgcagtgcagctggggacaaaccctgattggatgtttttttgttgttttgcggggacatttatgttctattgtgcgcactggcaaacgtatgtttctggaacattgcgatttggaataattgatgtgactgaagtgcaaatcttcataataatcatgcatttgctggcagtgattggaggaccacctttttggcaatctatgattccagtgctgaatattcaaatgaaaatttttcctgcactttgtactgtagcagggaccatattttcctgtacaaattacttccgtgtaatcttcacaggtggtgttggcaaaaatggatcaacaatagcaggaacaagtgtcctttctccttttctccatattggatcagtgattacattagctgcaatgatctacaagaaatctgcagttcagctttttgaaaagcatccctgtctttatatactgacatttggttttgtgtctgctaaaatcactaataagcttgtggttgcacacatgacgaaaagtgaaatgcatttgcatgacacagcattcataggtccggcacttttgtttctggaccagtattttaacagctttattgatgaatatattgtactttggattgccctggttttctctttctttgatttgatccgctactgtgtcagtgtttgcaatcagattgcgtctcacctgcacatacatgtcttcagaatcaaggtctctacagctcattctaatcatcattaatgatgtaattggtatataggaacatcatgttttctgcaggaaagaaagtaacatattaaggagaatgggggtggataagaacaaatataatttataataatcaatgttgtataacttttattctttattattggtaacacgccctaactatcctgtgtgagaatgggaatttcaagtcccatcttgtaaattgtatatgttgtcatgcagggtttgggccaagaaagcatgcagaaaaaaatgccatgtgattgtaattatcctggattcagaataatactgtgatggggagccagatccgcagtggtggagagttctaatgttgactgtttgcaggccaaaagatgattgctttataattttaacaaatcattgtcttttagtaacatccttgtttagtgtcttctcaagctttctttactgaggaattcagcttgtgacacagatacatcccactagcttgtgaggtggaactagtaataaagaccttgaatttggattgaaaagtttcctatctttacattgttgaggaagtccttttttttttttttttttttttaattgctcaagaaatgattctctcacaggcttgggaaatcctgttagcatgcagaataatgtggtaactttgtcaatttcccattttatttttttaaataaatatatgatctaaaagccaactttttctcagttttactcagtggaaagataaactaagttttaatgttatttttttaaatttaagcaaaatttatttctgttctttaataaataagaaaatgtggtccactg

SEQ ID NO: 956 - DNA, 2750 bp, HOMO SAPIENS
attgtttcctactccattttctctggggcaatagcagaataggagcaagccagcactagtcagctaactaagtgactcaaccaaggccttttttccttgttatctttgcagatacttcattttcttagcgtttctggagattacaacatcctgcggttccgtttctgggaactttactgatttatctcccccctcacacaaataagcattgattcctgcatttctgaagatctcaagatctggactactgttgaaaaaatttccagtgaggctcacttatgtctgtaaagatgggaaaaaaatacaagaacattgttctactaaaaggattagaggtcatcaatgattatcattttagaatggttaagtccttactgagcaacgatttaaaacttaatttaaaaatgagagaagagtatgacaaaattcagattgctgacttgatggaagaaaagttccgaggtgatgctggtttgggcaaactaataaaaattttcgaagatataccaacgcttgaagacctggctgaaactcttaaaaaagaaaagttaaaagtaaaaggaccagccctatcaagaaagaggaagaaggaagtggatgctacttcacctgcaccctccacaagcagcactgtcaaaactgaaggagcagaggcaactcctggagctcagaaaagaaaaaaatcaaccaaagaaaaggctggacccaaagggagtaaggtgtccgaggaacagactcagcctccctctcctgcaggagccggcatgtccacagccatgggccgttccccatctcccaagacctcattgtcagctccacccaacagttcttcaactgagaacccgaaaacagtggccaaatgtcaggtaactcccagaagaaatgttctccaaaaacgcccagtgatagtgaaggtactgagtacaacaaagccatttgaatatgagaccccagaaatggagaaaaaaataatgtttcatgctacagtggctacacagacacagttcttccatgtgaaggttttaaacaccagcttgaaggagaaattcaatggaaagaaaatcatcatcatatcagattatttggaatatgatagtctcctagaggtcaatgaagaatctactgtatctgaagctggtcctaaccaaacgtttgaggttccaaataaaatcatcaacagagcaaaggaaactctgaagattgatattcttcacaaacaagcttcaggaaatattgtatatggggtatttatgctacataagaaaacagtaaatcagaagaccacaatctacgaaattcaggatgatagaggaaaaatggatgtagtggggacaggacaatgtcacaatatcccctgtgaagaaggagataagctccaacttttctgctttcgacttagaaaaaagaaccagatgtcaaaactgatttcagaaatgcatagttttatccagataaagaaaaaaacaaacccgagaaacaatgaccccaagagcatgaagctaccccaggaacagcgtcagcttccatatccttcagaggccagcacaaccttccctgagagccatcttcggactcctcagatgccaccaacaactccatccagcagtttcttcaccaagaaaagtgaagacacaatctccaaaatgaatgacttcatgaggatgcagatactgaaggaagggagtcattttccaggaccgttcatgaccagcataggcccagctgagagccatccccacactcctcagatgcctccatcaacaccaagcagcagtttcttaaccacgttgaaaccaagactgaagactgaacctgaagaagtttccatagaagacagtgcccagagtgacctcaaagaagtgatggtgctgaacgcaacagaatcatttgtatatgagcccaaagagcagaagaaaatgtttcatgccacagtggcaactgagaatgaagtcttccgagtgaaggtttttaatattgacctaaaggagaagttcaccccaaagaagatcattgccatagcaaattatgtttgccgcaatgggttcctggaggtatatcctttcacacttgtggctgatgtgaatgctgaccgaaacatggagatcccaaaaggattgattagaagtgccagcgtaactcctaaaatcaatcagctttgctcacaaactaaaggaagttttgtgaatggggtgtttgaggtacataagaaaaatgtaaggggtgaattcacttattatgaaatacaagataatacagggaagatggaagtggtggtgcatggacgactgaccacaatcaactgtgaggaaggagataaactgaaactcacctgctttgaattggcaccgaaaagtgggaataccggggagttgagatctgtaattcatagtcacatcaaggtcatcaagaccaggaaaaacaagaaagacatactcaatcctgattcaagtatggaaacttcaccagactttttcttctaaaatctggatgtcattgacgataatgtttatggagataaggtctaagtgcctaaaaaaatgtacatatacctggttgaaatacaacactatacatacacaccaccatatatactagctgttaatcctatggaatggggtattgggagtgcttttttaatttttcatagtttttttttaataaaatggcatattttgcatctacaacttctataatttgaaaaaataaataaacattatcttttttgtgaaaggaaaaaaaaaaaaaaaaaa

SEQ ID NO: 957 - DNA, 3725 bp, HOMO SAPIENS
acatttcagagcagtccgggttgtggacgccaggagtttgccaaacacagcaaacactggtgtgtgagcggctgaaggggactctttccactccgatctccctccctcccagcctgttttgatttactaggacttcctcctccgggcgaggcgggggaaggacgccgccgagcgcctggagttgtgcgcgtgtgcgtgtgcgcgtgtgcgagtgtgaagtgcagcgctggagtgcaacatgctgtaatgggaggaaacccagcggcgtcggagcgcccgggaccgccgcggccgttctgagcgcagtggcgccgagcagcccctcccgcagccggtgtgacctgtcccttcaggctccaaccaggaatggagacgccattggatgttttgtccagggcagcatctctggtgcatgctgatgacgaaaaacgcgaagctgctctcaggggagaacccagaatacagaccctgccggtggcctctgccctcagcagtcaccgcaccggccctcccccaatcagccccagcaagaggaagttcagcatggagccaggtgacgaggacctagactgtgacaacgaccacgtctccaaaatgagtcgcatcttcaacccccatctgaacaagactgccaatggagactgccgcagagacccccgggagcggagccgcagccccatcgagcgcgctgtggcccccaccatgagcctgcacggcagccacctgtacacctccctccccagccttggcctggagcagcccctcgcactgaccaagaacagcctggacgccagcaggccagccggcctctcgcccacactgaccccgggggagcggcagcagaaccggccctccgtgatcacctgtgcctcggctggcgcccgcaactgcaacctctcgcactgccccatcgcgcacagcggctgtgccgcgcccgggcctgccagctaccggaggccaccgagcgctgccaccacctgtgaccccgtggtggaggagcatttccgcaggagcctgggcaagaattacaaggagcccgagccggcacccaactccgtgtccatcacgggctccgtggacgaccactttgccaaagctctgggtgacacgtggctccagatcaaagcggccaaggacggagcatccagcagccctgagtccgcctctcgcaggggccagcccgccagcccctctgcccacatggtcagccacagtcactccccctctgtggtctcctgaagggagcgcctcctccaacaacacgtggatctgcatggtttgcctgagctttgaacagtcagtacttaaaaaaaaaaaaatcatgggggtggggtggggggaagggaagggatggtttatttgcaaaaaccatgttgttgggatttgtgttctgtttttgtacttgcttggtatccgtacaagggggccctcaaacatgatagcaggaactacgcgtggaacatctgtctaatgtagcatccttacttcctgcctcagttaccaaagaaacctctgatgcaggtctgctgccccgacggggccaggactccacagcgctttctcagtcacaagccatgatgaattggtgactcagacgctttgtgctttttcctttgcttcttgagaccggggtgtgtgtggctcagcttccacggcgtgtttggttcggtccatgtgtgtgcgtgtgtatacttgaagagaactgtcgtgtctgatttgcactattggaggaggactaaagttgcctgacaactttatgtgttatgccagaactctgagggcaaactgctgaaaaacaaagggtttaaggatgacatttctgaccatttgtgtgtttgttgttgttactgtttttgttttttttaatgtagacaatacagctttggaaggggaagtctcatacaggttataggtctttctctctctagatttcaggtgcttgcaactggactgcagactctaccaatcacgggcattttatcttctctgaacactgcagtttgttagactagagctgaggttggaggattccatagtgctttaaacgtgatgcatgttttaatggagaaaaaatagctggtttctattaattatatagacagtaaacaaaaaccttaatacttactatcttcttttcagaattagtttatttttgtcagttacagtcctagatatacttactgctggtacagttgtactctaagattggtatttgatattcactttactcacaagtagtgcgggaggccagctcctggcaggccctcgcgatgagcagtgggtcagctgcggtgtgggatgctggagtttggctgcaggctgacatcatttatttttgcatccctgtctgctttgttacaagctcccaggggaggtggggtttgtgtcttccaacttccctacatgcagaaactgctccctttgaactctcttggctgaacagcagattactgacagacaatctgtgatatggtgttttatacgcttcctcgtacgctggggccaaggcagtatacattcctctgactttatactgttattactgcatttattatttgctatattaatagctactaactagaaattagatgaagcaagcatgacagacacagctgtggaggtcacagctgctcctttttggtcaatgagcgtttctatcccctccccctggggtgtgctgtgtcccacctggcccaccagaggctcacgacgatggcacctgaccaggtgacgtgggcgtggtcacctcacctgcaaggctttgtggactctgcacaccgtatgacccccggttttacagtttttagctgttgaattttggaaattggcactgggtgaaaaggtcggaggactggctcttgtagtcacagagtggctgcaggcctttgaaaagtggaggaaagaaaagcccttctccttgccccgcacacatttcactcccactgtactgggcttccaagctttggcattcaggcccctatattttctgtaggaaaaatcgttgagaacacttttctatatgggtgattttgagaccatcgttacgctgtgcgtaaagaatgtacagagaaatttgtaggtattttttgaagaacattaatttgttaatgatatgtagctatttaatttttccctttcctattgtaatcattcattttttttgttgttcggaaaaaaaaagttgatctttttttttgtcgtagatttgtctgtaaaagtgcaggaacagttattctatgagaacactgcatctgcattcatagccacgagtttgttattgctacaggctactgagcgtcgtaacaggaaaaccacccacagctgaccggctcggtggaggacactcctgggacaggtctctttgtcagtgaacaagggcgtcactctgggaggggtcggcggtgctggcggccgggtccctggtgcactgacctatctgggataggcagtaccctggaggggggcctggggcagaggaggcagcagaaaaccaaacatttcactgagaaagccccctccctgctctaagaaggggctccgtgaagttcttcccagagccgcgctgcctgcagtgcgctctgaccttctcttcatgtgtgtaaatctgtaatataccattctctgtggcctgtttttcctggaagaagaaaaaaaaaggtttggcaggccatctttttttgtacttaaaagtagccttaagaacaataataaagtgctcttaaacc

SEQ ID NO: 958 - DNA, 2527 bp, HOMO SAPIENS
ccaggctctggagggcgccccggaaaccatggaagtcctcgtcctggccggataccgcgcgcagaaggaggacgagctgagtctggcgcccggggacgtggtccggcaggtgcgctgggtgcccgcgcggggctggcttcgcggagagtttgggggccgctatggcctcttccccgagcgcctggtgcaggagatcccagagaccctgcggggctccggagaggcgcggaggccgcgctgtgcgcgccgccgaggtcatcctgccaaacacccgaggccccaaagatggtgcaaagtgaacttcagctacagcccagagcaggcggacgagctgaagctgcaagctggggagatcgtggaaatgataaaggagattgaggacggctggtggctggggaagaagaacgggcagctgggagccttcccatccaactttgtggaattgctggacagtgggcccccaagccttggtaacccagacatgccttcagtcagccctggtccccagcggcctcccaagctgagcagcctggcctatgacagccctccagactacctgcagacagtctcccaccctgaggtctacagggtcctgtttgactaccagcctgaggccccagacgagttggcgctgcggaggggggacgtggtaaaagtactcagcaagaccacagaggataagggctggtgggaaggagagtgtcaaggacgaagaggagtttttccagacaactttgtactcccaccacccccaatcaagaagctggtcccacggaaagtggtatctcgggaatcagctcctattaaggaaccaaaaaagttgatgcccaaaacatccctccccacagtcaagaagctagcaacagccaccactgggcccagcaaagccaagacatctcggacacccagcagggacagtcagaagctcacctcccgagactcaggccccaatggtggcttccaaagtgggggttcgtatcaccctggccgaaagcgatccaaaacccagactccccagcaacgctctgtgtccagtcaggaggaagagcacagcagcccggtaaaggccccctctgtgaagagaacccccatgccggacaagactgccaccccagagaggcccccagctccagagaacgcccccagctccaagaagatcccggctcctgacaaagtcccctccccagagaagaccctcactctaggggacaaggcctctatcccagggaactccacctcggggaagatcccagctcctgacaaagtccccaccccagagaagatggtgactccggaggacaaggcttctatcccagagaactccatcatcccagaggagaccctgactgtggacaaaccctccactccagagagggtcttttcagtggaagagtcccctgccctagaagccccacctatggataaagtccctaatccaaagatggcccctctgggggatgaggcccccactctagaaaaggtcttgaccccagagctttctgaagaagaggtgtccaccagagatgacattcaattccatcacttctcttcggaggaagccctgcagaaggtcaagtactttgtagccaaagaggatccatcatcccaggaggaggcccacacgccagaggcacccccaccccagcctccttcctcagagaggtgcctgggagagatgaaatgtaccctagttagaggggacagctccccacgccaggctgagttgaagtctgggccagcatccaggcctgcccttgagaagccccacccccacgaagaggctacaacccttccagaggaggcaccttccaatgacgagaggacccctgaagaggaggcgccccccaacgagcagaggcctctgagagaggaggtgctccccaaagagggagtggcttccaaagaggaggtgaccctgaaagaggaattgccccctaaagaggaagtggctccaaaagaggaggtgccccccatagaaagagcctttgcccaaaaaacacgtcctatcaagccgcctccagactcccaagagacgctcgcgctcccctcgctggtcccgcaaaactacacggaaaacaagaatgaaggagttgatgtaacgtcgctgaggggcgaggtggagtctctaaggagggcgctggagctgatggaggtgcagctggagaggaagctgaccgacatctgggaggagctgaagagcgagaaggagcagcgccggcggctggaggtccaggtgatgcaggggacccagaagtcccagaccccgcgcgtcatccacacgcagacgcagacctactgagggtgggcctgggaagggaccgcggcctgacctggctggggccacccacgtccttgcacacgactttgggaaacgcgagaaagtaaactctgcctagcacggcgccacgccggtctggtcgctgggggcggggcctgcgcgggggcagggcctgggcctccgcattcctgacggtccctcccaggcacatctggccaacatgtggctcccattaccgttcaaaaaaaa

SEQ ID NO: 959 - DNA, 818 bp, HOMO SAPIENS
cgcagcgggtcctctctatctagctccagcctctcgcctgcgccccactccccgcgtcccgcgtcctagccgaccatggccgggcccctgcgcgccccgctgctcctgctggccatcctggccgtggccctggccgtgagccccgcggccggctccagtcccggcaagccgccgcgcctggtgggaggccccatggacgccagcgtggaggaggagggtgtgcggcgtgcactggactttgccgtcggcgagtacaacaaagccagcaacgacatgtaccacagccgcgcgctgcaggtggtgcgcgcccgcaagcagatcgtagctggggtgaactacttcttggacgtggagctgggccgaaccacgtgtaccaagacccagcccaacttggacaactgccccttccatgaccagccacatctgaaaaggaaagcattctgctctttccagatctacgctgtgccttggcagggcacaatgaccttgtcgaaatccacctgtcaggacgcctaggggtctgtaccgggctggcctgtgcctatcacctcttatgcacacctcccaccccctgtattcccacccctggactggtggcccctgccttggggaaggtctccccatgtgcctgcaccaggagacagacagagaaggcagcaggcggcctttgttgctcagcaaggggctctgccctccctccttccttcttgcttctcatagccccggtgtgcggtgcatacacccccacctcctgcaataaaatagtagcatcggcaaaaaaaaaaaaaaaaaaaaaaaaaaaaaaaaaaaaaaaaaaa

SEQ ID NO: 960 - DNA, 4575 bp, HOMO SAPIENS
aaatgtaatttgaagaaggcagaaggaacccatggctttagccggctgcccagattcctttttgcaccatccgtactaccaggacaaggtggagcagacacctcgcagtcaacaagacccggcaggaccaggactccccgcacagtctgaccgacttgcgaatcaccaggaggatgatgtggacctggaagccctggtgaacgatatgaatgcatccctggagagcctgtactcggcctgcagcatgcagtcagacacggtgcccctcctgcagaatggccagcatgcccgcagccagcctcgggcttcaggccctcctcggtccatccagccacaggtgtccccgaggcagagggtgcagcgctcccagcctgtgcacatcctcgctgtcaggcgccttcaggaggaagaccagcagtttagaacctcatctctgccggccatccccaatccttttcctgaactctgtggccctgggagcccccctgtgctcacgccgggttctttacctccgagccaggccgccgcaaagcaggatgttaaagtctttagtgaagatgggacaagcaaagtggtggagattctagcagacatgacagccagagacctgtgccaattgctggtttacaaaagtcactgtgtggatgacaacagctggacactagtggagcaccacccgcacctaggattagagaggtgcttggaagaccatgagctggtggtccaggtggagagtaccatggccagtgagagtaaatttctattcaggaagaattacgcaaaatacgagttctttaaaaatcccatgaatttcttcccagaacagatggttacttggtgccagcagtcaaatggcagtcaaacccagcttttgcaggaacccagacacctgcagctgctggccgacctggaggacagcaacatcttctccctgatcgctggcaggaagcagtacaacgcccctacagaccacgggctctgcataaagccaaacaaagtcaggaatgaaactaaagagctgaggttgctctgtgcagaggacgagcaaaccaggacgtgctggatgacagcgttcagactcctcaagtatggaatgctcctttaccagaattaccgaatccctcagcagaggaaggccttgctgtccccgttctcgacgccagtgcgcagtgtctccgagaactccctcgtggcaatggatttttctgggcaaacaggacgcgtgatagagaatccggcggaggcccagagcgcagccctggaggagggccacgcctggaggaagcgaagcacacggatgaacatcctaggtagccaaagtcccctccacccttctaccctaagtacagtgattcacaggacacagcactggtttcacgggaggatctccagggaggaatcccacaggatcattaaacagcaagggctcgtggatgggctttttctcctccgtgacagccagagtaatccaaaggcatttgtactcacactgtgtcatcaccagaaaattaaaaatttccagatcttaccttgcgaggacgacgggcagacgttcttcagcctagatgacgggaacaccaaattctctgacctgatccagctggttgacttttaccagctgaacaaaggagtcctgccttgcaaactcaagcaccactgcatccgagtggccttatgaccgcagatgtcctctcggctgaagactggaggaagtgaacactggagtgaagaagcggtctgtgcgttggtgaagaacacacatcgattctgcacctggggacccagagcgagatgggtttgttcggtgccagccgaccaagattgactagtttgttggacttaaacgacgatttgctgctgtgaacccagcagggtcgcctccctctgcgtcggccaaattggggagggcatggaagatccagcggaaagttgaaaataaactggaatgatcatcttggcttgggccgcttaggaacaagaaccggagagaagtgattggaaatgaactcttgccctggaataatcttgacaattaaaactgatatgtttactttttttgtattgatcacttttttgcactccttctttgttttcaatattgtattcagcctattgtaggagggggatgtggcgtttcaactcatataatacagaaagagttttgaatgggcagatttcaaactgaatatgggtccccaaatgttcccagagggtcctccacaccctctgccgactaccacggtgtggattcagctcccaaatgacaaacccagcccttcccagtatacttgaaaagctttcttgttaaaataaaaggtgtcactgtggtaggcatttggcatattttgtggactcagtcaagcaaccacagtctgttaatcatttctctatgctcagatgtcagatcctcttgttattagtgtgtcttgttctgcacagtgcaggagactttattcctttggaaaattcactgttccacaaacagcaggctgaatggcctcgcctctagattgacgtgggccagcctccttgagacacacctggcacccgtcatcggccagcggtggatgctgcataatccacctgggtacttcagccttgcgtttccacagccttcagcctgttctagaacgatcactgccttacccctgctgctgcagtggtgtgagtcgtttcacggctgatgtccctcgggggattaaaggatctaaagagaaaatggcacctggttgtcttcgtgctgtgtctcatgggtttccatagtgataaagacaaggaaacgctgcaggggccacaggcacaggctgatatttaaagatctttgcttgcagccctccgtcctgctgaaaacccccataagccagtgaacacagagcagctagaggctcctcctctgctggcttagggtcagaagtacctcacagtggttgtggacatggaagagttttgtcaacacaacactttgtccccgctccgggagatgagtcagatggtggcttgagttgtcacttggtcccctccgcccctcgggtggccccctttgccacgtccccttagcttagtgatcaggtgtgagagtggccatttccttacctttgatccctgtaaagcagaaaggactcctttgacaggcgacaaactactgtggtgagcagaatgatttcctttttcaagacaacacctgcctggcttctattaatgtgtgctggccatgatattgccccaaatccgccccactgaagtgttccctaaggaacagcatttctctgctcctcagtcaacccccgtagcctagagcagtgtcacaagcttcagtaaggccagtcagctggaagtcagtctaccgtatagtaacactgtatttcagtctacagaccacactctagttgttttccatgaaaggtatacaaatgaagaattttctagcaaaacatgtttttaaccatcagtgctcaattgcattttcttcctttcgcagccagtcagtctttcaaactattgacagtaagataattctcacgttcacacctggtggcaggcttcactgtagggacggacattgcagttacaccacgattccttcctcttcactggctcgaggtaaacccttttcaaggaaaaacaactctaggatttcttttttctgtgtacgtagaccagtcccatcagtgtataatctctctctcacacgcctctctccaatagacagcttgtatttgcagtatttcatatttataaatatgcgtttatttaaaaggagaacaaaagcttgactctgattcacagttttgtatgtagctggtttgacgtagtcttttgtattttccctgccgaagtgaattgttggagaatgtaaaccgcctccacgtggcggcagacttcctaaggccccagctcgctggcctcgcgctgggcggctgggaattccacctgagaacaagtcccgcaaaccggggacggaaggacatttgacttttatttttgtatttaattgacatgaatgtaaaggggacagctcagggttgttttggagcctgttgactttgtatctctgcctgtgattttcttttctaaatgaaactccatgtagcaaccaggacgaagttgagaaggaaaacgccaaatgctttggttattagagtttaataggtaagctctgttacactaggtgttagagttccagaatgttcttttgtttgctaaaccttgaagaaacatgtgcctcagcctagatgttttgtcttctcttttctgcacttaatacctgacagtatgaccgatctctgcgcctttctgggggcgggcaagctggcggtagatttgtgatgtcacagtgcaaactgcagtgactgtaaattggcctggcgtgtataaacgttttcagggaatgcagaaggtattaatgaagagacaaaacctttattccatgtgctttgcttcattctgtacatagctctttggctcgtgaacctaattgtaaactttcaggtatttttgtacaaataagggactgatgttctgtttcttgtaattagaaataaacattaatacagtgttcttcattttcaaaaaaaa

SEQ ID NO: 961 - DNA, 487 bp, HOMO SAPIENS
actcactttctgacttaggccacaggtcgttttaccatgtctggacgtggcaagcagggcggcaaggctcgcgccaaggccaaaacccgctcctctagagctgggctccaatttcctgtaggacgagtgcaccgcctgctccgcaagggcaactacgctgagcgggtcggggccggcgcgccggtttacctggcggcggtgctggagtacctaactgccgagatcctggagctggcgggcaacgcagcccgcgacaacaaaaagacccgcatcatcccgcgccacttgcagctggccatccgcaacgacgaggagctcaacaagctgcttggtaaagttaccatcgctcagggcggtgttctgcctaacatccaggccgtactgctccccaagaagactgagagccaccacaaagctaagggcaagtaagggctgaactttaaaaatgtaaacttacaagacaaaaggctcttttcagagccaccca

SEQ ID NO: 962 - DNA, 360 bp, HOMO SAPIENS
  misc_feature (237)..(237): n is a, c, g, or t
gagttttactgccaagctacagaactttatcaaatgccatactgagaagactgatcgatttattaaagcaaactcctaaaggatctcttcttggaaacaattcattagtggttagtgtggaatctcagtgtggcacggaataaagtaaagtacatgggtaacggccccagaaaaaccagagcacagcccagcgcattaccactcatcgcctgggtgatcttgggaaggttacctaanctccggtagctttaatttcctcacctgtaaaataaggctaatgatgtgtattttgtaaagccagtatgaggataataaagtgcctgacacataatatagggtcccctgaaatgttagttctct

SEQ ID NO: 963 - DNA, 5575 bp, HOMO SAPIENS
gcggccgcgggcccggcagaaggccgagtaggagggaccacgcgccgggggccgcgatctctggcagggggcggtgtgccagcggagcaccatgcacataggcgcccagcgccccaactacccctcccgaggaaaagaggccggggccgcgctggggcggcggagagcatgagggaggccggggggcggctcggcttggagcgctgctagggagcggtgcgcgccgcacacccgcctgggcgcggcggagggcggggagccgggcaggtcgcgcctgcgggcggcagccgaccgccgggagctgttctgatttccgacgcgcacgctaggggcccggagcagcccccggccccggcgcgccgccgacatgggcaacgcagggagcatggattcgcagcagaccgatttcagggcgcacaacgtgcctttgaagctgccgatgccagagccaggtgaactggaggagcgatttgccatcgtgctgaatgctatgaacctacctcctgacaaagccaggttactgcggcagtatgataatgagaaaaaatgggaactgatttgtgatcaggaacgattccaggtgaagaatcctccccatacatacattcaaaagctcaaaggctatctggatccagctgtaaccaggaagaaattcagacggcgtgttcaagaatctacacaagtgctaagagaactggaaatttctttgagaactaaccacattggatgggtcagagaatttctgaatgaagaaaacaaaggtcttgatgttctagtggaatatctctcatttgcacagtacgcggtaacttttgactttgaaagtgtggagagtactgtggagagctcggtggacaaatcaaagccctggagtaggtccatcgaggacctgcacagagggagcaacctgccctcacctgtgggcaacagtgtctcccgctctggaagacattctgcactgcgatataatacattgccaagcagaagaactctgaaaaattcaagattagtgagtaagaaagatgatgtgcatgtctgtatcatgtgtttacgtgccatcatgaattatcagtatggtttcaacatggtcatgtctcatccacacgctgtcaatgagattgcactaagcctgaacaacaagaatcccagaacaaaagcccttgtcttagaactgttggcagccgtttgtcttgtcagaggcgggcatgaaatcattttatcagcatttgataactttaaagaggtttgtggagaaaaacagcgctttgagaagttgatggaacatttcaggaatgaagacaataacatagattttatggtggcttctatgcagtttattaatattgtagtccattcagtagaagatatgaatttcagagttcacctgcagtatgaatttaccaaattaggcctggacgaatacttggacaagctgaaacacactgagagtgacaagcttcaagtccagatccaggcttacctggacaatgtttttgatgtaggagctctactggaagatgctgaaactaagaatgctgccttggagagggtggaagaactggaagaaaacatttctcatttatctgaaaaactgcaagacacagagaatgaagccatgtccaagattgtggaactggaaaagcaactcatgcagaggaacaaggagctggatgtcgttcgggaaatctacaaagatgcaaatactcaagttcacacattaagaaaaatggtcaaagaaaaagaagaagcaattcaaagacagtctaccctggaaaaaaagattcatgagctagagaaacaagggaccattaaaattcagaagaaaggggatggggatatcgccatactgccagttgtggcttctggcacattgtccatggggtcagaagtggtagcaggtaactctgtgggacccacaatgggggccgcttcctcaggacccttgccccctcctccaccaccactgcctccctcatcagacacacctgaaacagtgcaaaatggtccagtaacaccacctatgccaccgccgccgccgccccctcctccacctcctcctcccccaccgccccctccgcctcctcctctcccaggccctgcagctgagactgtaccagctcctcccttagcacctccccttccctctgcacctccgctgcctggaacatcttcacccacagtggttttcaactcaggattagcagctgtgaaaattaagaagccaatcaagacgaagttcagaatgccagtgtttaactgggttgctctgaagcccaatcagatcaatggcacagtcttcaatgaaattgatgatgagcgaattctggaggatttaaatgtggatgaatttgaggaaatattcaagacaaaagcccaaggacctgccattgatctttcttcaagcaaacagaagataccacagaagggatcaaacaaagtgacattactagaagcaaacagggccaaaaatcttgccataactttaaggaaagctggaaagactgctgatgaaatatgtaaagctattcatgtatttgacttgaagacactgcctgtggactttgtggaatgcttgatgcggttcctaccaactgagaatgaagtgaaagtgcttcggctctacgagcgggaaaggaagcctctggaaaacttgtcagatgaagatcggttcatgatgcagtttagtaaaatcgagaggctcatgcagaagatgaccatcatggccttcattgggaactttgctgaaagcattcagatgctgactcctcaactacatgcgattatagcagcatctgtctctataaagtcgtcccaaaaactcaagaaaattctggagatcatcttagcccttggaaactacatgaatagcagtaaaagaggagcagtttatggatttaaacttcagagtttagatctgctcttagatacaaagtcaacagacagaaagcaaacactgttgcactatatatccaatgtggtgaaagaaaaatatcaccaagtgtccctgttttataatgagcttcattatgtggaaaaagctgctgcagtctcccttgagaatgttttgctggatgtcaaggagctccagaggggaatggacttgaccaagagagagtacaccatgcatgaccataacacgctgctgaaggagttcatcctcaacaatgaggggaagctgaagaagctgcaggatgatgccaagatcgcacaggatgcctttgatgatgttgtgaagtattttggagaaaaccccaagacaacaccaccctctgtcttctttcctgtctttgtccggtttgtgaaagcatataagcaagcagaagaggaaaatgagctgaggaaaaagcaggaacaagctctcatggaaaaactcctagagcaagaagctctgatggagcagcaggatccaaagtctccttctcataaatcaaagaggcagcagcaagagttaattgcagaattaagaagacgacaagttaaagataacagacatgtatatgagggaaaagatggtgccattgaagatattatcacagatcttagaaaccaaccatacagacgagccgatgcggtgaggagaagcgtcaggcggcgctttgatgatcagaacttgcgttctgttaatggtgccgaaataacaatgtgaacctgagactggcctgcatgaatacagggtgtgcgtgaatgaaactgcccacatgaactttatgtgctacgatttaactgcagccttgaacacacacaaaaatattcttaagggctcagatttagcaaacacggaagaattttaaaatgagctctcctttcaacccttgttaacaagtgcctaaaaatggaagtacctgttcagattaatcaaagcaataggatttgatttgattaggtatctttttacaccagtatgttatttttaaccaaaatgtaaagttcttattaaactcattacctgccattgtgattgtcccatcatggcccacctggtttcctgatgttgtaaataacatcaatgcatctgctgtgggtcctttgctgagatgtcttcgaaggaattttgttttagccatatccatcaactttgtattttacttgcaatttggaagaaggaaagtcacatgatgaaactccttttgtctataaccaggccctggcaaagtgcaaacaggatgcaactgcagtggcacaaaggtcactcaatcctttgtttccagtttcacattctactacttctgcgctagagaacgatgctctgtgagaggcattcactagtatgaatgtggggatatagtgtataagacttatttgcagtactgtgttcttcagctagaggcagctttttaaataatgcaagtgtatttattagcattaaaattaacatctcagtaatcagcattagcatttctgaggaccattattaattctgagaacagaaattggtgccttgcaaggaagtttactagctctatcaacaagcattcaaggttacatctgctagcagagtagtgttaggaacctggccttactctcctctgacaatcgcaattttttcttattttttataaattcaagaagatacacttggcatcgtgtatcgaggctaagtttttcatgcatttcccagactacttatggagaattgcagtttaagttgctgaaaagtattaacatggtattaagcttaaataatacgtaatgggactagatggcccactaagccactgttattttccttcctctctggcagggcacttgatccattccaaagtcaaaaactggactgaagctaaatttgtacttttcataatatacattctgcttctggcttatcttcttggtacatcaatatattaattgtaaagtttattgtatagtatttaaccgctgaagttcctattttatgttgtgcttatgtgaaccccttggtgaaggtcccttttccttggatgtgtagttatatgatctttttaaatgtacagatattttgctataaaatcggtgcagttttttatggtttttacacttctctttaattcccacctaagcctctgggtaatattgtaaatattgttttaaaatgcatcagcctatgctatacaatctgaatgttattttaacttatagttttttttaatatatatatttaactataaggacagtttagggaacaagttacctaccacatttcactttagtgtacctatttacagaaagattaaactgccacctgcgggcacattcccataaatgtgtactttactttaaaaagaacatgccacgattttgtctttctgtggactcaacattcacttcgattaaaaatagcaatttgaccaagttggacttccactacaaagcagctgttttccaaagttcaatgctgacatatatgtatattaaaataattgcctatttattaatctacaaatagacaacgttggcatgttcttttctgtttgtctattaatgggcctgcttcttagcaatattagaatgttttataaaagcaattcatgttacttttctggtcttttcatggcatatgagcaaataataaactatttacactactattctgtaa

SEQ ID NO: 964 - DNA, 2192 bp, HOMO SAPIENS
gtcctgcaggcggcagccagagctgcgcgccgcggcggcggaagatggctgcggccgaggtggcggacactcagctgatgcttggagtcgggctgatcgaaaaggacacaaatggagaagttctgtgggtgtggtgttatccttccacgacagccacattaaggaacctgctgctgagaaaatgctgccttacagatgaaaacaaacttctccatccctttgtctttggtcagtacagaagaacatggttttatatcacaacaattgaagttccagattcttccattttgaaaaaggtgactcatttttctattgtcctgaccgccaaagattttaacccagagaagtatgctgccttcactaggatattgtgtagaatgtacctgaaacatgggagcccagttaaaatgatggagagttatattgcagttctcacaaaggggatatgccagagtgaagaaaacggctctttccttagtaaggattttgatgcccgaaaggcctacctggctggctccatcaaagacattgtatctcagtttggaatggaaactgttatcttacacacagcactgatgctaaagaaaagaattgtggtgtatcaccccaagatagaagcggtccaggagttcaccaggactctgcctgccctggtgtggcaccgacaggactggaccatccttcactcttacgtgcacctcaacgccgatgagctggaagccctgcagatgtgcacaggttacgtcgctggatttgtagacttggaggtgagcaacagaccagacctctatgatgtgtttgtgaatctggcagagagtgagattaccattgctccccttgcaaaagaggccatggcaatgggcaaactgcacaaagaaatgggtcagctaattgttcagtctgcagaagatccagagaaatcagagagccacgttatacaggatattgctctaaaaacaagagaaatctttaccaacctagcaccattttcagaagtttcggctgatggagaaaagagagtccttaatttggaggcgctaaagcaaaaacgatttccaccagcaacagaaaacttcctttatcatctagcagcagccgaacaaatgctgaaaatctgactgtgtgacagaacgtatcactgatgactgatagaaagccctctttcactctgattacccactcactacatgaagtcctgaaaataacagagaaactgttatatctttttaatgatttatttgcaagtattgagatttgacctgaaaaacaatgaaacacatgaacacacttccgattttctcctcgctgattagcttcctgcctgctgtcagtgctggacgaagtgctataactactttatgtaacattacagaacagctagaggtcctggggtaagagaaaaaaagcacatcacaacaaatgtgaaagccttcattattacacgttccagtttgtctcgctgtgtaggcataagctaatggtttattttcagaaagctgcctgaaacgttgctttgtattcttctaggaagaactttaattcctcctgaggaactctactttctgagccaaactgctaattttctgcggaactgtctagaagatcattcaagagaccctgcagttgcactttctcgtaaaagttaaaaaaaaaaaaaaaaaaaaaaggtttttcccggcctttgaacattttgcctatgagagttttgcatatattttatacttgagtagacaactttaataatccatatttatactatcgcagaagtaagcatttggcaaacgttcagccattagcactcatttaaccctgttagcaatattcttttgaaaaaagtgccagtccttatgtgataaactaagaagcccattgaatataaaagtgtgtaggactgaaacagtgaccttatattattgctaagggaatatgagattaacttcctacaggggccaaaaccagagaaaggcttccagcaacttcgatgaaagtagtttggccacatgtcaagccaattgtttgtactatttatgtacctttttcataactggaattgccaaataagcatggagatctaaatgatgtacttgttagtgtattcattcatattgactgtaaaggattatttttcactcagtactgatgtccttggaaatcttacctggaaacatgtttgcaaaaaacaaaaaaaaaaa

SEQ ID NO: 965 - DNA, 1937 bp, HOMO SAPIENS; identical to SEQ ID NO: 369

SEQ ID NO: 966 - DNA, 14136 bp, HOMO SAPIENS
ctcttcttgtacagccccggcagccctgccttcttggctggagagtatattcagggatttccccttaataatcaccgaccctgggagcactttttagtttccaaaataaaaatatgatcctcacccctcttgcttgacagggaaaggctctcgccggagcccaggggggagcagtagcagcggcagccgagcttcctagtccattgccagcgcctctcactctgatctgtcagcccagccgagggaacaggggggaaggagaaaaaaaaaagcagctgaaagacaatctgcttcatcctgattctgcggcattccaaactgtggtatccttgggggttctcttaacattgctatggtgcagaagatttaaaatcagctgatgttcacaaggaatagagtcacgtgatgtatgaagggaaacatatacacttctctgaggttgacaataagcccttgtgctcatatagccccaaactgtgcaagcagaggcgactcaacggctacgccttctgtatcagacacgttctggaggacaagactgcccccttcaagcaatgtgaatatgtggccaagtataacagccaacgctgcaccaaccccatccccaaatcagaggatcgtaggtactgcaacagccacttgcaggtacttggctttatcccgaaaaaagagaggaagaaaaagaatgatcctatagatgaggtgaaggtcaggcaccagatggataccatggcctttagcctgacagtgcccacgttggccttgaagatgcccaacggactggatggaatgtccctctctccacctggggcaagggtccctctccactacctggaaaccgaattggaagacccatttgctttcaatgaggaagatgatgacctaaagaaaggggcaactgtgagaaagaagttgcagagcaagttggcccagaatcggcagcgccagagagagacagagattttaaaagttcgacaagagcactttagtccccctcctgcaccttcacagcagcagcctccgcagcagcactcccacctgtcacctttatctacttctttaaaacctccagcgccaccgcagggttcagtctgcaagtcacctcaacctcagaacaccagcctaccaatgcagggagtggcacccaccacacacactatagcacaagcacggcagttgtctcacaagaggcctctgcccctcctgccatccagtagggctcccactgtggacccacccaggactgaccggatcctcatgaaagccacagccttctctccacacttctcatgtataagccgactgcagagactggtgaaactgtgcacccagaaacatcagttggacactgatctgtttccccatttaggtttggactggtctgaagagagcggagaggaaccagaggactcagagcaggcctcgccctaccaggttgcatggtccatccgggaaaccctcagatatcaaagacatgcgtcagatgatgatgatgcggagagtaggagctccagggtgactcaactttgcacttactttcagcagaaatataagcacctctgccgcctggagcgggcagaatctcgtcaaaagaaatgccggcatacgtttaggaaagctttgctgcaggcggccagtaaagaaccagaatgcactggtcagttaatacaagaactgcggagagctgcatgcagtcgaaccagcataagccggaccaagctgagggaggtggaaccagcagcatgcagtggaaccgtgaagggtgaacagtgcgctaacaaagcccttccattcaccagacattgtttccaacatatcctcttgaaccactctcagcagctcttctcaagttgcacagccaagtttgcagatggacagcagtgctctgtgccagtttttgacattacacatcagacacctctgtgtgaagaacatgccaaaaaaatggataatttcttgagaggagataactcccgtaaagttcagcaccagcagcagaggaaacccaggaaaaaaaccaagcctcctgcactaaccaaaaaacacaagaagaagagaaggcgtggacctcgtcgaccccaaaaacccattccacctgcagtcccccaagggaacctcagcatgcccgccagcgtctcactgccagtggaggcctctcacatccggagcccatccacgccagagctgagtgctgatgagttgccggatgacattgccaatgagatcactgacattccacatgacttggaattgaaccaggaggacttttcagatgtcctgccacggctacctgatgacttacaagattttgatttttttgaagggaagaatggagacctcctcccaactaccgaagaggctgaggagcttgaacgggccttgcaggctgtaacttctctcgagtgcctgagtaccattggggtccttgcccagtcagatggtgtgccagtccaggagttgtcagatagaggaataggggtgttctccacaggtactggagcttcaggaatacaatccttgagccgagaggtgaacacagacctaggggagctattgaatgggcgtatagtacatgataatttttctagtctagagctggatgagaacctgctccgttctgctaccttgtcaaacccacctacacccctggcagggcagatccaggggcagttctctgccccagccaacgttggccttacttctgccactctgatcagccagagtgcacttggggagagagccttcccaggacagtttcatggacttcatgacggcagccatgcctcccagaggccacatcctgcccagctgctgagcaaggcagatgacctaatcacctcacgacagcaatacagcagtgatcactcacactcctcaccccatggaagccattatgatagtgagcatgtgccgtctccctacagtgaccatatcacctctccccacacaacatcgtactctggtgataatatggcagctaccttttcagcagagatgcccatcatggcgcagcacttgctcccaacccaacttgaggtgccacttggaggcgtggtaaaccccagaactcactggggcaatctccctgtcaaccttggagacccctctccatttagcaaccttctcggcgcagatggacatcttctttccacttccctatccacgccacccaccacttcgaactcagagaccacacagcctgccttcgccaccgtgacccccagcagctccagtgtgcttccggggttaccacagaccagcttcagtggcatggggccttctgctgaactaatggcctccacctctcccaagcagcaactccctcagttcagcgcagcctttggccaccagctgagttctcacagtggcattcctaaggacctgcagcccagccacagctctatagcccctcctacaggcttcacagtaacaggtgccacagctacaagtaccaataatgcatcttctccctttccctcccctaactgagggtgtctgtgtgtttgcaggcaggtggggaacccagtgttttctatctttgtttcctctttagcacccctctccccttttcctaaagaagatataacagatggggatcagaggggcaccccccttcccagttcaatgagtggccctgcagtggacctcgctacagtgttcacatgtgctccttagcactggtgctcattccctcctggcaggcccactccgccccagtggtttccttagtggttcagcacagtgactggataggattgatttttagcagcaagtcctagaagtggaagatacctcagaataccagtgccctttactatttcctagtattcagatcagtgctttccattctgttgccaggtttttacataggtggttctagatagaatgatcttattaattgagttcctgtataagagacagcaaatggtgtgtggcaggtcaagattctgacctagcaccaactgctaaacaccacagtgaggccaggattccattcgtaattgtgatcatgtttaactaaaagaaaaaaatgtgtcttttgactgcctgtgagtatgcgtgtgcccacgcgtgtgtttttgtgcagtgcaggaagcagctgtcccattagtttgatttttttttgttctccccttccccctacttaatgagtataaaactcttacttttctcctgtcctacatctcacagtcctaataaggttggtccttcttttcctcaagtttcctgaatagggagggtggtggactggtcgtgtgagtagcacaacctttttctgctaaaagttagcccaagaagaaacagaacatagaaagcttggattcccgtcagtgaggtagggatgtcctaaaaagcttgcctgggatgactgcaggctgccggggttctggggcctgatggtcactttgtcttttcagacatttgtttgtttctaaatccctctctcatggaatacatttgcaagatgtaattaaagaaaatattttgatgtgaaaaagcaggataggtcagatagatttgaaaagatgggatctgtcaactccttgatccatcttttgcttttgaatttttcatgtttacagtagtgattctttggtaagatttgtaaaatgttaagacacttgtagaatcagtgtaccagttgtgaagtgatgtgtaatatctgaaggatacacattttaaagtttctttcaaagcagaatatggaaattagatataaattttattcgccctttggtccttttaaaataattcaagtacttgggtttaagtaaatttgaaaatagctttgggaaatgtttttaaaatgccaggattttaggggttaaagatcatatggggtagtttaggaagtttgtgactatgagatgaatttgtgaggtttcttgcctaccttttttcccccccagagaagggtggaactagattttaaaggcatctctactctgcttttgctgagtagtttcactgtcccttgagataccattggctatttatacctgagtctagtctaattcacatatatatatattttaaaagttgagagaacatacctattgatgtggttcaataattcatttgtcagggaatatttgatcttaattcctttctaataggtagtgattggatgtattttcctacttcctgtatgtaatctctttatgccatgctagttctaaccagtcccttcttttgaaagcttttctttctctgctttttaaaggaatgatggtgatcagcaggcattatgcagataccacgtgcctgaggttatggaggggaaatgtcacatgactgtatgaaatcattatatgccctattttgtatttattgatgtttctttttgtgggccaaaaatatgtttgtaatatatttagtttttttaaaatcatggtaattgattggaagatttatttttaatagctttgccttttttgcagagtgcaaaatttctaaattataacttatgtcataaagcaaaattatatttggtatcaccataaatttctattctgaatggtgagaacagataatttgaatatttctcacctgtgagtctatattagtaagcttttttattttaatgtactgtaatgaagtggtcacgagtagttacctcggctcaaaaatgtcatttagtttgttaaactattttcacaaccatcataagcataactagataactgtccattcccagcagttcagtttagtctccattgtgtatttaaaggttgtcgcagagcagcacattgacttcctcatcagccctttgacaaggaagggaaagtcgtgggtagtcgatttgaactttttctgtctacttgtcccctcatgttagctgcttgaaattcttcagttatgatacaaagctgagtttgcagtaagttgcacattttattgtttgcaattttctgttttatgtgcatttaaaagcccttctctgctttctagtaaggaggcatgaaattatcaggaatgttgctagttacagcttcacaccaaaaactttgagtaaatacattttcgtttggatgcccatgatgaaagctgaggaaagtggttgaggaattatcaacaacaaacttttcctcttattttatctagttcaaaacagatatcaaagtttgcaatttgctttgctcttgctgtttcttatgagtccctttttggaagagaggagaacatctataagcccagagagatctgtgtttttcttttacttaatagagccattctcgtctattagtaggaactttgctattaatatgtatagaaaggaatgaagtggcttttactccagaaatatgaaaattagtatcttttaaaatagcacttatgctatcacaaggcaatactggaatgaaaaacaaatcttatataaggtcctaaataggtagaaactagcttttattctagtgttgaacccaggagaaatagtggcaaagaagtttcactctgtttctgcagttctttgggactatttataaaggccagttagattgtgttactgtgatttaatttacaaagttgctgcagttaatggatacattctgtgctctgagaatctgaattccattctaatgtgtgatattcactggctatgatcagtagtatctgaagaaaagatgggctttttctcctttactctctctacataattattaatattattttaattaaagtacttaagacattgttttttcttctgtaaaaatggcttagcaatttgcacatctgggtaggttatgtagctagtaaacaactcaatagtaagtagcaattatacttaacccaccaagtgacagactatgcaatggaaaaattttctaattatcgtcacatagcttagacagcaaaggattattttctctggtgacctaccatgtgtgatataactgctttataaatgacttcctgagcaatttcatgttggcaggcagtgtggtgtgtctagtgcccctctatgagaagactataatttaatcagaaacaaatagtaggcatggggagcaagttggaaagtgaggttattattttttttccttaaaattggtgttactgtctttagtggcttgaggctaaagaaagctgatactttatctttgccaaataattatttataagatttatttttaaataagcccaatctctcacctgcagttaagaatcatcattttctgtgactgacactaaagctcttccttatcagagcttgttctcaatctgtgatcacagtccacagtggcaaagacaactctttgattaggaaggaaaccatgtttgggatgcacagaggtgccctgtccatacggttttcttcttacatgaaagaattgacctttctgttgacctataccattctgtttttataaagtgggattagaatttgagcatatctagtaaatgccgtgtggtcagtccgctgatgcttgcccgccgtctttgccgtgccttggcatcctaggggtgctggtgatggtcagtgggcatcatcggtcagcagtgcacgtgtaaggcaatctcctctcctccaggttagttcagaaggtcgctatgggttggtattgcaaaaagatgagtatatgaacactaaacttattaagaggtttgaaattcattaaaaattagttttcagtttcttcatctttcttttcagacttctttaaaaatactgttcttaatctggtatatatagaaatctaatattatggtcttctaaatggtcaacagaactctccagtttaatgaggcaatttagaggattccttgaaagaaaatttcatcatactgaacagtcctcatttgtatctcttttgttaccagtatttacattgttccaaggatttttttcctgacaaaaaatatatttctcgggagtggagagttttttatatatatatatgaaagaacatagatgtttccccccgcccaatacattaactgaatcttcactggcattctgtagaaaagttaaaacagtttaataatgtcttaacatctttatacattttcctatattctggaggaaaccagaatcatgtttagtagattaaagtaacattttaaatactacctttccaataatttgtaataaaataccagtgaaggacatgtttggatatctgttaagcatttttccctgactaatgaattaggaaagaaaacataaaacataaatgaatagttatgtctcttctaataaacagtgtcattaatgctgcagttgtgggtcaaacttagggagccttatttctaaatagcaaaaattctgttttcacttcagcccttatttttttttgttagtttttctctgcactgtgatacagagctaataagaggaaatgtgacgtttcagagagagagcaagcaaattgggtatgacttttttaccctatgttccccaatactggggatgtttggctactttgaacagcagtttttagtgatctaaagtttagatcaatactcgtataagagaaaaatctaactctcagtgagctccatagggcagcacagctttccatcttctctttcgccttcttgcgtctgcccaccacagtcccgaagaatgcacacgcacatatgatctgtacccatcccgcccgaagagtcatagaatcctcttctttcacttgtttcttttttcttcgtttgtttgtttttgtttgtttgttttttaagctggggaccactgaagtaagctctgtatgcacccaaagttccccttggaaaaattttcaacacgcagtgcagaaggctccagtgcagctaaatgccacaccattggttctacctgggggaatagactgatttgccctaaaatgactccaacctgcatcattaaggtacagttggctccagtggattagtgctgaaatgatgggaagtctgacacttgttgacattgtcttcatctgtttggaagggttgaatctgttcctctcaacagtgatagttcttttcactgtatagtattgagtatgtctcagggattccttgtggaaattagggcagtttttaaaataagaaaatagttttaaaagaaactaaaggtgactcatcattgaagagagcggaagaaagaggaaacatttggttttgtagcccacagtgtcttgcataggactttttcctttctcctccaggctctcatctcagcttcagaatacagaatcctttcccatcacgcacagctttaaaacttttatttaaaaatttccttccccaatgagctttcagaatacttattgtagattttaagagaaaaggtatattaatttatgctattaacatcacctcataaattataagttttatactaaagctgtatcgagtgtaatgaattatgttgcctatgtgtttaatagctaaatatatatgagcttttttttttttttttttttttgacaaaacaaactagtgaagcacctttttacactggatctctgccgtgtcaaggtgtatagctatcctttgctaccttgcagatatataaaataaaaggatatcctggggcctcaaaatgtagaacacctttagaccatttataactgttcctagaactgttgagaatcatgttctttagtaaatgatctgtggtttacacttaagatggctagaagcttagttacagggtacatagaaatacatagatcaagtaaaactccaactactgtagctggaatttgtaaactaagtttgtaagacctcttttatttcctatggagttattctttaatttacagtttattctgtaagttgggaagtaaaatagagaaaataataaatctagatgttctcagtgtcttattcaggaactttttatccctcctcactaaggaattcccactgtgactttaaaatagaactaaattacttgtgtgcatgtatatgtctgtattttttacacacatgcaaaaatatacattgggggcacgtgtgtgagagatatgaatgtgtgcttatataaaaatagataaaggtaaccgaatgtattgtagaaacatgatttatttagttgagggtattggagttactttctcattgtctctgttgtataaatacaccaaattaatcattatgttatcttatgttaaaaggctagctctgatatcatgtgcattttatgttaacctttggattaacttatattatgctatgttcataaaatgacatgagaaacaggaggttctaagatcagcctctcactttcgagcataaaaataagagagggagacagacagccccagacatgagctgtgtttatctattgtggtgatgggaccacagatctattgaatcttttttatgttaattatagatttctttatattcgagtaagaaaatattgttgatcatcttttcttggtgaagttaagaaaaagtataggcctttcataaacaatttttggaaggggctgctttgtttaaggagttggtgggatcatttcaccgtgcatatttcaaagctggggtgatttcatttatttccaaaatttttcaaaaaacttttactcagttctgctgttatttattaacttaagagtgctcccatccccatatttcagctataggaaaattgtgctacccctgattcatatggaattaaaaaaaaatacatccctttattttgagttttaagttgttattttgctatacatttattactggagtatctggtggtctgaaatagtcaaaagtagagttggtattaaatgttccaatgacatttatttttaatacttaaaaaatcatgtactttgaaatatgtcaaagcaacttctgataatatacctgaatttgtagttgtctcttgagcatcatttacttcatcttagatatagtgaagatctaggaaagctctatatgctgttcttttctacagttgtatttttgcagcatctcctggtttcattcactcttgttttgggatttttttttagatctgcatatttcttgtacatatgcatgcaaatgaaagaagggagtttgtactggtgccatttctcccttcagttgctggttaatgggatttgctagaaaaaattctcccggttgaagggtgaaaacagacccttatgtgtatatctgtacagagatgtgtatatgggatgtggtggcactttgctgaatgtgaacttgccttgtcaatggaaagattgaaaagtattatgtttatttatacatttgtataaatctatatatacacgtatgtatatgtgtgtgtatagataaagctatatacatatatttcccttaaaaatgtgtgtgtataataggtaaacagcctttgttaagcaagattaatgtctatggaaagttctggattattctgtaagccagaggaggtgacagtctagagtacatcatcagaacatactaaaatggaagtcctttggattatagttttgtttatggatattacacaatgaatgcttgtctgaacagttcttacttgccagttccactattcttcatcttcaccaccttctactggtcagtctttcatcacttaaaaaaaaaaaaaaaatcacacatcattgtggtttttttcccccttaattctgtctcttctagccagaagcatctggcttaagcatatttcatcaacttctctgttatttcttttaaagatctttatctctgaaattttcccagaagatacaagttttggtaatattatcaataggaattttgagacttgggcattcatctttgtctcaaaaacaaacagaaagccaaccttcaaataaaacaaatttgaaagttttagctcaataatttggggacattttacttaaattacaaaagaacataattatgattttatgatcgatattagtgttaggtttatttccacacttactgtcattaatttgtcatttacatatttttatttgctttgtagtttaatcataacttcaccatttacattttaatggaaagcatacaaggtcacatgttagcctcttgaattctgtaactaactcatttttctcatgatgaaactgctttgatgaattcctgtgtgatgaattctgctatatttccttttgacttttctcagtttgtgacattctgtattaactttgctgcagctctctagaaaacttgcatccctatatattgtgcctttaaagctcttatgcacacacagacaaaagtgtatatatacatgtcagagcatgtgtacatatgctttcgtatgtactcacacagtatgtctctagtatatattgtgggagtagatatatagatattcaaaggcaatgaaatattgctctccagatatatatgtatataaatagtgttgatataactgtatatacacatgtatatgtatgagttttaaatggcaatcttttacatttagcaaaatgctgcccctactggaatattgtcactgcagtggcagttgtatgtaatgatttaaaatacattatcaaaagttatttaaagaacatttaaagtctcatctaaagacatccacacactatttatttatcttccttttccttttattgttgtgtttttcttaactgaaagggagactgtcattttaaaaatgccatctgtcccatgagagtaagaaagagctggagattcacttgaggagctttgtgcatttttcctctctctgaagtggagatgttccacagaccagactgtttatttcacttataaagcaatcctaatatttccgttagtgtatgtcagccaccatctcctagatcaacttaattcaccaatttgcctcctcctttcattaataaataatgattattgagatcattttgcctgggggaagttaactactcccatgctgcagggaaatatatcacctaattgttattttgccttgttcaaaattcaaatttgaaagaaggcagctctctcatgaagctgtcttaagcacattttagttaagggccctcccaaactcttttttctttctttctttctttcttttttttttttttttgcgagttccaagttgcatgtgcttgaaatagatttaattcttattccccacagtttaggtatttttcattagtacatcaatttgacacactgaatgcaagactattaaggaagaacgattaaatattattttattttgtgaagagttggcagcagattacatctcaagaacttgcagagagaggaaggtagatggacaatcctaaattgtaagatgttacaaaaaacagtgaagtaagagtactcctgaagactaaaatagagaggctggggtttgagccattttactgagtagcttagctggaacctgatatcagaagtagcctttaacaaaaagcctcttggcaattgtatggtactaacaactagagtactgaagtgtaagttgaaaccaagttgcagtgggaaatcaaaggtgaggtagcttatttgaaaccagcaaatgagacaggttggacagttttaaaatctcttctaacaaagaaactgcacggtagcaaggactagcggttctcaaagcccttctttttcagtgttctcattcaccttggcacccaagtatgtttaacaggccatgcattaaaaataaatacaaaaatataaaagccgcttaaagggaacttacaaactgacaatctctcctctgtatttgtgttcatagtggctgggagtttaattatatgcacaaaagttaggagccacttgtttctgcacagactgtaggagcaagatgaggagatgggcaggttttggtaagagcccccagttctggtggacaggcatacttgtggcattgggtgcggcattgctgggaggaccacgtcttgggaggcgattgacttttggtttgtaatttccctttaaacaagaagagatggctcacattttccatatatatctcaatgaatgtactgtattactgttttaaaaatttgatgaaataataatgaattggtctccttttgttatctggtccttgtttaatttgtttaagggtttttgtatacaaaagtttacatttttatgtatatttttcttgtgtaaaaactgatgtaatatgtgtatgaaacactgtatgtattatctgtatatagtgtgacaaaatcatttttctttctttcttttggatgtattaataaatcttgctgtgaagta

SEQ ID NO: 967 - DNA, 4642 bp, HOMO SAPIENS
gagaccggtgacccgcggctgggcgcctcggccatgactgcggagctgcagcaggacgacgcggccggcgcggcagacggccacggctcgagctgccaaatgctgttaaatcaactgagagaaatcacaggcattcaggacccttcctttctccatgaagctctgaaggccagtaatggtgacattactcaggcagtcagccttctcactgatgagagagttaaggagcccagtcaagacactgttgctacagaaccatctgaagtagaggggagtgctgccaacaaggaagtattagcaaaagttatagaccttactcatgataacaaagatgatcttcaggctgccattgctttgagtctactggagtctcccaaaattcaagctgatggaagagatcttaacaggatgcatgaagcaacctctgcagaaactaaacgctcaaagagaaaacgctgtgaagtctggggagaaaaccccaatcccaatgactggaggagagttgatggttggccagttgggctgaaaaatgttggcaatacatgttggtttagtgctgttattcagtctctctttcaattgcctgaatttcgaagacttgttctcagttatagtctgccacaaaatgtacttgaaaattgtcgaagtcatacagaaaagagaaatatcatgtttatgcaagagcttcagtatttgtttgctctaatgatgggatcaaatagaaaatttgtagacccgtctgcagccctggatctattaaagggagcattccgatcatctgaggaacagcagcaagatgtgagtgaattcacacacaagctcctggattggctagaggacgcattccagctagctgttaatgttaacagtcccaggaacaaatctgaaaatccaatggtgcagctgttctatggtactttcctgactgaaggggttcgtgaaggaaaacccttttgtaacaatgagaccttcggccagtatcctcttcaggtaaacggttatcgcaacttagacgagtgtttggaaggggccatggtggagggtgatgttgagcttcttccctccgatcactcggtgaagtatggacaagagcgttggtttacaaagctacctccagtgttgacctttgaactctcaagatttgagtttaatcagtcccttgggcagccagagaaaattcacaataagctggaatttcctcagattatttatatggacaggtacatgtacaggagcaaggagcttattcgaaataagagagagtgtattcgaaagttgaaggaggaaataaaaattctgcagcaaaaattggaaaggtatgtgaaatatggctcaggcccagctcggttcccgctcccggacatgctgaaatatgttattgaatttgctagtacaaaacctgcctcagaaagctgtccacctgaaagtgacacacatatgacattaccactttcttcagtgcactgctcggtttctgaccagacatccaaggaaagtacaagtacagaaagctcttctcaggatgttgaaagtaccttttcttctcctgaagattctttacccaagtctaaaccactgacatcttctcggtcttccatggaaatgccttcacagccagctccacgaacagtcacagatgaggagataaattttgttaagacctgtcttcagagatggaggagtgagattgaacaagatatacaagatttaaagacttgtattgcaagtactactcagactattgaacagatgtactgcgatcctctccttcgtcaggtgccttatcgcttgcatgcagttcttgttcatgaaggacaagcaaatgctggacactattgggcctatatctataatcaaccccgacagagctggctcaagtacaatgacatctctgttactgaatcttcctgggaagaagttgaaagagattcctatggaggcctgagaaatgttagtgcttactgtctgatgtacattaatgacaaactaccctacttcaatgcagaggcagccccaactgaatcagatcaaatgtcagaagtggaagccctatctgtggaactcaagcattacattcaggaggataactggcggtttgagcaggaagtagaggagtgggaagaagagcagtcttgcaaaatccctcaaatggagtcctccaccaactcctcatcacaggactactctacatcacaagagccttcagtagcctcttctcatggggttcgctgcttgtcgtctgagcatgctgtgattgtaaaggagcaaactgcccaggctattgcaaacacagcccgtgcctatgagaagagcggtgtagaagcggcactgagtgaggtgatgctgagccctgccatgcaaggggtcatcctggccatagctaaagcccgtcagacctttgaccgagatgggtctgaagcagggctgattaaggcattccatgaagaatactccaggctctatcagcttgccaaagagacccccacctctcacagtgatcctcgacttcagcatgtccttgtctactttttccaaaatgaagcacccaaaagggtagtagaacgaacccttctggaacagtttgcagataaaaatcttagctatgatgaaagatcaatcagcattatgaaggtggctcaagcgaaactgaaggaaattggtccagatgacatgaatatggaagagtacaagaagtggcatgaagattatagtttgttccgaaaagtgtctgtgtatctcctaacaggcctagaactctatcaaaaaggaaagtaccaagaggcactttcctacctggtatatgcctaccagagcaatgctgccctgctgatgaaggggccccgccggggggtcaaagaatccgtgattgctttataccgaagaaaatgccttctggagctgaatgccaaagcagcttctctttttgaaacaaatgatgatcactccgtaactgagggcattaatgtgatgaatgaactgatcatcccctgcattcaccttatcattaataatgacatttccaaggatgatctggatgccattgaggtcatgagaaaccattggtgctcttaccttgggcaagatattgcagaaaatctgcagctgtgcctaggggagtttctacccagacttctagatccttctgcagaaatcatcgtcttgaaagagcctccaactattcgacccaattctccctatgacctatgtagccgatttgcagctgtcatggagtcaattcagggagtttcaactgtgacagtgaaataagctcccacatgttcaaggcccattctggttcctggctgcctgcctcttgcacagaagttcgttgtcatagtgctcaccttgggaaaaggattaggtgggcacataagattccgatcagaccccaaccatgctgcatgtgtaaagaaggattgaaaataaaattgcactttttaggtacaaaatcataaaagctgtttcactagaaaaggcagaaagcagtgtattaaggtgttgaattacgccagaagacctgaaatgccttgtacctacaacaatgcttaggcttttctaagcctcttgccacttttaaaattatccttcaggcataaatatttttgacagcagaatagaagaatgattcatgagaacctgaaccagatgaacagctactagttattttatcaaatacagatgacatttaaaaattcttaactacaagagattagaaatataaaccttgcctggctcttgccaggagataacaaaatgggttgctgatgaactgcacccttttacatgtgggtagaatataagctcacatggcagtgagatgttgaaaagtcaaaagagacctgtctctctcctttcttttctatctttaaaccagaaaacctcatactcagtcctcagtgaaagaaagtaaagtattaaggactttagacagaagagcattgtgtaacttgactgaagatcatccattaatagttattaggcatttaggtaaaattttctaatacctaaaaattgtcaaaaacagtcaatagggctactgctggcccaaagaccatttaggtccacctcctcttttttgctctttttttttttctgtgacagtttcactgtgtcgcccaggctggcgttcagtggtgcaatctcagctcactgcaaactctgtctcctgggctcaagtgattctcgtgcctcagcctcccgaatagctggaattacgggcatgcaccaccacacctggctaatttttgtatttttaatagagatggggtttcaccatattggccaggctgatctctaactcctggcctcaagtgatctatctgcctccctcagcctcccaaagtctgggattgcagacaagtcatcgtacccggccttcttttttgcccttaaaagtaagggatgtgggtttgtacaaaaaaaaaaaaaaaaaaaaaaaaaccagcatacatatgcaaaactatatatatatgtatatgtagagaaaaatacttcccattgatcatttttaaaaggcttctgattggatattgtgttttaaccaaattttaaagattaatggaatcatgaaagggaaaaaaattgatacaactatgcagattttataaatgtgcaataaaagtatttgttttaaaaaaaaaaa

SEQ ID NO: 968 - DNA, 9734 bp, HOMO SAPIENS
gctgctgctgcctctccgaagagctcgcggagctccccagaggcggtggtccccgtgcttgtctggatgcggctctgagtctccgtgtgtctttctgcttgttgctgtgtgcgggtgttcggccgcgatcacctttgtgtgtcttctgtctgtttaaacctcaggatggctcgcttcggggaggcggtggtcgccaggccagggtccggcgatggagactcggaccagagcaggaaccggcaaggaacccccgtgccggcctcggggcaggcggccgcctacaagcagacgaaagcacagagggcgcggactatggctttgtacaaccccattcccgtccggcagaactgtttcaccgtcaacagatccctgttcatcttcggagaagataacattgtcaggaaatatgccaagaagctcatcgattggccgccatttgagtacatgatcctggccaccatcattgccaactgcatcgtcctggccctggagcagcatcttcctgaggatgacaagacccccatgtcccgaagactggagaagacagaaccttatttcattgggatcttttgctttgaagctgggatcaaaattgtggccctggggttcatcttccataagggctcttacctccgcaatggctggaatgtcatggacttcatcgtggtcctcagtggcatcctggccactgcaggaacccacttcaatactcacgtggacctgaggaccctccgggctgtgcgtgtcctgcggcctttgaagctcgtgtcagggatacctagcctgcagattgtgttgaagtccatcatgaaggccatggtacctcttctgcagattggccttctgctcttctttgccatcctgatgtttgctatcattggtttggagttctacagtggcaagttacatcgagcatgcttcatgaacaattcaggtattctagaaggatttgacccccctcacccatgtggtgtgcagggctgcccagctggttatgaatgcaaggactggatcggccccaatgatgggatcacccagtttgataacatcctttttgctgtgctgactgtcttccagtgcatcaccatggaagggtggaccactgtgctgtacaataccaatgatgccttaggagccacctggaattggctgtacttcatccccctcatcatcattggatccttctttgttctcaacctagtcctgggagtgctttccggggaatttgccaaagagagagagagagtggagaaccgaagggctttcatgaagctgcggcgccagcagcagattgagcgtgagctgaatggctaccgtgcctggatagacaaagcagaggaagtcatgctcgctgaagaaaataaaaatgctggaacatccgccttagaagtgcttcgaagggcaaccatcaagaggagccggacagaggccatgactcgagactccagtgatgagcactgtgttgatatctcctctgtgggcacacctctggcccgagccagtatcaaaagtgcaaaggtagacggggtctcttatttccggcacaaggaaaggcttctgcgcatctccattcgccacatggttaaatcccaggtgttttactggattgtgctgagccttgtggcactcaacactgcctgtgtggccattgtccatcacaaccagccccagtggctcacccacctcctctactatgcagaatttctgtttctgggactcttcctcttggagatgtccctgaagatgtatggcatggggcctcgcctttattttcactcttcattcaactgctttgattttggggtcacagtgggcagtatctttgaagtggtctgggcaatcttcagacctggtacgtcttttggaatcagtgtcttgcgagccctccggcttctaagaatatttaaaataaccaagtattgggcttccctacggaatttggtggtctccttgatgagctcaatgaagtctatcatcagtttgcttttcctcctcttcctcttcatcgttgtctttgctctcctaggaatgcagttatttggaggcaggtttaactttaatgatgggactccttcggcaaattttgataccttccctgcagccatcatgactgtgttccagatcctgacgggtgaggactggaatgaggtgatgtacaatgggatccgctcccagggtggggtcagctcaggcatgtggtctgccatctacttcattgtgctcaccttgtttggcaactacacgctactgaatgtgttcttggctatcgctgtggataatctcgccaacgcccaggaactgaccaaggatgaacaggaggaagaagaggccttcaaccagaaacatgcactgcagaaggccaaggaggtcagcccgatgtctgcacccaacatgccttcgatcgaaagagacagaaggagaagacaccacatgtcgatgtgggagccacgcagcagccacctgagggagcggaggcgccggcaccacatgtccgtgtgggagcagcgtaccagccagctgaggaagcacatgcagatgtccagccaggaggccctcaacagagaggaggcgccgaccatgaacccgctcaaccccctcaacccgctcagctccctcaacccgctcaatgcccaccccagcctttatcggcgacccagggccattgagggcctggccctgggcctggccctggagaagttcgaggaggagcgcatcagccgtggggggtccctcaagggggatggaggggaccgatccagtgccctggacaaccagaggacccctttgtccctgggccagcgggagccaccatggctggccaggccctgtcatggaaactgtgacccgactcagcaggaggcagggggaggagaggctgtggtgacctttgaggaccgggccaggcacaggcagagccaacggcgcagccggcatcgccgcgtcaggacagaaggcaaggagtcctcttcagcctcccggagcaggtctgccagccaggaacgcagtctggatgaagccatgcccactgaaggggagaaggaccatgagctcaggggcaaccatggtgccaaggagccaacgatccaagaagagagagcccaggatttaaggaggaccaacagtctgatggtgtccagaggctccgggctggcaggaggccttgatgaggctgacacccccctagtcctgccccatcctgagctggaagtggggaagcacgtggtgctgacggagcaggagccagaaggcagcagtgagcaggccctgctggggaatgtgcagctagacatgggccgggtcatcagccagagcgagcctgacctctcctgcatcacggccaacacggacaaggccaccaccgagagcaccagcgtcaccgtcgccatccccgacgtggaccccttggtggactcaaccgtggtgcacattagcaacaagacggatggggaagccagtcccttgaaggaggcagagatcagagaggatgaggaggaggtggagaagaagaagcagaagaaggagaagcgtgagacaggcaaagccatggtgccccacagctcaatgttcatcttcagcaccaccaacccgatccggagggcctgccactacatcgtgaacctgcgctactttgagatgtgcatcctcctggtgattgcagccagcagcatcgccctggcggcagaggaccccgtcctgaccaactcggagcgcaacaaagtcctgaggtattttgactatgtgttcacgggcgtgttcacctttgagatggttataaagatgatagaccaaggcttgatcctgcaggatgggtcctacttccgagacttgtggaacatcctggactttgtggtggtcgttggcgcattggtggcctttgctctggcgaacgctttgggaaccaacaaaggacgggacatcaagaccatcaagtctctgcgggtgctccgagttctaaggccactgaaaaccatcaagcgcttgcccaagctcaaggccgtcttcgactgcgtagtgacctccttgaagaatgtcttcaacatactcattgtgtacaagctcttcatgttcatctttgctgtcatcgcagttcagctcttcaagggaaagttcttttattgcacggacagttccaaggacacagagaaggagtgcataggcaactatgtagatcatgagaaaaacaagatggaggtgaagggccgggaatggaagcgccatgaattccactacgacaacattatctgggccctgctgaccctcttcaccgtctccacaggggaaggatggcctcaagttctgcagcactctgtagatgtgacagaggaagaccgaggcccaagccgcagcaaccgcatggagatgtctatcttttatgtagtctactttgtggtcttccccttcttctttgtcaatatctttgtggctctcatcatcatcaccttccaggagcaaggggataagatgatggaggagtgcagcctggagaagaatgagagggcgtgcatcgacttcgccatcagcgccaaacctctcacccgctacatgccgcagaacagacacaccttccagtaccgcgtgtggcactttgtggtgtctccgtcctttgagtacaccattatggccatgatcgccttgaatactgttgtgctgatgatgaagtattattctgctccctgtacctatgagctggccctgaagtacctgaatatcgccttcaccatggtgttttccctggaatgtgtcctgaaggtcatcgcttttggctttttgaactatttccgagacacctggaatatctttgacttcatcaccgtgattggcagtatcacagaaattatcctgacagacagcaagctggtgaacaccagtggcttcaatatgagctttctgaagctcttccgagctgcccgcctcataaagctcctgcgtcagggctataccatacgcattttgctgtggacctttgtgcagtcctttaaggccctcccttatgtctgccttttaattgccatgcttttcttcatttatgccatcattgggatgcaggtatttggaaacataaaattagacgaggagagtcacatcaaccggcacaacaacttccggagtttctttgggtccctaatgctactcttcaggagtgccacaggtgaggcctggcaggagattatgctgtcatgccttggggagaagggctgtgagcctgacaccaccgcaccatcagggcagaacgagaacgaacgctgcggcaccgatctggcctacgtgtactttgtctccttcatcttcttctgctccttcttgatgctcaacctgtttgtggccgtcatcatggacaactttgagtacctgactcgggactcctccatcctggggcctcaccacttggacgagtttgtccgcgtctgggcagaatatgaccgagcagcatgtggccgcatccattacactgagatgtatgaaatgctgactctcatgtcacctccgctaggcctcggcaagagatgtccctccaaagtggcatataagaggttggtcctgatgaacatgccagtagctgaggacatgacggtccacttcacctccacacttatggctctgatccggacagctctggacattaaaattgccaaaggtggtgcagacaggcagcagctagactcagagctacaaaaggagaccctagccatctggcctcacctatcccagaagatgctggatctgcttgtgcccatgcccaaagcctctgacctgactgtgggcaaaatctatgcagcaatgatgatcatggactactataagcagagtaaggtgaagaagcagaggcagcagctggaggaacagaaaaatgcccccatgttccagcgcatggagccttcatctctgcctcaggagatcattgctaatgccaaagccctgccttacctccagcaggaccccgtttcaggcctgagtggccggagtggatacccttcgatgagtccactctctccccaggatatattccagttggcttgtatggaccccgccgatgacggacagttccaagaacggcagtctctggtggtgacagaccctagctccatgagacgttcattttccactattcgggataagcgttcaaattcctcgtggttggaggaattctccatggagcgaagcagtgaaaatacctacaagtcccgtcgccggagttaccactcctccttgcggctgtcagcccaccgcctgaactctgattcaggccacaagtctgacactcaccgctcagggggcagggagcggggacgatcaaaagagcgaaagcatcttctctctcctgatgtctcccgctgcaattcagaagagcgagggacccaggctgactgggagtccccagagcgccgtcaatccaggtcacccagtgagggcaggtcacagacgcccaacagacagggcacaggttccctaagtgagagctccatcccctctgtctctgacaccagcaccccaagaagaagtcgtcggcagctcccacccgtcccgccaaagccccggcccctcctttcctacagctccctgattcgacacgcgggcagcatctctccacctgctgatggaagcgaggagggctccccgctgacctcccaagctctggagagcaacaatgcttgcctgaccgagtcttccaactctccgcacccccagcagagccaacatgcctccccacagcgctacatctccgagccctacttggccctgcacgaagactcccacgcctcagactgtggtgaggaggagacgctcactttcgaagcagccgtggctactagcctgggccgttccaacaccatcggctcagccccacccctgcggcatagctggcagatgcccaacgggcactatcggcggcggaggcgcggggggcctgggccaggcatgatgtgtggggctgtcaacaacctgctaagtgacacggaagaagatgacaaatgctagaggctgctcccccctccgatgcatgctcttctctcacatggagaaaaccaagacagaattgggaagccagtgcggcccgggggggaggaagagggaaaaggaagatggaaggacaccatgcattatcagagaagaggaagtaaaggacaatcagaacaccagtcaaacccaccaaattgctttattcccctttgcaagatgggcactgccatagttctgcctctttgctggggaaagaaaccaggaacgtggagggttattactgcgggagaagggacacgaggatggctttgcttccccttgccccttcccacttttctaaaagctgtggagggatctagctggcctatgtctacactcagtgccctgagaagcctggaagactttctggctcttaactggggagtagtggagaccataggagaggactctcctccctcaccagctcttacgcctcagccagcaccactgccaccagggcaactgcagcagcatctcatgcataaccctgtggcttgcttcccccagggcagcacaggctaagtcaggaacatcggatgccagggagggaggagaaagccgaagcgaaaggggtcagggtgctgaggcaacagcagcaagggctggtctggacaagaaaagccatagcccggcagcccctaccatgagggagacagagaaacagaactggtggtgctggggggtatagccccccatccttgaggcctgtcacccacacagtaggtgctgagagttaggacaggtcaggaagtcccccagggtccacaaaggtgcctgaggctctggtaagggtgaagataaaagtatttaacaaccgctatggcatcaatgtaagtggagtttggtcctagtgccggagcccatgctattccaggcattggctctttagatgccagtcatgggggaaccctgagggtgtgggtagagtagcaggggccacctaagagattaaaaacagtctgttttccaaccagtgtggaagcaattaaatatgcgtaacagtgctacggccacaccagcacctcctggctgaaggtcagcccacactctggtccatgaggcagcaaggccagtgctgtgccaagcccggtaaggccaagtgccgaggcccagccttccctgccactcctctgagagggcagaacacacatatccaagtaggctacccaccactgggtagggatttctgtaaagatgggaaaggctgatagattgaaataagcttctgtgaaagtctggatttactgaggacctcccctgaggagggaccgttgggaccgcagattctgcagctggtgtggggttcaggtcagtttgtcaggatgctttaaggtgattagtaaatatacctcagcttagacttgggctgctccttctagcaaagcaggctccagtggggcctcatcatacaggatgacaagactggggccctgttcaccttgaacatgcccctgggccaagatggggcttcacccctccccagagtaagagctggggctgacagtcccaccctgtcattcctaatagcccaaacgcagaagcactgagcaagagagccctttcttgccaagccagtgctcttttggtatatggcatacagctccattggaggggacacatcactggctttatctggtggaaatgtacctttcccttaagttcctccttagtgccatcacagcaggtgaatgggtgccctacggggccctccttcccccaccaggaacagatggaacctgccacccaggatcctgatctgccctgcactgagcactcagtggataaacactcctccagcccagacacactcctcctcttgggcaggagcaatccagagttgttatttttcttagaaggagcctcttttccctctattttttaaattgaaatataatagctgcatcagccctgaaaagccaaattcaaccacatggctggagaatcatttgtcatggccccgccttctcttctgatactaatggagcttcatgacccacggtcagcccccaaaccaaagttgtcccaacagaggaggccagtgaggcagagacagagctctcccactctcagaccctcttttgtcttcattttcctctcccacttagcacatgtgtgcttgagggtggctgggaatgtgatatacagcaccctgatcctaacaggtgtgattgttacgtaagacgctgatactgggccttgtattgcttttaaagtttcctctgctcagcatcatttcatgccaaagtgctgctatgggctgctttgtgtgcacaaaattgctttttccacctcggaaatgcagctttccctagggggaggcctacaacaggacgaccattctgagccagtgagtctattgcatggtgttttgagaaagggaattttagtgacaccttatgccatttcaagaggagaaatgcaggctggcagagcaatttccagaaatggaatttgcctgcaaatagtataaacaacactaaatttactgtgccaggaaatcttcctgaactccttgaactcatacacacaggtatttgagtcctgaataaagtgttggaaagcactgcagatgcggtcacctgactgaccacctgggttttctattaccagtgaatttcttttattcaccttcccttgaccaagaaattgggtttcttttccctcagcctgcacttactcttctattaagaccagaaaataaaataattttccgttgagtcacaaaaaaaaaaaaa

SEQ ID NO: 969 - DNA, 2129 bp, HOMO SAPIENS
tttccgcattgaaggggctgctccgaatggagggggaggggaggtgtttaggagaaagtaggggctgtgggtgtcgggagccggctgacgggtggacaagggggggttagcagctgggctgcgaccgttagggaggggctcaaggtgtgcatgtgtgagggaagagagagagagagaagggcgcctcagaggtgactttcagcctgcgagccttcttcccggggcgccataaacgcccccaatttcccagctgctaaaggaagaggaagatcttagcaaagcaatgtctcaagatggtgcttctcagttccaagaagtcattcggcaagagctagaattatctgtgaagaaggaactagaaaaaatactcaccacagcatcatcacatgaatttgagcacaccaaaaaagacctggatggatttcggaagctatttcatagatttttgcaagaaaaggggccttctgtggattggggaaaaatccagagaccccctgaagattcgattcaaccctatgaaaagataaaggccaggggcttgcctgataatatatcttccgtgttgaacaaactagtggtggtgaaactcaatggtggtttgggaaccagcatgggctgcaaaggccctaaaagtctgattggtgtgaggaatgagaatacctttctggatctgactgttcagcaaattgaacatttgaataaaacctacaatacagatgttcctcttgttttaatgaactcttttaacacggatgaagataccaaaaaaatactacagaagtacaatcattgtcgtgtgaaaatctacactttcaatcaaagcaggtacccgaggattaataaagaatctttacttcctgtagcaaaggacgtgtcttactcaggggaaaatacagaagcttggtaccctccaggtcatggtgatatttacgccagtttctacaactctggattgcttgatacctttataggagaaggcaaagagtatatttttgtgtctaacatagataatctgggtgccacagtggatctgtatattcttaatcatctaatgaacccacccaatggaaaacgctgtgaatttgtcatggaagtcacaaataaaacacgtgcagatgtaaagggcgggacactcactcaatatgaaggcaaactgagactggtggaaattgctcaagtgccaaaagcacatgtagacgagttcaagtctgtatcaaagttcaaaatatttaatacaaacaacctatggatttctcttgcagcagttaaaagactgcaggagcaaaatgccattgacatggaaatcattgtgaatgcaaagactttggatggaggcctgaatgtcattcaattagaaactgcagtaggggctgccatcaaaagttttgagaattctctaggtattaatgtgccaaggagccgttttctgcctgtcaaaaccacatcagatctcttgctggtgatgtcaaacctctatagtcttaatgcaggatctctgacaatgagtgaaaagcgggaatttcctacagtgcccttggttaaattaggcagttcttttacgaaggttcaagattatctaagaagatttgaaagtataccagatatgcttgaattggatcacctcacagtttcaggagatgtgacatttggaaaaaatgtttcattaaagggaacggttatcatcattgcaaatcatggtgacagaattgatatcccacctggagcagtattagagaacaagattgtgtctggaaaccttcgcatcttggaccactgaaatgaaaaatactgtggacacttaaataatgggctagtttcttacaatgaaatgttctctaggattctaaaataggcaggtactttactatgttactgtaccctgcagtgttgatttttaaaatagagttttctgcagtatgcttttagtctaagaaaagcacagatggagcaatactttccttctttgaagagaatcccaaaagttagttcatcttaaagtgcaatattgtttaatcttaaaactgggcaactttggaagaacttttaacagaagcctcaatgatgatcactttgaattgcttgtgatttcaaaaataaagcagtgaagcaataaaaaaaaaaaaaaaaaa

SEQ ID NO: 970 - DNA, 8327 bp, HOMO SAPIENS
gacaccaggagtcatgtgatgtcaagatggcggcgccgcggtagcaggatccgggttgtggcgtcctaggagccgcgacggtttctgccctcgggcagtgaggggcagcagcgcttggctgacccctgcggcgtcccgtagcctcgcgttaagccttgttcagagcgggggcttttgctgtcgcagtgggttccggagagtgcaggtgatttcgcagcaggtttcttgtgctggccgcgctcgccggacgaagaagagaagggcagttgggcctgcggccttggcgttcatgaggcctcagagagctccggaggagctacaactgtgagggggctgctagagttcttctcctcgggtgtgtgagaagcagcctaggaccccgggttcggggagtcgcaaagaaggccgtaagggcttcacttccttctccggaggcctgccttctgcgcgtcgattaacaccgcattctttcccacttcctctcaatgttttcttcatatatctggaaatatgatcagcgcccctgacgtagtggccttcaccaaagaggaagagtatgaagaagagccttacaatgagccggccctgcctgaggagtactcggtgccgctcttccccttcgccagtcagggtgctaacccctggtcaaaactgtccggggccaagttttcgagggacttcattcttatttccgagttctctgagcaggtgggaccccaacccttactgaccatccccaatgacaccaaagtttttggcacttttgatctcaattacttctccctgcgtatcatgtctgtggattaccaggcttccttcgtgggccatcctcctggatctgcctaccccaagctgaacttcgtggaggactccaaggtggtgctgggagattctaaggagggcgcctttgcatacgtgcaccaccttaccctatacgacctggaggcccgtggcttcgtgaggccgttttgcatggcttatatctctgcagaccagcataaaatcatgcagcagttccaggagctttcagccgaattttccagagcttctgagtgcttgaagactggcaacaggaaggcatttgctggggaacttgaaaaaaagctgaaagacttggattacaccaggacagtgctacacacagaaacggagatccagaagaaagccaacgacaaaggcttttactcatctcaggcaattgagaaagccaatgaactggccagtgtggagaagtccatcattgaacatcaagacctgctgaagcagatccgctcataccctcatcggaagttgaaggggcatgatttgtgtcctggtgagatggagcacatccaggatcaggccagccaggcatccactacctctaaccctgatgagtctgccgacacagacctttacacctgcagaccagcctacaccccaaaacttatcaaagcaaagtccaccaagtgttttgacaagaagttgaagaccttggaggagctctgtgacactgaatatttcacccagaccctggctcagctcagccacattgaacacatgttcagaggagacctgtgttacctcctgaccagtcagattgatagagcacttctaaaacaacagcatataacaaactttctctttgaagactttgtggaggtcgatgacaggatggtggagaaacaagaaagcataccctctaagcccagtcaagacaggccgccttccagttctctagaagaatgcccaattcctaaagtgttaattagtgttggttcttacaagtccagtgtggagtctgtgttgatcaagatggagcaggaactgggagatgaggagtacaaggaagtggaagtgactgagttgagcagtttcgacccccaggaaaacttggactacctggatatggatatgaaagggagtatcagcagtggtgaaagtattgaagttttgggcacggagaaatccacctccgtgctttctaaatctgacagccaggcaagcctcacagtaccattgagcccccaggtggtccggagcaaagcagtcagccacaggaccatcagcgaggacagtattgaagtcctcagtacctgcccctctgaggccctcatccctgatgactttaaggccagctacccaagtgccattaatgaagaagaatcatatccagatggcaatgaaggagccatccgcttccaggcaagcatcagtcctccagaactgggtgagacagaggaaggcagcatagaaaacaccccatcacaaatagactcctcctgctgtattgggaaggagagcgatggtcagttggtgctgccctccactccagcccacacacactctgacgaggatggggtggtgagcagccccccacagcgccacaggcagaaggaccaggggttccgtgtagacttttcagtggaaaatgccaacccttcttcccgagacaacagttgtgaagggtttcccgcttatgagctggacccgagccacctgctggctagccgggacatcagtaagaccagcctggacaactactcagacaccaccagctacgtgagcagtgtagcgtccaccagctcagacaggatcccctctgcttatcctgctggcctgtcttccgataggcataaaaagagggctggccagaacgccttaaaattcatccgccagtacccctttgcccacccagccatctactccctgctcagtgggaggacacttgtggtcctgggggaagatgaggccatagtcaggaaactcgtgactgcactggctatctttgtccccagctatggctgctacgctaagcccgtgaaacattgggcctcctcccctttgcacattatggattttcagaagtggaagcttattggcttgcagagagtggcctcccctgccggtgccggtaccctccatgccctgagccgctacagccgctacacgagcatcctggaccttgacaacaaaaccctgcgctgccccctttacagaggcaccctggtgccccgcctggcagaccaccgcacacagatcaagcggggcagcacctactacctgcatgtccagagcatgctcacccagctctgctccaaggccttcctctacaccttctgccaccacctgcacctgcctacccacgacaaggagacagaggagctggtagccagccgccagatgagcttcctaaagctgaccctgggtctggtgaatgaggatgttagggtggtccagtacctggctgagctgctgaagctgcactacatgcaggaatctccagggaccagccaccccatgctcaggtttgactatgtccccagctttttgtataaaatctgaggtcggtcccagacactgtgaccaagacctgtgactcagggtatggggaggggaggggttggcatgaccaaacagttgcctgagctggactgtttaagtttctggtgtctggcagcatggttcccacgtggctcctagtagtttttaagttggacatgggcagaagtggagcctggctccctctaaaggcgtctggagggatggtgacagctacatttggctccctggtgaagagtggcccctggatatggagggggccttggttttctgaggactggcagccagggcagaagggaagccaccagtcccttggtggggcagggtgagggcaggaaggccaaagcctgatgggaggagcacactggctgtattcagcattgccggacacttgagtggcaaaatgaacgagggtgacagccaggtaactgttgtggtttggtggaaaacaggagggcagaacacccatcgcctccttcagacccagatgcagccctttatttgcttcctggagcccactgtcctaggggaggccctggaccagccagtgggggtgagaaaggctgccaccctctgggtcgtgggaaacatgcgaccttggcctcagggccacagagcgtgagcagcaccctgtccgctgtcctcgccacctttacctgggagagaagtgcctgtgagcgggccttgggactcactccccatactctttcaccaggaacgagcagagtgttcactagtcctagtgtgaagcgggcacaagtgaccaaagccaatggtgaggaccaccttgggggctggagagcacagcaggcagagcagggctgaggcgccatgaggccatcaccaccatgcaagggaggagcagccagcagctctcctgggtggcccactggctcctgccggccagagcgcatgagcactgaccttcctcgtggggaaggtctgcagacccgtgtgaacatggcagaggccacactccagctcccacccacataaacctttgcaaccacttcactacctctcactgggtctcgtgggcttgggacagcaacggttctgtttagtcagctggtgcaggtggttggcccagccgatgagaactcaaatagcacggatttcctggatgagctaccacgtggcgctcttcaggttctgcctctgggaggctgtgtgcacctcagtcaccacagctcacggccgtccccagttgagtcccccttctgaggacaagtttgaaactgggaaggagacaccccctggttccgccagcacctatcccactgatagtgatcccctggcctccccgagcctccttaggcaatggccactggtttgtagacagagagtttcttgcagccttgaaaattttattccctaagtggggacagctctggtattactgcttctttaatttgttccacaaaaattatgctgaaatggacctgaatcagccctgggtgtgcttctgttggcgcctgctgctgaggcccggcctgcccatcggcctgtagtacgccatcgaggtcatcatggagccagccagcttctcttctcatcaaggaggcagagacccctggtggaagccaagagtgaccgaagagggcttgcatcacgtcactccagtggttccctccttgtccaagtcctcgttttaagggcatggcccgttggctccagccgttggcttctgttcagggtccttgctcccatcagaggtgtttgattttgctcctggggctgcgatggagaaccttttgtggcagatggtgctgcctacatctcattggttctctgtacctgtgcccgttgcgcatgttcacagacaggagagtcgccagcaataccttggcagcctttaaatgtgaaacgtctgttacttgcgctggaggcagaggctgtgcagggagcctgcttctaatcgtgggctcccttatctgttacggttccctcccctcctgttctagatgctgattcgttttctcactggctggttaattgctgtctacttaggcctccaaggccataactgtgcaacattttatctgagaaggaaggaaggtcagaaagtgatcactggcaccaccactgtggcattcctgtcacaccaacacagaaattcacagctcatactgttctcacctgggaaacttgggaagggctgatgagtttggggcagatcctgaattgcagccacacttggccttctagaagctgaagttgtgccctcaagtggtcctaagtagaagtccacttgaggtatttgctggcacacaccctcaagggtggttcagaaggtcctgaaacctaaggcaaaaggctgctggggcatgaacagaacagaccgtctcaggggcagccatgtaagtggcaagcagggctggtctccctcaaggtggttcttcattaagtaaagatggcttcgtgactagtgtttagctcccagatttatatttgggttaaaaactaacttttcaatgtggcagtttcaaaggattacttgatgcaaagtatgtttcctttcaaagggatcttgacgtggtaccaggactgagtcatgatttgggcagaggcagttaacactgggaagccctgcccctccctatgcccccttcactccggggaactgaaacctactctgagtctcacatctctaaacctcagtgctgagacctatgcagtgggactaatctcatcaagaattttcagttgaggccgggcgcagtggctcacgcctgtaatcccaacactttgggaggccgaggtgggcggatcacctgaggtcaggagttggagaccagcctggccaacatggtgaaaccccatctctactaaaaatacaaagaaagttagccaggtctggtggtgcgtgcctgtaatcccacttactcgggaggctgaggcaggagaatcacttgaacccaggaggcagaggttacagtgagccgagatcgcgccactgcactccaccctgggcaacaagagcgaaaactgtctcaaaaaaaaaaaatttttcatttgaggtattcttccagtagaaggttagtaagtttttaatgaaaccattaaaaattacacttcccagaaaatagatgacatcagtgccccttgctactttctcagtcctcactattgctttgagggcccaggtactgaaactggttgtcttgagttttgtgtcagctttttctccagtccattatccccctcccttgcttctgaagcagtctaggttaaactagccaggcaggtagttgtggactggtgattttcaaaagccccactttagagatcaggccacagctttttatatcgcacaggacacatcagcctgagctgctgcctcatgcctgtttccccaggaacctcactcctttggtagaaccttgggattttagaaattgtggcttttccataactcatttactccaacagttgaagttacacacattgctcccaaatttggaaatagaccacagtaccttacctttcattccccatctggcctttaccttctttgcttcagtggttgaaaacagttgccatattcaaagtatagtagatttcaacctcacacaaatgacaagtcccattttacaatcctaggaaggcccaccaatttcatttcacgcgccagggcggctgcagttggaggccgagggcagccctctgctcactgaatgtcttgcatgtgctgactgctgcccgcagtgctgaacatgccccaccgcccaggcccagcactgcttgttgggtcagcatctagtgctgctgtcacatctttgtctgcacagccagtaggattgcctcagccagggggtttatcagaaggtgtgcaaggcctttgggggaactgagcccctatagtgggcagtctcctttaccttcccacctccctgaaaagcacagaagacagtgccttggtttgtgttttgaagcaaacaagtcagctttctggctttgccccaaaactgtgatggaacataataaaactggagatatggtttttaacactgcaaaaaggaaaaagcatcaagtttctacttctggctggaaagcaaaaccaatctcagctgacaaggctgggcaaactaagttttcctgagcccattttcctttgagccctgacctagcctggccttacctcattaaggtttggttaaagcagtggaaaggaggaggaggcaggggtggatgggggtgtggggaggggatgagcactctgcagccgattaatctgttggtaggggcccagcttcttgggagtgcttattcagcccaagagtggaggctgtttacagcgagccctggagatggcagcttgtctccagctggggaggggtcaggcccctaaattgaagaccactttggtagcagaactgtagggactggtgagtcaactcacagattctgcagcagctgctccacccacaataaagcaaacgccgacaggctagaccccagattgcaggggctgccacctacaaggtgggaccacaggctgcctcaccgggattgtctgccactaaatagctggagtcacagattgagataaatgccaccttcaaggttgcagtgaaaagcataatcctatgtgatgaatttatatgtgttattttttaaaaagctattttattactgcatgttcccgtcccgtcttgtgaatgtgagtccccgccaccacgtgaggtgcagtcgttgcagcggctggtgcaggagtgcagctggcgcgtgtgtgatagcatctcgtaggtgttgctgcacaagagttaaccagagtcaatgccaaacacatagtatgagaagtgtactttttaagaaattaatttatttgagttcaaatatttttgaaatataaaaattggttgtattttttaaagctataattcttgtagacattctgtggttaaaaatttgattgtgcttattaaaaatggtcatctatgttttgcacttcagctacgtgaaaataaaatttctttgggaaggtgaaaaaaaaaaaaaaaaaa

SEQ ID NO: 971 - DNA, 224 bp, HOMO SAPIENS
ttaccagaattaacgtttcctcatctttcccagtgaatgtaaaaggtaccttctgggaagcattttaccggaactgatgactgctatgcttgacagcagcttcaacagcctcggatacaactcatcatgaattagctctggcatgactgagttagaatactgttctgtttcctatctctacatgtaggaaaaatttaaagtggcatttctatgctttggtcttt

SEQ ID NO: 972 - DNA, 3641 bp, HOMO SAPIENS
gggttaaggcacctgggccaccgcccctgccggcccctcctcccgcggccgggaagaggaaagtcgcggcgggggcgcggcccggtctccgtccccacccgcccgccgtcccgccggcccgagccgtggcgcccagagctgcgagccgctcgcccctccgccgctccggcccgggccgccatgtcgctgtggaagaaaaccgtctaccggagtctgtgcctggccctggccctgctcgtggccgtgacggtgttccaacgcagtctcacccctggtcagtttctgcaggagcctccgccacccaccctggagccacagaaggcccagaagccaaatggacagctggtgaaccccaacaacttctggaagaacccgaaagatgtggctgcgcccacgcccatggcctctcaggggccccaggcctgggacgtgaccaccactaactgctcagccaatatcaacttgacccaccagccctggttccaggtcctggagccgcagttccggcagtttctcttctaccgccactgccgctacttccccatgctgctgaaccacccggagaagtgcaggggcgatgtctacctgctggtggttgtcaagtcggtcatcacgcagcacgaccgccgcgaggccatccgccagacctggggccgcgagcggcagtccgcgggtgggggccgaggcgccgtgcgcaccctcttcctgctgggcacggcctccaagcaggaggagcgcacgcactaccagcagctgctggcctacgaagaccgcctctacggcgacatcctgcagtggggctttctcgacaccttcttcaacctgaccctcaaggagatccacttcctcaagtggctggacatctactgcccccacgtccccttcattttcaaaggcgacgatgacgtcttcgtcaaccccaccaacctgctagaatttctggctgaccggcagccacaggaaaacctgttcgtgggcgatgtcctgcagcacgctcggcccattcgcaggaaagacaacaaatactacatcccgggggccctgtacggcaaggccagctatccgccgtatgcaggcggcggtggcttcctcatggccggcagcctggcccggcgcctgcaccatgcctgcgacaccctggagctctacccgatcgacgacgtctttctgggcatgtgcctggaggtgctgggcgtgcagcccacggcccacgagggcttcaagactttcggcatctcccggaaccgcaacagccgcatgaacaaggagccgtgctttttccgcgccatgctcgtggtgcacaagctgctgccccctgagctgctcgccatgtgggggctggtgcacagcaatctcacctgctcccgcaagctccaggtgctctgaccccagccgggctactaggacaggccagggcacttgctcctgagcccccatggtattggggctggagccacagtgcccaggcctagcctttggtccccaaggggaggtggagggttgaggcctacgtgccactgggtgtggtggggtgcaggtagccagaaagggacctccctgtgtggataattctaggaaactgaggcccaggaacggttggagctgcccagtctggaggccctctctgaggagcgaggcgccaggccctggcagccctcctgacctgggtccgttgctggccccctcagatgtggtgggaggtcctggtgacctctggaggaacgctgtgctcaggtacctgggctaggcctggcctgatgggtctgtggccgcccctcgtcttcacagggaagagtcttctgtgaaatgcctcagtctccccagaggccgggcggccctggcaggagaaactcaaccctgtgcgggctcacaggcaccccccagtccacaccctggtctcctgggagagagggcccagccggctctccgcagccccaggcctgcctggagacgggccgcctctgccacagggcctccactcctggctgtgtcctgtaaggtctggaagggcgaccgctctgactacctcagcgcccctcagaatctccctggggctgcagccctaccccaccccgacacagggcagaagagcagcgctcctggccccccgaagtcccagagctgctgacccccaccccaggcaagtctctcccgcagcccccacacccccaggcctggctccctggctggaaagcagccggtttggccctggaagtggacattcctctattactgtgaagttttatttatgaagaatttggagggagaaggctccaggcttcaggagggggtggtgtcctccctggccctcctcccttccctcccctcattccagctgcctgccctcagcacccccaggcccctcacagcccagccccctccagagccctgccccaccgcaccctgcttctccagggcctagcagaccagcatctgccccggtgaagggatggatcagctgtgggggtgggtgcagaaggttgccacctcctacctcagcgggagtcacctaggaaagatggagggattgacactattttctcaataaaatgggacttttttttttttttttttttttttttggtgtgaaacttcctgttcccagctgcatcagagagcctgtctggggccaaggttgccagagatttctgaagacacagcttgttccttgttcttggctggtgggtgcacaaggacttctggaagggatttagacggggctgagtgctaggattaaagtggggatgggagtacggcaacagaaaaacctgggagctagcaatgcacccagcccttgactgtgccctggtggacagccgagctgtggctctagcgtgagccagtgccttcctgtccctgccaagggtgaggccagagttggccccgaggctaatgtttcagtgggtgagattaggtcggccgtacagaggccggtgggctccctgacatcccttccaggcaacctgaaagcactgaaatagcttatggccctgtgccagggaccttggcccaagctgctgacctccagggtggggagggagctacccccaggagaagagtcactcagacagcagtatgagcaagccagccagcagctccgtgcctgcacccagctcaggggaatcccagggggttcagatgcccaggaaggaaaaggggacagcgctactgctatggaatgagaccaccacttctcctgttgtccttcccagcttctccccaacctccccttttccctagtttataagacaggagaaaagggagaaagcaaaaagctggaaagaaacagaagtaagataaatagctagacgaccttggcgccaccacctggccctggtggttaaaatgataataatattaacccctgaccaaaacgactggtgttatctgtaaatcccagacattgtgtgagaaagcaccgtaaaactttttgtcctattagctgatgtgtgtagcccccagtcacgttcctcacgcttacttgatctattatgaccctttcacgtggaccccttagagttgtaagctcttaaaagggctaggaatttctttttcggggagctcggctcttaagacgcgagtctgccgacgctcccggccgaataaaaacctcttccttctttaaaaaaaaaaaaaaaaaa

SEQ ID NO: 973 - DNA, 8550 bp, HOMO SAPIENS
caacgacaacaacagggggacacaaaatggcggcggcttagctcctacccctggcggcggcggcagcggtggcggaggcgacggcacctcctccaggcggcagccgcagtttctcaggcagcggcagcgcccccggcaggcgcggtggcggtggcgcgcagccagatttgcctgaagacctggataatctccatttttgtcatggactgttaaaacgtttgaagttccaattctggtcttgatttcccagttaaagatgttcttcacccgaatgcagtctttcctgttggtaaaataagacaaccatcaacattgcctgtttgtctgcttttgaatctcttaaggatggatgtttgtaagatgttgcttaatacagtctggaatactctgtccatttgttgaattgtaaatgactttcaaatgtgcaagttctgttaaatacaaagagaacctctatgggtaacttttgtgttgaagaagtcatttgtcaaccatggtaaaacttgcaaacccactttatacagagtggattcttgaagctatacagaaaataaaaaagcaaaagcaaaggccctctgaagagagaatctgccatgcggtcagtacttcccatgggttggataagaagacagtctctgaacagctggaactcagtgttcaggatggctcagttctcaaagtcaccaacaaaggccttgcctcctataaggacccagacaaccctgggcgcttttcatcagttaaaccaggcacttttcctaagtcagccaaggggtctagaggatcatgtaatgatctccgcaatgtggattggaataaacttttaaggagagcaattgaaggacttgaggagccgaatggctcctccctgaagaacatagagaagtatctcagaagtcaaagtgatctcacaagcaccaccaacaacccagcctttcagcagcggctgcgactgggggccaaacgcgctgtgaataatgggaggttactgaaagacggaccgcagtacagggtcaattatgggagcttagatggcaaaggggcacctcagtatcccagtgcattcccatcctcgctcccacctgtcagccttctaccccatgagaaagaccagccccgtgctgatcccattccaatatgtagcttctgtttggggactaaagaatcaaatcgtgaaaagaaaccagaagaactcctctcttgtgcagattgtggcagtagtggacacccatcctgtttgaaattttgtcctgaattaacaacaaatgtaaaggccttaaggtggcagtgcatcgaatgcaagacatgcagtgcctgtagagtccaaggcagaaatgctgataatatgcttttttgtgattcctgtgatagaggatttcatatggaatgctgtgacccaccactttccagaatgccaaaagggatgtggatttgccaagtctgcagaccaaagaaaaagggaagaaaactacttcatgagaaagctgcacaaataaaacgacgatatgcaaaacccattggacgaccgaaaaataaattaaagcaacgattgttgtctgtaaccagtgatgaaggatccatgaatgcattcacaggaagggggtcacctggtaggggtcaaaagactaaagtctgtaccacaccttcatctggtcatgctgcatctgggaaggactcaagcagcagattggctgttacagaccccactcggcctggtgccaccaccaaaatcaccaccacctccacctacatttctgcctctacacttaaagttaacaagaaaaccaaagggctcattgatggccttactaagttttttacaccatcacctgatggtcgcagatcacgaggtgaaattatagacttttcaaagcactatcgtccaaggaaaaaggtctctcagaaacagtcatgcacttctcatgtgttggctacaggtaccacacaaaagctaaaacctccaccttcttcacttccacccccaacccccatctccggtcagagccccagttcacaaaagtccagcacggccacttcttctccctctccccagagttcttccagccagtgcagtgtgccctccctgagcagccttaccactaacagccagctgaaggcactctttgatgggctttctcatatctataccactcagggacagtctcgcaaaaagggacacccgagttatgcaccacccaaacgtatgcgtcgtaaaactgaattatcttccacggcaaaatctaaagcccacttctttggcaaaagagatattagaagtcggtttatttctcactcctcctcctctagctgggggatggctagaggaagtatttttaaagcaattgctcacttcaagcgaacaactttccttaaaaagcacaggatgctaggcagattaaaatataaagtgacccctcagatggggaccccctcaccagggaaggggagcttgacagacggaaggattaaacctgatcaggatgatgatactgaaataaaaataaacatcaaacaagaaagtgcagatgtaaatgtgattggaaacaaggatgtcgttactgaagaggatttggatgtttttaagcaggcccaggaactttcttgggagaaaatagagtgtgagagtggggtggaagactgtggccggtacccttctgtgattgaatttggtaaatatgaaatccaaacctggtactcctcgccttacccacaggaatatgcaagattaccaaagctttacctgtgtgaattctgtcttaaatatatgaaaagtaaaaatattttgctaagacactccaagaagtgtggatggtttcatcctccagcaaatgaaatttaccgaaggaaagacctttcagtatttgaggttgatgggaatatgagcaaaatttattgccaaaacctttgcttgttagccaagctcttcctggaccacaaaacgttgtattatgatgtcgagccattccttttttatgtccttacaaaaaatgatgaaaagggctgtcatctggttggatacttctctaaggaaaagctttgccagcagaagtataatgtctcctgcataatgatcatgccccagcaccaaaggcaaggatttggacggtttctcattgatttcagctatttgctttctagaagagaaggccaagcagggtctcctgaaaagcctctctccgatctgggccgtctctcctacctggcatattggaagagcgtcatcttggagtatctctaccaccaccatgagaggcacatcagcatcaaggcaattagcagagcgacgggcatgtgcccacatgacattgccaccactctgcagcacctccacatgatcgacaagagagatggcagatttgtcatcattagacgggaaaagttgatattgagccacatggaaaagctgaaaacctgttccagagccaatgaacttgatccagacagtctgaggtggaccccaattttaatttctaatgctgcagtgtctgaagaagagcgagaagctgagaaagaggctgagcggctaatggaacaagctagctgctgggagaaggaggaacaagaaatcctgtcaactagagctaacagtaggcaatcacctgcaaaagtacaatcgaaaaataaatatttgcattccccggagagccggccagtcacaggggagcgagggcagctgctggagctgtctaaagagagcagtgaagaagaagaggaggaggaggacgaggaggaggaagaagaggaggaagaagaggaagaggatgaagaggaggaagaagaggaagaagaagaagaagaagaagaaaatattcaaagctctcccccaagattgacgaaaccacagtcagttgccataaagagaaagaggccttttgtactaaagaagaaaaggggtcgtaaacgcaggaggatcaacagcagtgtaacaacagagaccatttcagagacgacagaagtactgaatgagccctttgacaactcagatgaagagaggccaatgccacagctggagcctacctgtgagattgaagtggaggaagatggcaggaagccagtcctgagaaaagcattccagcatcagcctgggaagaaaagacaaacagaggaagaggaaggaaaagacaatcattgcttcaagaatgctgacccttgtagaaacaatatgaatgatgattcaagtaacttgaaagaaggcagtaaagacaatcccgaacctctaaagtgcaaacaagtgtggccaaaaggaacaaagcgcggtctatctaagtggaggcaaaacaaagagaggaagaccggatttaaactgaatttgtacaccccgccagaaacacccatggagcctgacgagcaggtaacagtggaagaacagaaggagacttcagaaggaaaaaccagccccagtcccatcaggattgaggaggaggtcaaggaaactggggaagccctgttgcctcaagaggaaaacagaagggaagaaacatgtgcccctgtaagtccaaacacatcaccaggtgaaaaaccagaagatgatctcatcaaacctgaggaagaggaagaggaggaggaggaggaagaggaagaagaggaagaagaggaaggggaagaagaagaaggaggaggaaatgtagaaaaagatccagatggtgctaaaagccaagaaaaagaggaaccagaaatctccacggaaaaagaagactctgcacgtttggatgatcacgaagaggaggaggaagaggatgaagagccatcccacaacgaggaccatgatgccgatgacgaggatgacagccacatggagtctgccgaagtggagaaggaagagctgcccagagaaagcttcaaagaagtactggaaaaccaggagacttttttagaccttaatgtgcagcctggtcactcgaacccagaggtcttaatggactgtggcgtcgacctgacagcttcttgtaacagtgagcccaaggagcttgctggggaccctgaagctgtacccgaatctgacgaggagccacccccaggagaacaggcacagaagcaggaccaaaagaacagcaaggaagtcgatacagagttcaaagagggaaacccagcaaccatggaaatcgactctgagactgtccaggccgttcagtctttgacccaggagagcagcgaacaggacgacacctttcaggattgtgccgagactcaagaggcctgtagaagcctacagaactacacccgtgcagaccaaagtccacagattgccaccacgctcgacgattgccaacagtcggaccacagtagcccagtttcatccgtccactcccatcctggccagtccgtacgttctgtcaacagcccaagtgtccctgctctggaaaacagctacgcccaaatcagcccagatcaaagtgccatctcagtgccatctctgcagaacatggaaaccagtcccatgatggatgtcccatcagtttcagatcattcacagcaagtcgtagacagtggatttagtgacctgggcagtatcgagagcacaactgagaactacgaaaacccaagcagctacgattctactatgggaggcagcatctgtggaaacggctcttcacagaacagctgctcctatagcaacctcacctccagcagtctgacacagagcagctgtgctgtcacccagcagatgtccaacatcagcgggagctgcagcatgctgcagcaaaccagcatcagctcccctccgacctgcagcgtcaagtctcctcaaggctgtgtggtggagaggcctccgagcagcagccagcagctggctcagtgcagcatggctgctaacttcaccccacccatgcagctggctgaaatccccgagacgagcaacgccaacattggcttatacgagcgaatgggtcagagtgattttggggctgggcattacccgcagccgtcagccaccttcagccttgccaaactgcagcagttaactaatacacttattgatcattcattgccttacagccattccgctgctgtgacttcctatgcaaacagtgcctctttgtccacaccattaagtaacacagggcttgttcaactttctcagtctccacactccgtccctgggggaccccaagcacaagctaccatgaccccaccccccaacctgactcctcctccaatgaatctgccgccgcctcttttgcaacggaacatggctgcatcaaatattggcatctctcacagccaaagactgcaaacccagattgccagcaagggccacatctccatgagaaccaagtcagcgtctctgtcaccagccgctgccacccatcagtcacaaatctatgggcgctcccagactgtagccatgcagggtcctgcacggactttaacgatgcaaagaggcatgaacatgagtgtgaacctgatgccagcgccagcctacaatgtcaactctgtgaacatgaacatgaacactctcaacgccatgaatgggtacagcatgtcccagccaatgatgaacagtggctaccacagcaatcatggctatatgaatcaaacgccccaataccctatgcagatgcagatgggcatgatgggcacccagccatatgcccagcagccaatgcagaccccaccccacggtaacatgatgtacacggcccccggacatcacggctacatgaacacaggcatgtccaaacagtctctcaatggctcctacatgagaaggtagacaacgtgggcagtccacaaaacctacggggcatcactattggattgatctgcacaaatacctttgaagagtacgatttcaaaaccagcaattggtgtgaatgcaaaaacatttgttggcaccatttatttaaaaaaaaaaaaagctgtatgcagcagaaagccttatacaagttgtttttctttttttcctttttcttttttttggtaccttcatttctgttacttttatataaaattctctgcaaaggaaggcctctctttggactacaatttggaggcagccacttgttgtgcctgcttctgttaaacaatgtggatatcaagcccccccaaattatctgttttaatattgaacctagagctttttttttcccttccctgtccactccatgtaaatgcctttagcatttcagttattgtatattttgtttaaggtgacacttcagcatgccgctaatgtctttgttagtgacagtgcattttgtagtactgtacaagtgttgtgctaacagtaagccatttcttaagttttttgccttgattagggtgccctaatttgagggttttaaaaaaaactatatttttgttaattataaaactgtaaagagctataaaagctattcccatttggttagtcaaaagggttttattgctaaatgtttggtgtaaagttgagacccttttccattttggtgacagatttctttggggaaaaaaggcagctttctgttttataaatgcagacttctgtttattgaatgaagcatatctcagtgtttatctgtcaggttttgaaacatttcatatatgtccaaatacttggcaggatttaaaaaaaaatagtgaatttggtgtaaagttgctattttatggaaatgcctctaactttacattttcattccatctgtagatttttctatctttataaaatattggagttattttttaaggaaaaatagaaaagtagcttgtgaatagctcaaactaagcttacaaatcgcatgtaaaaaagcaaaaaagttatttgtgtctgtttatattgcttccttttttgtagcctttgtacctgtacagggtgacagtaagggccaagcaggagaggcgtaatccttgtataaaataggatccagcgacactcttgtatttatctgttctctttttagtcagtcacttcaaaaaaacaaaaaacaaacaaaaaaaagctgtacattttaacataaaataaattatgatgagccatttttagcctcttgtgtcctgtcatattatgattgatagagaatgaccaatggaactgtatcatgtgtcacgcctcagaacacatacacattttgggaaaataaattatttagtgtaaattggagttatgggattttctgatttgttttgactttgggggaggggttggcaataaataagagtaatatctaataaaaccatcacatataccaaatacctatttaataaattaatttataatggattttaatgcttttcatgaaagtttattttatgcgagtgcataccttctgtatgccaatcattgtctttaaaataaagtgaaattgtttttttcttttggactttgatcttcatttgcaaagagatcccgcacaaatatccagctgcctcactcgcacagtctgtagaaacatccctccaagcctcgcaccagggtagcaaacttcctttttataaagattcataccaaaaaaagcacccaatttgggattgtatgtttgaaaaatcattttctttttaaaaagtgtgaacgttttgctctgttgtgaatgattaattgtatgttttctttagagtctaaagtttagaccc

SEQ ID NO: 974 - DNA, 1936 bp, HOMO SAPIENS
cctcgctagtggcgggcatgataacacacgccggagggtcgcacgcgggttccagttgtgattgctggagttgtgtattgccaggaggctctccgagattggggtcgggtcactgcctcatccaccggagcgatggcgtttctccgaagcatgtggggcgtgctgagtgccctgggaaggtctggagcagagctgtgcaccggctgtggaagtcgactgcgctcccccttcagttttgtgtatttaccgaggtggttttcatctgtcttggcaagttgtccaaagaaacctgtaagttcttaccttcgattttctaaagaacaactacccatatttaaagctcagaacccagatgcaaaaactacagaactaattagaagaattgcccagcgttggagggaacttcctgattcaaagaaaaaaatatatcaagatgcttatagggcggagtggcaggtatataaagaagagataagcagatttaaagaacagctaactccaagtcagattatgtctttggaaaaagaaatcatggacaaacatttaaaaaggaaagctatgacaaaaaaaaaagagttaacactgcttggaaaaccaaaaagacctcgttcagcttataacgtttatgtagctgaaagattccaagaagctaagggtgattcaccgcaggaaaagctgaagactgtaaaggaaaactggaaaaatctgtctgactctgaaaaggaattatatattcagcatgctaaagaggacgaaactcgttatcataatgaaatgaagtcttgggaagaacaaatgattgaagttggacgaaaggatcttctacgtcgcacaataaagaaacaacgaaaatatggtgctgaggagtgttaaaagtagaagattgagatgtgttcacaatggataggcacaggaaaccagttaggtctcaatacctgaagctatcgtaaaattaagaaaggataaagttggtaaaccttttatatttagtatctttttattcagctcatggacttctgccagcataatacttgctttggaaaacccagataaaggttcatgcaaactttattttgtgtttaggaactactgaggatcagagtaatccaagcaaatgtgaatcattttacctttgacaaaggtaaatcagactatgaagttttttttatacaggatgatgactatggaaagagtactcttgtttccttatattatggaggcaggagtttcgttttcaaaattgttacaaattgtagaagccacggtgttctgtgatataagtgtgtgtttttcataaagcaggcagaactcatctaggtaaattacagttcctaggtataattcacattgtattcagagttgatggttgtacatataagtgattgctggttttagttgcaactttgtataaaagggactgagaaatttataaacttttttcttactgtcttttttctaaagtaaaaacaaagaaattatgtgccagatttatgcatattattttatgttgcatagaataaaatttttaatctttaattttacatttcctaaatatattttaagacgaaacatttgttctatagcttttccctttttttaagtaaggaattttatttttttctgaattattttctctcgtgagtatattgatccagaaagaaaacttgtattatgtgtgttttaaaatgagaaatctaaaaaacgaaaagtctccaaagtctctggaatttgaaacactttgcataacgtataaaagcctgtttaagagacagccaactatggcctgtggatcaaatccagcctgctgcctgctttttatggcctgtgagctaggaattgtgtttataattttaaatgtttttttttaaagacttttatgatacttgaaaattaacatgaatatttagtgttcataaataaagtttgttgaaacaca

SEQ ID NO: 975 - DNA, 418 bp, HOMO SAPIENS
  misc_feature (26)..(32): n is a, c, g, or t
  misc_feature (60)..(61): n is a, c, g, or t
agataattctcagtgctccaggattnnnnnnncctacatttgaaaatacttgctgtcatnnattgtcttgagatttaggcttttccacttttcaggaaatctagtagttttttgggggttttgttttgttttccttggttctgccctatgccaacctgctagtttccctttttattttagcctgatgaatcttcccttttgctttcagtactaaccattgctggtagttcttaacaggtctagcttttaccaatattgtcaagttagcaatattagctcctggggccctagtactctgtacttccacccctctccccaccagtaccatgctgcctgttcacatgatggacaccagctctgatattcaccctaagatataatccataagatgacaaacttgtattcaacaccgactcct

SEQ ID NO: 976 - DNA, 4047 bp, HOMO SAPIENS
tcccttcctctctgcggttccctccctcccaccccctctccctgcacctttctttatcttggagcctctcccatctctccctccctcttcctccctaccccaccctccgaccaccccacttcttcccctcccctcacacttccctccctcccttctctcgtctcctccccactgcgcctccctccctcctggccttccttcccttccccgactttgcagatttctcttcccccaggcctccctcctccacctctccgccccctccgggcttggctctcccaggaggctacgactggagccactggtcccgcaggatccccgcgtcctcggtcgccgcgtccacgtccctctcgcgtccccgcccggcgccacgccgcctcctctgggttcggcctccgcgcggtgcagcgcagtctcaggccgcgggacaagcccgacttaaatctctgcaatggctaacgaagcttatccttgtccgtgtgacattggccacagacttgagtatggagggctaggccgtgaagttcaagtcgagcacatcaaggcttatgtcaccaaatcccccgttgatgcaggcaaagctgtgattgtcattcaagatatatttggctggcagttgcccaataccagatatatagctgacatgatctcaggaaatggatacacaaccattgttccagacttctttgtagggcaagagccttgggacccctctggcgactggtctatcttccctgagtggctgaaaacaagaaatgcccagaagatcgatagagagatcagtgctatcttgaagtatctgaaacaacagtgtcatgcccagaaaattggcatcgtgggattctgctggggtggaactgctgtccatcatttgatgatgaaatactcagaattcagggcaggggtgtccgtctatggcattgtcaaggattctgaagacatttacaatttaaagaaccccactttgttcatttttgctgaaaatgatgttgtgattccactcaaggacgtatctttgctgactcagaagttgaaagaacactgcaaagttgaatatcaaattaaaacattttctgggcagactcatgggttcgtgcatcggaagagagaagattgctcacctgcagacaagccctacattgacgaggccagaaggaatttaattgagtggctgaacaagtacatgtagcaagaatcaagggcaagccttcctagaatagctttcatcccaaaatttgcttggaaatagttagatcatttgatttaattttcacttttataaaataagtgtaggaatcctaaaattgattatttcatttgaaacacaaattcagtaggacgtaatgcatgaaataatttaatttttgacatgtacatcgaatcataatttaaaaacaaggtctgaccaggtgtagtgcctcatgcctgtaattccagcactttgggaggccaaagtgggtggatcacctgaggtcaggagtttgagaccagcctggccaacatggtgagaccccatctctacaaaaaatacaaaaattagcctggtgtggtggtgcacgcctgtagtcccagctacttgggaggctgaggcacaagaatcaatagaacccaggaggtggagactgcagtgagccaagattgtgccactactgtactctagcctgggcagcagagtgagaccctgtctcaaaaataaataagtaaataaataaataaataaaataaaaaccaggtcagtacctggagaatttgaatgatagagaatgatagagtaataccctaattattagttaaaacctacaggccgggtgcggtggctcacgcctgtaatcccagcactttgggaggccgaggtgggtggatcacttgaggtcaggagttcaagaccagcctggccaacatggtgaaaccccatctctactaaaaatataaaaatcagccgggcatggtggcatgtgcctgtaatcccagctactcaggagtctgaggaggagaatcacttgaacctggaggcagaggttgcagtgagtcgaggttgcgctactgcactccagcctggacaacagagggagactctgtctcaaaaaaaaaaaaaaacctacagctgttcaaggaccagctgacaggtcaagtgtggccttttctggtctttgaacacatcatagaaagtgacaaatgctgcaaagccatgaagaacatgaactataaacgggtagactaactgcccagcttagacacttatctatgccacaaaacagctgaatttgtcacatttatatattgcaatatgggaagtattgagatcaaaacaggattccattgacctaattatattaagctaataaactaattttttgaatttttgaatttgcagcttttttaaaaagatagcagagaacggtgggctagagttgtcacccagctgttgtctcctaagcagtggatttccaagcactggcatttttgggtcccagggcctgaggctacctcagaaatatctcctgtgtttctggtggtggcgtaaaggggagagccggtgagaaactctgcacctgcacctacggggtgcgtacatgtgactttgggcaagtgacttgatgttgtagtttttttcctaattttgtcttgacgtccttctcaggagagagtggctgtaaactctagccctgccctgacggggatcctggggatgtggtcgtgggtgtttcccatgtgcctttcatgggatccttctttgacctcacagacggcctgattcctgagtgtccaacctgtggccaggtgtccctctcgcaggaagcttgtttatcctggcacatgaccttgtggctctcatctgacctgtgtccagtttattcctactgagacagccactctcccggagagccctgaccgggaaagaagttaggatggggtagaggaggcaactcatcagaacccaagaaatgacagaagcagtttattgcttacagatccagagaacagagggcagcacgcttcacagggccagcaaaaagggggagccattcaggacacatgggctcaaccagaaggtggagaacgagagagagagggagctatgagccaaagccttcactggggcccagggtgtcatctatgcaggtttcccctggaggttctaactggggggtttagagcaagcaggcatgagccccggggactcacgctgtgactgagaggggtcggtgtgggtaggatatcggcatggtccatgtgggtgtgggggtcagtgggacaagtcaagcaggtggtatccagctgtccatgggaaggtggtcccaggaggcggttttgtaaggcagatgtctggatcgaccaccttggggaacagtgagaagttgtataactggaaactgtgttactaatccctgcttctagtatgagaaagtccaacttacattcaaatagatgctcaggaaacataaaattcaaagaattcccaaacttgagcttcctgagcctcagtttttgcatctgtcaaatgggtatggggagaccctttgcctaatgttgagagaatccaagcctgagcagggctggtctactgtggacacttagttgtggaccccaacaggccaaagcccttgcctgctgagggctgctcccaggaggcctcacacattcatccggcctcccaggaaacccctgagatgtgctgggcttttgccgtggaacggtgtcggtgagcatgtggccagtagccagagtcttcaacataggtgggaggtctgaaattcgtgcgagaatgaaccaagggtgtggctgtatccttcatggtgagcttggggcctgggcagccttccctctgctgagtcctttggtcaaatgtcatggtgttctgaaccagcactgcagatagaagtataatgtaagtcacacacgtacttctttaaaaagatatgttcttcagtgactattagacaaacagataaatgaaggtaaagggaaaaaatggcaactttagcttttttccccatgtatgtaattttaaattttcttatagccccattaaaaaaaggaaagaga

SEQ ID NO: 977 - DNA, 4271 bp, HOMO SAPIENS
acttgtaggaaagcctctttgcatttagacgtaattgaactggaaggaaggagactggccagggaatagggggaaagaaattctcccgttgctcctcctactgtttatcacttgcctccggactgtcttccaaaccaagctcagctgcatcaaggtggcagcagaataccctgtgcaagtgccagcgtcttcttagccgctctgtgcatcccaggctgccctgttatctggccaccgtccctggccattgggactgcttctgatggctctggcctctgctgccccagggagcatcttctgtaagcagctccttttctctctcctggttttaacattactttgcgatgcttgtcagaaagtttatcttcgagttccttctcatcttcaggctgaaacacttgtaggcaaagtgaatctggaggagtgtctcaagtcggccagcctaatccggtccagtgaccctgccttcagaattctagaagatggctcaatttacacaacacatgacctcattttgtcttctgaaaggaaaagtttttccattttcctttcagatggtcagagacgggaacaacaagagataaaagttgtactgtcagcaagagaaaacaagtctcctaagaagagacataccaaagacacagccctcaagcgcagcaagagacgatgggctcctattccagcttcattgatggagaactcgttgggtccatttccacaacacgttcagcagatccaatctgatgctgcacagaattacaccatcttttattccataagtgggccaggcgtggacaaagaacccttcaatttgttttacatagagaaagacactggggatatcttttgtacaaggagcattgaccgtgagaaatatgaacagtttgcgttatatggctatgcaacaactgcagatggctatgcaccagaatatccactccctttgatcatcaaaattgaagatgataatgataacgccccatattttgaacacagagtgactatctttactgtgcctgaaaattgccgatccggaacttcagtgggaaaagtgaccgccacagaccttgacgaacctgacactctccatactcgtctgaaatataaaatcttacaacaaatcccagatcatccaaagcatttctccatacacccagataccggtgtcatcaccacaactacaccttttctggatagagaaaaatgtgatacttaccagttaataatggaagtgcgagacatgggtggtcagcctttcggtttatttaatacaggaacaattactatttcacttgaggatgaaaatgacaatccaccatctttcacagaaacttcttatgttacagaagtagaagaaaacagaattgacgtggagattttacgaatgaaggtacaggatcaggatttgccaaacactcctcactcaaaggctgtatacaaaatcctacaaggaaatgaaaatggaaacttcataattagcacagatccaaatacaaatgaaggagtgctgtgtgttgtcaagccattgaactatgaagtcaatcgccaagttattttgcaagttggtgtcattaacgaggcacaattctctaaagcagcgagctcacaaactcctacaatgtgcactacaactgtcaccgttaaaattatagacagtgatgagggccctgaatgccaccctccagtgaaagttattcagagtcaagatggcttcccagctggccaagaactccttggatacaaagcactggacccggaaatatccagtggtgaaggcttaaggtatcagaagttaggggatgaagataactggtttgaaattaatcaacacactggcgacttgagaactctaaaagtactagatagagaatccaaatttgtaaaaaacaaccaatacaatatttcagttgttgcagtggatgcagttggccgatcttgcactggaacattagtagttcatttggatgattacaacgatcacgcacctcaaattgacaaagaagtgaccatttgtcagaataatgaggattttgctgttctgaaacctgtagatccagatggacctgaaaatggaccaccttttcaattctttctggataattctgccagtaaaaactggaacatagaagaaaaggatggtaaaactgccattcttcgtcaacggcaaaatcttgattataactattattctgtgcctattcaaataaaagacaggcatggtttagttgcaacacatatgttaacagtgagagtatgtgactgttcaactccatctgagtgtagaatgaaggataaaagtacaagagacgttagaccaaatgtaatacttggaagatgggctattcttgctatggtgttgggttctgtattgttattatgtattctgtttacatgtttctgtgtcactgctaagagaacagtcaagaaatgttttccagaagacatagcccagcaaaatttaattgtatcaaatactgaaggacctggagaagaagtaacggaagcaaatattagactccccatgcagacatccaacatttgtgacacaagcatgtctgttggtactgttggtggccagggaatcaaaacacagcaaagttttgagatggtcaaaggaggctacactttggattccaacaaaggaggtggacatcagaccttggagtccgtcaagggagtggggcagggagatactggcagatatgcgtacacggactggcagagtttcacccaacctcggcttggcgaagaatccattagaggacacactctgattaaaaattaaacagtaaaagaaggtgtatttgtgtggacaagatgaggagcataaacattgtgaagactacgtttgttcgtataactatgaaggcaaaggttctctggccggctcagtaggttgctgcagcgatcggcaggaagaagagggactggagtttctagatcacctggaacccaaatttaggacattagcaaagacatgcatcaagaaataaatgtgccttttaatagtgtaatatccacagatgcataagtaggaatttattacttgcagaatgttagcagcatctgctaatgtttttgtttatggaggtaaactttgtcatgtataggtaagggtactataaatatgagattcccctacattctccttgtctggtataacttccatgttctctagaaatcaaggttttgtttgttaattctcttttatatgcatgtatatattgcccttttcacgactgtactgtacaccttcttgcaccttttatttgcaaactgatgttactttttgtgctgtggaagagcatttgggaaagctgggtattatagaggccaatgaaagatgaatttgcattgtagatgtacgaattaaatatgttcttcaaaatcttggggagaattatgttcttagaacatagttggtgccagataattgcattctctccacctgagtggtttaaaaaggacttttaagtattcttcagtgcaatcttcagttttgtgattaagttcatttctcttttacacttttgtactcctcagagcagtgctcccagcattgttttctttcaggatccttcagagctcagtccctggacctctgcccatgtggatttgttgttaggtcactccaacttctagggttcttggaaagataaggaccagaacaagctcatagcaaattgaggggcagagattttatgaagattacatgagaagatttccatgaaagaattgcagccctgaggtccatgggttgacttatgctcacaaatatgtttcgtttgctcaacatggtttactactaacattttaaaaatataaatactttagcaaaaacattcactcttgagtttgacataggcctgccttatctgtggttgccacctgccatctccaagcatttggacaactagccctgatgcattaggctgcaactctgatatacagagactagcaccttgaatatgccagaaattgaattaccatctgtattagaacttaagactcagcctaaatttacagttactttaagaaaatgggcagtcagaattagggactagaatgtatatgagaaacccccactctactaaaaatataagaaattagccggacatggtggcgaatgactgtaatcccagctactcaggaggctgaggcaggagaatcgcttgaatccaggaggcggaggttgcagtgagccgagattgccactgcactccagcctgggcaacaagagcgaaactccgtctcaaaaaaaaaaaaaaaaa

SEQ ID NO: 978 - DNA, 225 bp, HOMO SAPIENS
  misc_feature (80)..(80): n is a, c, g, or t
ctgagaacctgcctttgagagaaacagcagcgctttgtggattgtggtctgatctcacagtcgtgttgagatttcctgcntctaggcacattctggtcccagtgacagaagactctcctgccactcgcaggaaagcaatgggcatgtggccgaacttctccatctcctgcatgttgctttaacaggctcgttcatgttttactaagcatcaagagcgtgggcaga

SEQ ID NO: 979 - DNA, 18815 bp, HOMO SAPIENS
agacccgcccgcccgagccggagttacaagagccgcctccgcgcacgggggcccggccactcggagctgctctgccgcggggactgcaccgcccgccctgccagacccgcccggaacggggctcgtcgccgccagtagccgcagcaccgcagccttgggcctcgcgccggctatggccgtgccctggggctgagccctcaggttgtgaccgagattcccgacgagagagactgaggggaagagaggaaggaggggcgggctcctggcaaggcattcgctcctgagcggaatcctgcaaagatggagaaggaggagacaacccgggagctgctgctgcccaactggcagggtagtggctcccacgggctgaccatcgcccagagggacgacggcgtctttgtgcaggaggtgacgcagaactcccctgcggcccgcactggggtggtcaaggagggggaccagattgtgggtgccaccatctactttgacaacctgcagtcgggtgaggtgacccagctgctgaacaccatggggcaccacacggtgggcctgaagctgcaccgcaagggggaccgctctcccgagcctggccagacctggacccgtgaagtcttcagctcctgcagctctgaagtggttctgagcggggatgatgaggagtaccagcgcatctacaccacgaagatcaagccacggctgaagtcggaagatggagtggaaggagacctcggggagacccagagccgtaccatcacagtgaccagaagggtcacggcctacactgtggatgtgactggccgggaaggagccaaggacatagacatcagtagccctgaattcaagatcaagattccaagacatgaactgactgaaatctccaatgtggatgtggagacccagtctgggaagaccgtgatcagactgccctcgggctcgggggcagcctctccgacaggctctgctgtggatatccgagcaggggccatttctgcttcaggaccagagctccaaggtgctggccactcgaagctccaggtcaccatgcctgggataaaggtgggaggctcaggtgtcaatgtcaatgcaaagggcttggacttgggtggcagaggaggggtccaagttccagcagtggacatttcatcttctcttgggggtagggcagtagaggtacagggcccatctctggagagtggtgatcatggcaaaattaaatttcccaccatgaaagtgccgaaatttggtgtctcaacagggcgtgagggccagacaccaaaggcagggctgagggtttctgcacctgaagtctctgtggggcacaagggcggcaagccaggcttgactatccaagcccctcagctggaagtcagtgtgccctctgccaatattgagggccttgaggggaagctgaagggcccccaaatcactgggccatcacttgagggtgacctaggcctgaaaggtgccaagccacaggggcacattggggtggatgcctctgctccccaaattgggggtagcatcactggccccagtgtggaagttcaggcccctgacattgatgttcaggggcctgggagcaaactgaatgtgcccaagatgaaagtccccaagttctctgtatcaggtgcaaagggagaggaaactgggattgatgtgacactgcctacaggtgaagtgactgttcctggggtctctggggatgtcagcctgcctgagattgctactggtgggctggaaggaaagatgaaaggtactaaagtgaagactcctgaaatgattattcagaaacctaaaatctccatgcaggatgtggatctgagccttgggtctcctaaactgaaaggagatattaaggtttctgctcctggggtgcaaggtgatgttaaaggccctcaagtggcacttaaaggctccagagtggacatagagacaccaaacctagagggaaccttgacaggccctaggcttggcagtccttccgggaaaaccggaacctgtaggatctctatgtcagaagtagacttaaatgtggccgcacctaaagtgaaagggggtgtagatgtcacactccccagagtagaagggaaagtcaaagtccctgaagttgatgtcagaggccccaaagtggatgtcagtgccccagatgtcgaagcgcatggcccagaatggaacctgaaaatgcccaagatgaaaatgcccacgttcagcactccaggagccaaaggggaaggtccagatgttcatatgactctacccaaaggagatatcagtatttcagggcccaaggtcaatgtggaagccccagatgtcaacttggagggtctggggggaaaacttaaaggccccgatgttaagctgcctgatatgagtgtcaagacaccaaagatctccatgcctgatgtagatttgcacgtgaaaggtacaaaggtgaagggagagtatgatgtaactgtaccaaagctggaaggagaactcaaaggcccaaaagtggacattgatgccccagatgtggatgttcatggcccagactggcacttgaagatgcccaagatgaaaatgcccaaattcagtgtgccagggttcaaagcagagggcccagaagtggatgtgaacctgcccaaggctgatgtggacatttccgggcccaagatagatgttactgctcctgatgtgagcattgaggaaccagaagggaaattgaaagggcccaagtttaagatgcctgagatgaacatcaaagtccccaagatctccatgcctgatgtggacttacatctgaaaggccctaacgtaaagggagaatatgatgtcacaatgccaaaggttgaaagtgagattaaagttcctgatgttgaacttaaaagtgccaaaatggacattgatgtcccagatgtggaggttcaaggcccagactggcacctgaagatgcccaagatgaaaatgcccaagttcagcatgcctggcttcaaagcagagggcccagaagtggatgtgaacctgcccaaggctgatgtggacatctcaggacccaaggtgggtgttgaagttccagatgtgaatattgaaggacctgaaggaaagctgaagggccccaagttcaagatgccagagatgaatatcaaggcccccaagatctccatgcctgatgtggacttgcatatgaaaggtcctaaagtaaagggagaatatgatatgacagtgccaaagctggaaggggacctgaaaggcccaaaagtagatgtcagtgccccagatgttgaaatgcagggtcctgactggaacttgaagatgccaaagattaaaatgcccaaatttagcatgcccagcctcaaaggagaggggccagaatttgatgtgaacctgtccaaagcgaatgtggacatttctgcaccaaaagtagatactaatgctccagatctgagccttgaaggacctgaagggaagttgaaaggcccgaagtttaagatgcctgagatgcacttcagagctcctaagatgtctttgccagatgttgacctggatcttaaaggacccaaaatgaaaggaaatgtagatatctctgcaccaaagatagagggtgaaatgcaggttccagatgtggacatcagaggtcccaaggtagatattaaagcaccagatgtggaaggccaaggcctggactggagcctgaaaatacccaagatgaaaatgcccaagttcagcatgcccagcctcaaaggcgagggcccagaagtggatgtgaacttgcctaaggctgacgttgttgtctcaggacccaaggtggacatcgaagccccagatgtgagcctcgaaggtccagaagggaagctgaagggtcccaagtttaagatgcctgagatgcatttcaagacccccaagatctccatgcctgatgtggacttacacttgaaaggccccaaagtcaaaggggatgtggatgtgtctgtgcccaaggtagaaggtgaaatgaaagtgccagatgttgaaatcaaaggacccaaaatggacattgatgccccagatgtggaggttcaaggcccagactggcacctgaagatgcccaagatgaaaatgcccaagtttagcatgcctggcttcaaaggagagggccgagaagtggatgtgaacctgcccaaggctgacattgatgtctcaggacccaaggtggatgttgaagtcccagatgtgagccttgagggcccggaaggaaagctgaagggccccaagtttaagatgcctgagatgcacttcaaggcccccaagatctccatgcctgatgtggacctgaatcttaaggggccaaaattgaagggagatgtggatgtgtccttgcctgaggtagaaggtgaaatgaaagtgccagatgttgacattaaagggcccaaagttgacattagtgctccagatgtggatgttcatggcccagattggcacctgaagatgcccaaggtgaaaatgcccaagttcagcatgcccggcttcaaaggagagggccctgaagtggatgtgaagctgcccaaagctgacgttgatgtctcaggacccaaaatggatgctgaagttccagatgtgaatattgaaggtccagacgcaaaactaaaaggtcccaaattcaagatgccagaaatgagtataaagcctcagaagatatccataccagatgttggtttgcatttgaaaggtcctaaaatgaaaggagattatgatgtaacagttccaaaagtagaaggagagataaaagctcctgatgttgacatcaaaggccccaaagttgatattaatgcaccagatgtggaggttcatggcccagactggcacctgaagatgcccaaggtaaaaatgcccaagttcagcatgcctggctttaaaggagagggcccagaggtggatatgaacctgcccaaggctgaccttggtgtttcaggacccaaggtggacattgatgttccagatgtgaatcttgaagctccagaggggaaactaaaaggccctaagttcaagatgccaagcatgaatatacagacgcacaaaatctctatgcctgatgttggacttaatttgaaagcccctaaactgaaaactgatgtagatgtttcccttcccaaagtggaaggagacttgaagggtcctgaaattgatgtgaaagcccctaagatggatgtgaatgttggtgatattgatattgaaggtccagaagggaagttgaagggccccaagtttaagatgcctgagatgcatttcaaggcccccaagatctccatgcccgatgtggacttacacttgaaaggccccaaagtcaaaggggatatggatgtgtctgtgcccaaggtagaaggtgaaatgaaagtgccagatgttgacattaaagggcccaaagtggacattgatgccccagatgtggaggttcacgacccagattggcacctgaaaatgcccaagatgaaaatgcccaagttcagtatgcctggcttcaaagcagagggccctgaagtggatgtgaatctgccaaaggctgacattgatgtgtctggacccagtgtggacactgatgctcctgatttggatattgagggaccagaaggaaagttgaaaggctccaaatttaagatgcccaagttgaatataaaagctcccaaggtctccatgccagatgtggacttgaatttgaagggacccaaactgaagggagagatagatgcttctgtgccagaactggaaggtgatctcagagggccgcaagttgatgtcaaaggtccttttgtggaagcggaggtgcccgatgttgatctggagtgtcctgatgcaaagttgaaagggcccaagtttaagatgcctgagatgcacttcaaggcccccaagatctccatgcctgatgtggacttacacctgaaaggccccaaagtcaaaggggatgcggatgtgtcggtgccaaaattggagggagatttaacaggccccagtgtgggtgtggaggtgcctgatgttgagctggagtgtcctgatgcaaagttgaaaggccctaaatttaagatgccagacatgcacttcaaggcccccaagatctccatgcctgatgtggacttacacttgaaaggccccaaagtcaaaggggatgtggatgtgtcggtgccaaaattggagggagatttaacaggtcccagtgtgggtgtggaggtgcctgatgttgagctggagtgtcctgatgcaaagttgaaagggcccaagtttaagatgcctgagatgcacttcaagacccccaagatctccatgcctgatgtggacttacacctgaaaggccccaaagtcaaaggggatatggatgtgtctgtgcccaaggtagaaggtgaaatgaaagtgccagatgttgacatcaaaggacccaaaatggacattgatgccccagatgtggatgttcatggcccagactggcacctgaagatgcccaagatgaaaatgcccaagttcagcatgcctggcttcaaagcagagggcccagaagtggatgtgaacttgcccaaggctgatgttgttgtctcaggacccaaggtggatgttgaagtcccagatgtgagccttgaaggtccagaagggaagctgaagggccccaagcttaagatgcctgagatgcacttcaaggcccccaagatctccatgcctgatgtggacttacacttgaaaggccccaaagtcaaaggggatgtggatgtgtctttgccaaaattggagggagatttaacaggccccagtgtggatgtggaggtgcctgatgttgagctggagtgtcctgatgcaaagttgaaagggcccaagtttaagatgcctgagatgcacttcaagacccccaagatctccatgcctgatgtgaacttaaacttgaaaggccccaaagtcaaaggggatatggatgtgtctgttcccaaggtagaaggtgaaatgaaagtgccagatgttgacatcagagggcccaaagtggacattgatgccccagatgtggatgttcatggcccagactggcacctgaagatgcctaagatgaaaatgcccaagttcagcatgcctggcttcaaaggagagggcccagaagtggatgtgaacttgcccaaggctgacgttgatgtctcaggacccaaggtggatgttgaagtcccagatgtgagccttgaaggtccagaagggaagctgaagggccccaagtttaagatgcctgagatgcacttcaagacccccaagatctccatgcctgatgttgatttcaatttaaagggacccaaaatcaaaggagatgttgatgtttctgccccaaagctggagggagagttaaaaggtccagaattggatgtcaaaggtcccaaattagatgctgacatgccagaagtagctgtggaaggcccaaatggcaagtggaaaactcctaagttcaagatgccagatatgcactttaaagctcccaaaatctctatgccagacctcgatctacacttgaagagccccaaggcaaaaggagaggtggatgtagatgttcccaaattggaaggggaccttaaagggccacatgtggatgtcagtgggccagacattgacattgagggaccagagggcaaattgaaaggccctaagttcaagatgcctgatatgcatttcaaagcccccaatatttctatgcctgatgttgatctaaatctcaaaggacccaaaatcaagggggatgtggatgtgtctgtgcctgaggtagaaggtaaacttgaagtaccagatatgaacatcaggggccccaaagttgatgtaaatgcccccgatgtccaagctccagactggcacctgaagatgcccaagatgaaaatgcccaagttcagcatgcctggcttcaaagcagagggccctgaagtagacgtcaacttgcctaaggctgacgttgacatctcaggacccaaggtggacattgaaggccctgatgttaatattgaaggaccagagggaaagttgaaagggcctaagttaaagatgccagagatgaacatcaaagcccccaagatctccatgcctgactttgatttgcatctgaaaggtcccaaggtgaagggcgatgtggatgtttctctgcccaaagtggaaggtgacctcaagggccccgaagttgacatcaaggggcccaaagtggatattaatgccccagatgtgggtgttcaaggcccagactggcacctgaagatgcccaaggtgaaaatgccaaagttcagcatgcctggcttcaaaggagagggcccagatggggatgtgaagctgcccaaggctgacattgatgtctcaggacccaaagtggacattgaaggccctgatgttaacattgaaggaccagagggaaagttgaaagggcctaagttcaagatgccagagatgaatatcaaagcccccaagatctccatgcctgatattgacttaaacctgaaaggacccaaagtgaagggtgatgtggatgtttcccttcctaaagtggaaggtgacctcaagggcccagaagttgacatcaagggcccaaaagtggacattgacgcacctgatgttgatgttcatggcccagactggcacctaaagatgcccaagataaaaatgcccaagatcagcatgcctggcttcaaaggagaaggtccagatgtggacgtgaacctgcccaaggctgacattgatgtctcaggaccgaaagtggatgttgaatgtcccgatgtgaatatcgaaggacctgaaggaaagtggaaaagtccaaagtttaagatgccagagatgcattttaagactccaaagatatccatgccagatattgacctgaatctcacaggtccaaaaataaaaggagatgtggatgttacaggccctaaggtagagggagatctgaaaggtcctgaagttgacctcaaaggccccaaagtggacattgatgtcccagatgttaatgttcagggtccagactggcacctgaagatgcccaagatgaaaatgcccaagttcagcatgcctggcttcaaagcagagggccctgaagtggatgtgaacctgcccaaggctgacgttgatgtctcaggccccaaagtggacgttgaaggccctgatgttaacattgaaggaccagagggaaagttgaaagggcccaagttcaagatgccagagatgaatatcaaagcccccaagatccccatgcctgactttgatttgcatctgaaaggtcccaaggtgaagggcgatgtggatatttctctgcccaaagtggaaggtgacctcaagggccctgaagttgacatcaggggtccccaagtggacattgatgtcccggatgtgggcgttcaaggcccagactggcacctaaaaatgcccaaagtgaaaatgcccaaattcagcatgcctggcttcaaaggagagggcccagatgtggatgtgaacctgcccaaggctgaccttgatgtctcaggacccaaggtggacattgatgttccagatgtgaatatcgaaggcccagagggaaagttgaaaggtcccaaattcaaaatgcctgagatgaacatcaaagcccccaagatctccatgcctgacattgatcttaacctgaaaggtcccaaagtgaagggtgacatggatgtgtctctgccaaaagtggaaggtgacatgaaagttcctgacgtggatattaaaggccccaaagtggatattaatgccccagatgtggatgttcaaggcccagactggcacctgaagatgcctaaaataaaaatgcccaagatcagcatgcctggcttcaaaggagaaggtccagaagtggacgtgaacctgcccaaggctgaccttgacgtctcaggacccaaggtggacgttgatgttccagatgtgaatattgaaggtccagatgcgaaactgaagggccctaaattcaagatgccagagatgaacatcaaagctcctaaaatatcaatgcctgatttggacctcaatcttaaaggccctaaaatgaaaggagaggtggatgtttcacttgcaaatgtagaaggtgatttgaaaggacctgctcttgacataaaaggcccaaagatagatgtagatgctccagatattgacattcatggcccagatgccaaattaaaaggtccaaaactgaagatgcctgacatgcatgtaaacatgcccaagatctccatgccagaaattgacttgaatttgaaaggctcaaagcttaagggagatgttgatgtctctgggcccaagttggaaggtgacattaaagctcccagtttggatataaagggcccagaagtggacgtttccggtcctaagcttaatatcgaaggcaagtcaaagaaatctcgttttaagcttcccaaatttaatttttcgggctctaaagttcagacacctgaagtggatgtcaaaggtaaaaagccagatattgacataacaggtccaaaagttgatattaatgctcctgatgtcgaggtccaaggaaaagtgaaaggatccaagtttaaaatgcctttcctgagtatttcatctcccaaagtttctatgcctgacgtggagctaaatttgaaaagtcccaaagtcaaaggagacttagatattgcaggtcccaatttagaaggtgactttaaaggccccaaagtggatattaaggcaccagaagtcaatcttaatgcacctgatgtggatgttcatggtccagactggaatctgaaaatgcccaagatgaaaatgcccaaattcagtgtgtctggcttaaaagcagaagggccagatgtagctgtggatctaccaaaaggagacatcaacatagagggcccaagtatgaacattgagggcccagatctcaatgtggaaggtccggagggaggcttgaaaggtcccaaattcaagatgcctgacatgaatatcaaagctcccaagatctccatgcctgacattgacttaaacttgaaaggccccaaggtgaaaggtgatgtggatatttctcttcccaaacttgaaggggatctgaaagggccagaggttgatatcaaaggccctaaagtggacatcaatgccccagatgtggatgttcatggtccagactggcatctgaagatgcccaaagtgaaaatgcccaagttcagcatgcctggcttcaaaggagaaggccctgaagtcgatgttaccctccctaaagctgacattgacatttctggtcccaatgtagacgttgatgttccagacgtgaatattgaaggtccagatgcaaagctgaagggccccaagttcaagatgcctgagatgaacatcaaagcccccaagatctccatgcctgactttgacctgaacttgaagggacccaaaatgaagggtgatgtggttgtgtctttgcccaaagtggaaggtgatctaaaaggccctgaggtggacatcaagggccccaaagtggacattgacactcctgacattaacatcgaaggctcagagggtaaattcaagggacccaaatttaagataccagagatgcacctgaaggctcccaaaatatcgatgcctgacattgatttaaacctgaagggccccaaagtcaagggcgatgtggatgtttctctgcccaaaatggaaggtgacctcaagggtcctgaagttgacatcaagggccccaaagtggacattaatgctccagatgttgatgttcaaggcccagactggcacctgaagatgcccaaggtgaaaatgcccaagttcagcatgcctggcttcaaaggagagggcccagatgtggatgtgaacctgcccaaggctgaccttgatgtctcaggacccaaggtggacattgatgttccagatgtgaatatcgaaggcccagagggaaagttgaaaggtcccaaattcaagatgcctgagatgaacatcaaagcccccaagatctccatgcctgacattgatcttaacctgaaaggacccaaagtgaagggtgatatggatgtgtctctgccaaaagtggaaggtgacatgcaagttcctgacttggatattaaaggccccaaagtggatattaatgccccagatgtggatgttcgaggcccagactggcacctgaagatgcctaagataaaaatgcccaagatcagcatgcctggcttcaaaggagaaggtccagaagtggatgtgaacctgcccaaggctgaccttgacgtctcaggacccaaggtggacgttgatgttccagatgtgaatattgaaggtccagatgcgaaactgaagggccctaaattcaagatgccagagatgaacatcaaagcccccaagatctccatgcctgactttgatttgcatctgaaaggccctaaggtgaaaggagatgtggatgtttctctgcctaagatggaaggtgatctaaaggcccctgaagttgacatcaagggccccaaagtggacattgatgccccagatgtggatgttcatggcccagactggcacctgaagatgcccaaggtgaaaatgcccaaattcagcatgccaggatttaaaggagagggcccagaagtggatgttaatttgcccaaagctgacattgatgtctcaggacccaaagtggacattgacactcctgatattgatattcatggtccagaagggaaactgaagggccccaaatttaaaatgcctgacctgcacctcaaggcaccgaagatctctatgcctgaagttgacctgaatctgaaaggtccaaagatgaagggcgacgtggacgtttctctgcccaaagtggaaggcgacctcaagggccctgaagttgacatcaagggccccaaagtggacattgatgtcccagatgtggacgttcaaggcccagactggcacttaaaaatgcccaaagtgaaaatgcccaagttcagcatgcctggcttcaaaggagagggcccagatgtggatgtgaacctgcccaaggctgaccttgacgtctcaggacccaaggtggacattgatgttcctgatgtgaatatcgaaggtccagatgcgaaactaaagggccctaaattcaagatgcctgagatgaacatcaaagcccccaagatctccatgcctgactttgatttgcatctgaaaggtcccaaggtgaagggtgatgtggatgtttcccttcctaaagtggaaggtgacctcaagggcccagaagttgacatcaagggccccaaagtggacatcgatgcccctgatgtagatgttcatggcccagactggcacctgaagatgcccaaggtgaaaatgcccaaattcagcatgccaggattcaaaggagagggcccagatgtggatgttacccttcctaaggctgacattgagatttctggccccaaagtggacattgatgcccctgatgtcagtatcgaaggtccagatgcaaaactcaagggtccaaagttcaagatgccagagatgaacatcaaggcccccaaaatctccatgcctgacattgactttaacttgaagggtcccaaagtgaaaggtgatgtggatgtctctctgcccaaagtggaaggtgatctcaagggccctgaaattgacataaaaggccccagtttggacattgacacacctgatgtcaatattgaaggtccggaaggaaaattgaaggggcccaaatttaagatgcctgagatgaacatcaaagctcccaaaatctctatgcctgactttgatttgcacctgaaaggtcccaaggtgaagggtgatgtggatgtttcactacctaaggtggaaagtgatctgaaagggccagaggtagacattgaaggtcctgaagggaagctcaaaggtcccaagtttaagatgcctgatgtacatttcaaaagcccacaaatctccatgagtgacattgatttgaatttgaaaggacctaagataaaaggagatatggacatttccgttcctaaactggagggagatctgaaaggtcccaaagtggatgtcaaaggccctaaagtgggcattgacactcctgatattgacattcatggtccagaagggaaactgaagggccccaaatttaaaatgcctgacttacacctcaaggcaccgaagatctctatgcctgaagttgacctgaatctgaaaggtccaaaggtgaagggcgacatggacatttctctgcccaaagtggaaggcgacctcaagggccccgaagttgacatcagggaccccaaagtggacattgatgtcccagatgtggacgttcaaggcccagactggcacctaaaaatgcccaaagtgaaaatgcccaagttcagcatgcctggcttcaaaggagagggcccagatgtggatgtgaacctgcccaaggctgacattgatgtctcaggacccaaagtggacgttgatgttcctgatgtgaatatcgaaggtccagatgcgaaactaaagggccccaagttcaagatgcctgagatgagcatcaaagcccccaagatctccatgcctgatattgacttaaacctgaaaggacccaaagtgaagggcgatgtggatgttacccttcctaaagtggaaggtgacctcaagggcccagaagctgacatcaagggcccaaaagtggacatcaacacccctgatgtggatgttcatggcccagactggcacctgaagatgcccaaggtgaaaatgcccaaattcagcatgcctggcttcaaaggagaaggtccagatgtggatgtgagcctgcccaaggccgacatcgatgtctcgggacccaaggtggacgttgatattccagatgtgaatatcgaaggtccagacgcaaaactgaagggccccaagttcaagatgcctgaaataaatatcaaagctcccaagatctccatacctgatgttgacctggatttgaaaggacccaaagtaaaaggagattttgatgtgtctgtccctaaggttgaagggactttgaaaggcccagaagtagatcttaaaggtccacgtctggatttcgaaggccctgatgccaaactcagtggcccatctttgaagatgccatcgctggagatatctgctcctaaagtaactgctcctgatgttgatttgcatctcaaggcaccaaaaattggattttcaggtccgaagttagaaggtggtgaagtggacctcaagggacccaaagttgaagctccaagcttagatgtacacatggacagcccagatattaacatcgaagggccagatgttaaaatccccaaatttaagaaacccaagtttggatttggggcaaaaagccccaaagctgacatcaagtcaccttcactggatgtcactgttcctgaggcagagctgaaccttgagactcctgaaattagtgttggtggcaagggcaagaaaagtaagtttaaaatgcctaaaattcatatgagtggtcctaagattaaggccaaaaaacagggatttgacctgaatgttcctgggggtgaaattgatgccagcctcaaggctccggatgtagatgtcaacatcgcagggccggatgctgcactcaaagtcgacgtgaaatcgcccaaaaccaagaaaacgatgtttggaaaaatgtacttcccagatgtagagtttgacattaaatcacctaaatttaaagctgaggcccctctccctagccccaaactggagggtgaactccaggcacctgatctggaactttctttgccagcgattcacgtcgaaggtcttgacatcaaggcgaaggctcccaaggtcaagatgccagatgtggacatctcagtgccaaaaatagagggtgacctgaaaggccccaaagtgcaggcaaacttgggtgcacctgacatcaacatcgaaggcctagatgctaaagtcaaaacaccgtccttcggcatttctgcccctcaagtctccatccctgatgtgaatgtaaacttgaaaggaccaaagataaagggtgatgtccccagcgtgggactggaaggaccagatgtagatctgcaaggtccagaagcaaaaattaagttccccaagttttccatgcccaagatcggcatcccaggtgtgaaaatggagggtgggggagccgaggtccatgcccagctaccctctcttgaaggagacttgagaggaccagatgttaagctcgaagggcccgatgtttctctaaaggggccaggagtagacttgccttcagtgaacctctctatgccaaaagtctctgggcctgaccttgatctgaacttgaaaggaccaagtttgaagggagacctggatgcatctgttcccagcatgaaggtgcatgctccagggctcaacctcagtggtgtcggtggcaaaatgcaggtgggaggagacggtgtgaaagtgccagggatcgatgccacaacaaagcttaacgttggggcaccagatgtgacactgaggggaccaagcctgcagggagatctggctgtctctggtgacatcaaatgccctaaagtatccgtaggagctcctgatctaagcttggaggcatccgaaggcagcattaaacttcccaaaatgaagctgccccaatttggcatctctactccggggtccgacttgcacgtcaatgccaaggggccacaggtttctggcgaactgaaggggccaggtgtggatgtgaacctgaaagggcctcggatttcagcaccgaatgtggactttaacttggaaggaccaaaagtgaaagggagccttggggccactggtgagatcaaaggccccactgtcggaggaggtcttccaggcattggtgttcaaggcctagaaggaaacctccagatgcctggaattaagtcctctggatgtgatgtgaacctgccaggcgtgaatgtgaaactcccaactgggcagatttctgggcctgaaatcaaaggtggtctgaaaggttcagaagtaggtttccatggggctgctcctgatatcagtgtgaaggggcctgcctttaatatggcatctcctgagtcagattttggcatcaacttgaagggcccaaaaatcaaaggaggtgcggatgtttcagggggtgtcagtgccccagacatcagccttggtgaagggcatttgagtgttaaaggttccgggggtgagtggaagggaccccaagtctcctctgctctcaacttggacacatctaagtttgctgggggccttcatttctcaggaccaaaggtggaaggaggtgtgaaaggaggtcagattggactccaggctcctgggctgagtgtgtctgggcctcaaggtcacttggaaagtggatctggaaaagtaacattccctaaaatgaagatccccaaatttaccttctctggccgtgagctggttggcagagaaatgggggtggatgttcacttccctaaagcagaggccagcatccaagctggtgctggagacggcgagtgggaagagtctgaagtcaaactgaaaaagtccaagatcaaaatgcccaagtttaatttttccaaacctaaagggaaaggtggtgtcactggctcaccagaagcatcaatttctgggtccaaaggtgacctgaaaagttcaaaggccagcctgggctctctggaaggagaggcagaggccgaagcctcttcaccgaaaggcaaattctccttatttaaaagtaagaagccacggcaccgctcaaattcattcagtgatgaaagagagttctctggaccttccaccccgacggggacgctggagtttgaaggtggggaagtgtctctggaaggtgggaaagttaaagggaaacacgggaagctgaaattcggtacctttggtggattggggtcaaagagcaaaggtcattatgaggtgactgggagcgatgatgagacaggcaagttacaggggagtggggtgtccctggcctctaagaagtcccgactgtcctcctcttctagcaatgacagtgggaataaggttggcatccagcttcccgaggtggagctgtcagtttccacaaagaaagagtagcaggcctttgtatgtgtgtacatatatatatatataacaaaacatcagccttgggtggtgtgttcctatataaactccaaagggaaacacaccgactgcctcagcaatcatgcaaagaccttgcctggcccggtggcaagcgctgaaaaaccgaccgcctgtaggctcctggaactatacagataggtaaagagttccaagttcgtccagcccatgtgcaaagtcaacagtatttgccttaagatttcatatatatatatttttttgcattgactgctgagagctcctgtttactaagcaagcttttgtgtttattatcctcatttttactgaacattgttagttttggggtaatggaaacccactttttcattgtaatgactttgggggcttttgttagtaagggtgggtggggtgatgggttgcagacggaggtcaggtcttcctctttcctgagactggatctgttcaaacagcaaacgcccacagatggcccagaggtggtggtagtcagggtgtgtgggtgtttttagggttctttagtgttgtttctttcacccaggggtggtggtcccagccagtttggtgctgacggtgagaggaaattagaatctgtttgcaaattgtccaacccaccccctcaacatgaggggcttccattttctgtgttttgtaagggaactgtttccttcatgccgccatgttcctgatattagttctgatttctttttaacaaatgttatcatgattaagaaaatttccagcactttaatggccaattaactgagaatgtaagaaaattgatgctgtacaaggcaaataaagctgtttattaaccttga

SEQ ID NO: 980 - DNA, 352 bp, HOMO SAPIENS
gctgggatgtatatattcctgcaaggaaagaaaaggaaatggcttcacattgctggatgggagcagtatgtgtgttgtttctgggtataatcttcctagctgcacttttcccatacatttctttctactaaaaatcatgaaagtttgaattatagttcctctcacaggattgaaagcaagtatcagaggagtcatccattcaaaacacagttcttccactgcagtatccgatatgttttgtatgtgcgctaggctgtcttttcattcagtctacaatacagttcaccagtgtggagaccttttgccctgcctgatttgttttgttttgttttactcactcttttcaatgact

SEQ ID NO: 981 - DNA, 4507 bp, HOMO SAPIENS
aagccttcccggtgctcctccctcgtctcctcacactcgctctctggctggggtccgcctgccgcccgctggcctgctccctccggggcaagtcttgcttcttaagcgctcctttcacacacgcgcgcgctcgctgggccgtcccctcctctccggccctcctcctcctcctggtccttgctaacgctgccgtcggggaggattgatgtcccttcagcatcatgcagccgccgccgaggaaggtgaaagttacacaagaactgaaaaacattcaagttgagcagatgacaaaacttcaagccaaacatcaagcagaatgtgatttgcttgaagatatgaggacattcagtcagaagaaggctgctattgaaagagagtatgcacagggtatgcagaagttggctagtcaatacctgaagagagattggcctggagtaaaagctgatgatcggaatgattacaggagcatgtatcccgtttggaaatcttttctcgagggaacaatgcaggtagcccagtctcggatgaatatatgtgaaaactataaaaacttcatttctgagcctgcaaggacagtgagaagcttaaaagaacagcaactaaaaaggtgtgtggaccagttgacaaagatccaaactgaattacaagagacagtgaaagatttagctaaaggcaaaaagaaatactttgagactgaacagatggctcatgcagtacgagagaaagctgacatcgaggcaaaatctaaacttagtctttttcaatcaagaatcagtttacagaaggcaagtgtaaagttaaaagcccggcgatctgagtgtaattccaaagctacccacgcaaggaatgattatcttcttaccctagcggcagcaaatgcacatcaggatcgctactatcaaacagatttagttaacattatgaaggctcttgatggaaatgtgtatgatcatctcaaggattatttaatagccttcagccggactgagctagaaacatgccaagctgtgcagaacacattccagtttttattagaaaactccagcaaggtggtccgggactacaatcttcagctgtttttgcaagaaaacgctgtatttcacaaaccccagcccttccagttccagccttgtgacagtgatactagccgacagttagaatcagaaactgggaccacagaggagcacagtctaaataaggaagctcgaaaatgggccacacgtgtggcacgtgagcataaaaacattgttcaccaacaacgggttctaaatgatctggagtgtcatggagctgctgtatcagaacaaagccgagcagagctagaacagaaaatagatgaagctagagaaaatattcgtaaagcagagataattaaattgaaagctgaagcccggttggacctgctaaagcagattggtgtttctgtggacacatggctaaagagtgccatgaaccaagtaatggaagaactggaaaatgagcgatgggcccgccctcctgcagtgaccagtaatggcactttacactcgcttaatgcagataccgaaagagaagaaggcgaagagtttgaagataacatggatgttttcgatgacagcagttccagcccttctggcaccttaagaaattatccactcacctgcaaagttgtttattcctacaaggcttctcaaccagatgagttgaccattgaggaacatgaggtgttagaagtgattgaagatggagatatggaagactgggtaaaggctcgaaataaagttggccaagtgggttatgtgccagaaaagtacctacagtttcccacctcgaacagcctcctgagcatgctgcagtccctggccgctttggacagtcggtcacacacgtccagcaattccacggaagcagaactcgtttcaggcagcctcaacggagatgccagtgtatgttttgtgaaagcactttatgattatgagggccagacagatgatgagttatcttttcctgagggagcaataatccgtatcttgaacaaagaaaaccaagatgatgatggcttctgggaaggggaattcaatgggcgtattggagttttcccatcggtgctagtggaagaactttcagcctcagaaaatggtgacactccatggatgagagagattcagatctctccttcccccaagccacacgcctccctgcctccactgccgttgtacgaccagcctcccagcagcccctaccccagcccagataagaggagctccctgtactttccccggtctccttcagcaaacgaaaaaagccttcatgctgagtcaccaggattctcacaggcatcaaggcatactcctgagacctcatatggcaaactgcgacctgtccgggcagctccccctccacctacacagaatcaccgaaggccagcagagaagattgaagatgtggaaatcacactggtgtgatgatgggcttgcccatccattactgctacaatcaaggccaggcttggagtttggccagtcttgttttttaggcacctttgcatgatgatgactcttgaacagagcaaaaaacaaggaggattatgtgtgactgggtggcctggtagactcctcccacgttttgaatatttcgtgccttttttttttgttgtcattttctatgtcatttctcctaccatagcacaaatcctagcggaccctaggagcaaagaggggggcagccctcatgcctaacagtggtctgtttttatatgagactcaagaacaggcctcattccagggcacagtccctaaattactgatcatgtgcactcgtacagtatattactgtgaccacaaggatgtggcaaagattctcatctttcttcaagtggcttttgctcatctgattgagaattaatcagatcatgttggctacataaggaaacagaaggagggatttcaggagaggctggctcctccccaaggttagtccccagactgagaaagtgaaaccttattgggaaaaattggactgccctgaatttagcaccaattgcattaacgcacatctcttccacaactaacagacttaaaataacagtgtccttcgtattaatatctgtgccattcatttagaattagcagagctaatatggaggggctgaactagtagccacatcttgttcatcacatagactaatagaaaggaggctgtggctaaagcagaaatggaacttccggatctgaaattagccaatataatgttcttttgtatttgggtatttttcatcttaatttttacagcatatactcttcttaccagtatccttagaatccaaatgtctagataagttgaggacacatacctgcattgttgagcttctctactggggacgccccggcattattttattcccaagccagcagaccggcccagacagccaggctgtggctggtccagaccaactgctatggtggaaaatgcagcttccaggtcccactaccctgacatttccgtggaaggaagaacctggtggctcgtggaggaaaccagctttctatgagaaaggactgaaggattgcgcaccctgcacaagtacagattgaccaggaaaagacaagtgtcttctgtgtgtcacagggaaagccaggagtggccttctctgcaggccagcaagcctgcagcagcaggtgcccccacgtcaggtgctgactgtccgctgtccgctcctgtagaaggtagggagcacaatacctagggactaagggatgttcgccggttgtggtttgttttttttttttttccttggttaagaaatcaaatttgcagaatttaatctacaagttgtattatgctttgaaaactccatccctcctaagaatcttaaaaaacttgaaatgctcgccaaatgtccccatgggatttttgaccaaaagtaaggtgataactgaagaaatttttagttctttgatcacttcagtgacaatacccattaatgaatcttctccatgatttggggttttttttcgttgttgttttttacacttcttaacctgttgatctatttgaggtcttttgtgtttatcaaacttattcttaagtttaaaaaagaaattaaaagggtggtttttttaagattttaaagtttgctaacatattaaaaatcttcaaatgcttattaaatagagcagttcttgccacccagtcttgtattctgtctttagctagccaaattgtccttgaatttgggttttccacaacctcaaagggttatttgaaatcttttgttgtattttaaaatattttttggaagagctgctaattttattttaaaaaacaaagttgtgaaaacatgcctcctttttaaaaaataacccctccatccaggatatggaatccagcaccacagtgcacaggtcagggctcggagggagcctctgtgcagatgtgctttctttacagtggctgtaaaaagtttgtatttattatgtataaaatgttgaataataaaaaaaatggaattaaaaaaaaaaaaaaaaaa

SEQ ID NO: 982 - DNA, 399 bp, HOMO SAPIENS
  misc_feature (67)..(67): n is a, c, g, or t
tcctcatttggtttccctacaattattaaattctttctctgctgcaactcctactttttcagtgtantggtctgttactgtgcaacaggaaatcagacctggtggtcctatagtaagagttcacagaatatgatatacaaagtgatctgtgatatacaaaaaccggcacaatctcactcttaataagaaaaattcaacttaaaattaaaagttttttttcctcagaatggcaaagatcaaagtttgataacatggttggaaagtatgcagaccgatattctcatattcattgatgaagtgtaaattgatacatcctttgtcagtacggacaggtttcccaactctaggggtgaaatttatacagactacagtgtgaatgacaaccacttcaaattgggt

SEQ ID NO: 983 - DNA, 1799 bp, HOMO SAPIENS
acactggggtggtgcttagccggcgccagaccgaccctcgacttcggagaggcagcgcggttcctctgggtgcttccgcctccccttctcctgcttctccagcctcttcggcctcctcgcccgccgcgggaacccgagaccccagtgtatgccccacccctgaccccgctcgcgacatgtccaccccggctcggcggcgcctcatgcgggacttcaagaggttgcaggaggatcctccagccggagtcagcggggctccgtccgagaacaacataatggtgtggaacgcggtcattttcgggcctgaagggaccccgtttgaggatggaacatttaaacttacaatagaattcactgaagaatatccaaataaaccacctacagttagatttgtctctaagatgttccatccaaatgtctatgcagatggtagtatatgtctggacatacttcagaaccgttggagtccaacctatgatgtgtcttccattctaacatccatacagtctctgttggatgaacccaatcccaatagtccagcaaacagccaggctgctcagctgtaccaggagaacaaacgggaatatgaaaagcgtgtttctgcaatagtagaacaaagctggcgtgattgttgaccccgggtacagtttaaagaagctggccataagaaaaatatatattgatgtgtttgtcacctccctactcctgtcattacatttactttattaaaagcaaaataactgttgtgctgtttccatcttccttgccaagttttcctaccccttctaccctctccttaaacatcagaaaacaccctctatgaaatcaaatgtactgtacctgggttacttgcaaaaattactaatgcttcagtttttctgttgtatttcatttccagttttcaggcagttatttttattattgtactttaagcttttaagatgaattgttatacaagaggtgcttatgcttagcttgatgaccaggatgttatttttaacaaaatgattgctgaagtgtttcatcctggctggtccttcacttgtgttggatttagaagtgaatgtgtttggaatatggcctacagagaatagaaacaaatccatgtaaacaattttgaaggaggcatgggagctaaaaatcctgtgatactaagatctcagtcatatgaattacaacgtagtatttactggcaagaaggagaaagttgaaggactcagctaaaggagtacagcaattgtagtaactgacacatcctctctttgcaagctgctgactgggcacactcatgccaagtttcagaattattggtcttctgggtttttgctttttaaaagaggtgtgggagcagaggaatggaaacaatcgtgagtttttgagctagggaaagttggagctcctttaatctttttaaaggatcagtgctgccctaagtgaataaactcaattgtccatctttattttagagttttaatgaattcaaggaagggagcatagcatatctgtggcaaactattttccactcaaatcctgagttattgctgcatgctttaatttcttccctttcagcatctgagaaccttaaagccaatgtctgcgatctttttttggatatttatacttttagatatatagtacctttaagtagcagtatgggacaaggcttgtaaatgttttgtctaatgttctattgtcaccttttatgcatttatcacttccaaatctaactttgcacaagtaacccatgtaaaaaaaaatgtacatttttcaaaagttgtaaataaaaataaccttaaaaa

SEQ ID NO: 984 - DNA, 1639 bp, HOMO SAPIENS
gatccacgagctggagtgattagagccctggaagggaattgttactcccgtggagaagtccccttttcctggcagtcgtctgcactgtacacgctggatgcctctctccatccaccccactcactcgctcctctctcacctcctctctccctctcctgcattgatttttttttttcctttttagttgactgaaacaaaacaaaacaaaagggccactggatgtctgccttcttggggggtgagccagacagactgacaaacaaacagccccaactgtgttcgggggagggtttcgcctcccgttttgcccggcagcagcagcatggacgtgttggctagttatagtatattccaggagctacaacttgtccacgacaccggctacttctcagctttaccatccctggaggagacctggcagcagacatgccttgaattggaacgctacctacagacggagccccggaggatctcagagacctttggtgaggacttggactgtttcctccacgcttcccctcccccgtgcattgaggaaagcttccgtcgcttagaccccctgctgctccccgtggaagcggccatctgtgagaagagctcggcagtggacatcttgctctctcgggacaagttgctatctgagacctgcctcagcctccagccggccagctcttctctagacagctacacagccgtcaaccaggcccagctcaacgcagtgacctcattaacgcccccatcgtcccctgagctcagccgccatctggtcaaaacctcacaaactctctctgccgtggatggcacggtgacgttgaaactggtggccaagaaggctgctctcagctccgtaaaggtgggaggggtcgcaacagctgcagcagccgtgacggctgcgggggccgttaagagtggacagagcgacagtgaccaaggagggctaggggctgaagcatgtcccgaaaacaagaagagggttcaccgctgtcagtttaacgggtgccggaaagtttatacaaaaagctcccacttaaaggcccaccagaggactcacacaggtgagaagccttataagtgctcatgggagggatgtgagtggcgttttgcacgaagcgatgagctcacgaggcactacaggaaacacacaggtgcaaagcccttcaaatgcaaccactgcgacaggtgtttttccaggtctgaccatcttgccctccacatgaagagacatatctaaaaaaccgaaaggccagagttgccatggcatcggctagtgtctaaaggaaacgccatgaggcagggggctggacttcaggcggggacccattgcctcgcagaagaaagctctcacttataaacctctgtacacacacacacacacacacacatatacacacactcacagacccacacacatacacactgtcatgcactcaactatatttaaaatatatacgtctattctttatgccttgccctagccagatggaagaagatgaagaaggaaaccaggtgaactcagcaaggcagactggctgcttacttcagcactattggaattatttcccgctgttgccaatggaaatcaaagaaaatggatgtgacgtctgtgcaggtggacggcagtccgaggggcttatttcac

SEQ ID NO: 985 - DNA, 2750 bp, HOMO SAPIENS
agccggagcccgatccctagccctgcggccgcgcctccctcgccgtccccgcctggagcccggcgccgccgccgccctgccgcccccgccagccgcgccgtgacgcgggcatgagcctgctccgcggcgccgctgagcaggcgctcctggcccgggcctcggcgcccagcaggcgcggggcgaaggagctgctagaacaatgctgaggcgggtgaggtgaggagcagcccctcgcggcagccccgacagagtgtctggaacaggtgattggaggagccggagacccaggcacctgggcatccttcccctcgcctctgccaggccccgcgcccctaaaaggtgggaaaaccatggcgaccaatttcagtgacatcgtcaagcaaggctacgtgaagatgaagagcaggaagctcgggatctaccggaggtgctggctggtgttccggaaatcctccagcaaggggccccagcggctggagaagtatccagatgagaagtcggtgtgcctccggggctgccccaaggtgactgagatcagcaacgtcaagtgtgttacgcggctccccaaggagaccaagcggcaggcggtggccatcatattcactgatgactcggcacgtaccttcacctgcgactcagagctagaggcagaggagtggtacaagacactatctgtggagtgtctggggtcccgcctcaacgacatcagtctgggagaacctgacctcctggccccaggggtgcagtgtgaacagacagatcgcttcaatgtcttcctgctgccctgccccaacctggacgtgtatggcgagtgcaagctgcagatcacccacgagaacatctacctctgggacatccacaacccccgtgtgaagctcgtctcgtggcccctctgctcactgcgccgctatggccgggatgccacacgctttaccttcgaggctggccggatgtgtgatgctggggaaggactctataccttccagacacaagagggggagcagatttaccagcgcgtccacagtgccaccctggccatcgcagagcagcacaagcgggtcctgctggaaatggagaagaacgtgaggctgctgaacaagggcacggaacattactcgtatccctgcacacccacgaccatgctgccgcgcagtgcctactggcaccacatcactggttcccagaacatcgccgaagcctccagctatgctggtgaggggtatggggcagcccaggccagctcggaaacagacctcctcaacagattcatcctgctaaagccaaagcccagccagggggacagcagtgaggccaagaccccatcccagtgaccacagtgctggcgagcaccgatgactgctgggggctgcctgctgcggggctggctgcagtgtaccgtggacagcctcagggggctgtcggccaagagcctggagaaagggagcaagctgccccctccttgcccccaaggatgaggctggactgaggcaaagggctggccacaccacctgagcatgtgtgaggggttggagctaccgtgggactatatactgttaatgattttaatatatatggcttatgacatactctgtatcaatgagatcccctcaccctcaccccatccttccccaccaatacacacaaattttttaatcccatgaccaggccacggtcaaggctgtttttgagtatgagtgcagtcgtgtccatcctccatggcacagccctcctgctgccaggacctgcttgaactaccagggccacaggagggggataatcagagcttgaggctggcactctgactgctggcttttcccagacagcccaagggccggaacagcaggtggcttctcagttcctctgggcctggagtgacacaggaaggatctgcacttcctctgtgctgcttgccagccttgcagttggagttttaagcagaggtgacatctggttgacgcctcaggtgaaaatctggttttaaaatgtaacttctgcacaggctccttcctgctttgtaggctgggaagatgcccctggggtaggggtgctgattacctcagccatgtggaggaaggctggagcttgttcctgccccaggaataggccaggagggaaggccgcagcaggactgccgtggggagcacccctgctgcccccctctcactgaccaggggtggacaatgcccaagcagagggagcccccttgccctgtttggccaccctctggccagccaaaagcactctgaaaccaagaccttcccatttcctcctccccacatggtgctgaggctccctgctgcaatgcaattaaagcaattgattttctagtgctggtatttgttgactaccatgcagaagggctatctttctattcacgtcaaacttttggttgtgtggggttttttgttgttttttgggttttgttttttaatactttagggtcctgatttgtgggaacagaccttcttgtaaataaccactatttgagttgtggcaggaggatgataaagcacgcggcccctcccaaaggagcccttgagctagggaggtggtgcagtcagcctcgctctcaacgtgacccggggaatgaccacccagagggatgagctagcctgtagaggggaactggggtccaaaggtctttggggagggaggcagagctggctggctcagctaagtggcacgatgacgcatgaaggagattatgttgtgctctttattgccaaaaataaacacttttaaaaagacaa

SEQ ID NO: 986 - DNA, 1319 bp, HOMO SAPIENS
atacatagtttactttcatttttgactctgaggctctttccaacgctgtaaaaaaggacagaggctgttccctatggcagaaggcaaccacagaaaaaagccacttaaggtgttggaatccctgggcaaagatttcctcactggtgttttggataacttggtggaacaaaatgtactgaactggaaggaagaggaaaaaaagaaatattacgatgctaaaactgaagacaaagttcgggtcatggcagactctatgcaagagaagcaacgtatggcaggacaaatgcttcttcaaaccttttttaacatagaccaaatatcccccaataaaaaagctcatccgaatatggaggctggaccacctgagtcaggagaatctacagatgccctcaagctttgtcctcatgaagaattcctgagactatgtaaagaaagagctgaagagatctatccaataaaggagagaaacaaccgcacacgcctggctctcatcatatgcaatacagagtttgaccatctgcctccgaggaatggagctgactttgacatcacagggatgaaggagctacttgagggtctggactatagtgtagatgtagaagagaatctgacagccagggatatggagtcagcgctgagggcatttgctaccagaccagagcacaagtcctctgacagcacattcttggtactcatgtctcatggcatcctggagggaatctgcggaactgtgcatgatgagaaaaaaccagatgtgctgctttatgacaccatcttccagatattcaacaaccgcaactgcctcagtctgaaggacaaacccaaggtcatcattgtccaggcctgcagaggtgcaaaccgtggggaactgtgggtcagagactctccagcatccttggaagtggcctcttcacagtcatctgagaacctagaggaagatgctgtttacaagacccacgtggagaaggacttcattgctttctgctcttcaacgccacacaacgtgtcctggagagacagcacaatgggctctatcttcatcacacaactcatcacatgcttccagaaatattcttggtgctgccacctagaggaagtatttcggaaggtacagcaatcatttgaaactccaagggccaaagctcaaatgcccaccatagaacgactgtccatgacaagatatttctacctctttcctggcaattgaaaatggaagccacaagcagcccagccctccttaatcaacttcaaggagcaccttcattagtacagcttgcatatttaacattttgtatttcaataaaagtgaagacaaacga

SEQ ID NO: 987 - DNA, 276 bp, HOMO SAPIENS
  misc_feature (26)..(26): n is a, c, g, or t
  misc_feature (65)..(65): n is a, c, g, or t
  misc_feature (88)..(88): n is a, c, g, or t
tctatatctgtgctacccaatacagnttagtgtcttgctgcatatagctattgagctcttcaganttggctagaggaagtgacttttncacatttaactgatttaaatttcaatagccatgtgtgatctgtgactaccatgttaggcagcacagctttatgagattaatattgtagaatcatgtgacaaaaagcagcattgtgagagaacagttacgtgaaaatataaggaagcatagagctcatggggttgagccagtcagaatcgcatttttaa

SEQ ID NO: 988 - DNA, 2311 bp, HOMO SAPIENS
cggtactctgagtgcagtcagtcctcggcgctgttttccctgatttgctgtcgacgccaggaaggaaggacgcgtgcagaggaccgcagaggggtggccgtggctgagaggagacagcgccgcagcactgagggtttgggcttgcaggcgctgcaggagacgcccaggcggagtcttgtctcgcagccagctctgagcgggaggcctgagcgggaagcattggcgtccgagcgacttctaggagcctggggttcggcgctatggaggagctcgatggcgagccaacagtcactttgattccaggcgtgaattccaagaagaaccaaatgtattttgactggggtccaggggagatgctggtatgtgaaacctccttcaacaaaaaagaaaaatcagagatggtgccaagttgcccctttatctatatcatccgtaaggatgtagatgtttactctcaaatcttgagaaaactcttcaatgaatcccatggaatctttctgggcctccagagaattgacgaagagttgactggaaaatccagaaaatctcaattggttcgagtgagtaaaaactaccgatcagtcatcagagcatgtatggaggaaatgcaccaggttgcaattgctgctaaagatccagccaatggccgccagttcagcagccaggtctccattttgtcagcaatggagctcatctggaacctgtgtgagattctttttattgaagtggccccagctggccctctcctcctccatctccttgactgggtccggctccatgtgtgcgaggtggacagtttgtcggcagatgttctgggcagtgagaatccaagcaaacatgacagcttctggaacttggtgaccatcttggtgctgcagggccggctggatgaggcccgacagatgctctccaaggaagccgatgccagccccgcctctgcaggcatatgccgaatcatgggggacctgatgaggacaatgcccattcttagtcctgggaacacccagacactgacagagctggagctgaagtggcagcactggcacgaggaatgtgagcggtacctccaggacagcacattcgccaccagccctcacctggagtctctcttgaagattatgctgggagacgaagctgccttgttagagcagaaggaacttctgagtaattggtatcatttcctagtgactcggctcttgtactccaatcccacagtaaaacccattgatctgcactactatgcccagtccagcctggacctgtttctgggaggtgagagcagcccagaacccctggacaacatcttgttggcagcctttgagtttgacatccatcaagtaatcaaagagtgcagcatcgccctgagcaactggtggtttgtggcccacctgacagacctgctggaccactgcaagctcctccagtcacacaacctctatttcggttccaacatgagagagttcctcctgctggagtacgcctcgggactgtttgctcatcccagcctgtggcagctgggggtcgattactttgattactgccccgagctgggccgagtctccctggagctgcacattgagcggatacctctgaacaccgagcagaaagccctgaaggtgctgcggatctgtgagcagcggcagatgactgaacaagttcgcagcatttgtaagatcttagccatgaaagccgtccgcaacaatcgcctgggttctgccctctcttggagcatccgtgctaaggatgccgcctttgccacgctcgtgtcagacaggttcctcagggattactgtgagcgaggctgcttttctgatttggatctcattgacaacctggggccagccatgatgctcagtgaccgactgacattcctgggaaagtatcgcgagttccaccgtatgtacggggagaagcgttttgccgacgcagcttctctccttctgtccttgatgacgtctcggattgcccctcggtctttctggatgactctgctgacagacgccttgccccttttggaacagaaacaggtgattttctcagcagaacagacttatgagttgatgcggtgtctggaggacttgacgtcaagaagacctgtgcatggagaatctgataccgagcagctccaggatgatgacatagagaccaccaaggtggaaatgctgagactttctctggcacgaaatcttgctcgggcaattataagagaaggctcactggaaggttcctgagaactgcttcaatgtggtatctttgtatggcaatgtatatagatttttttaaaagaataaatgttgttttgcaaatgtag

SEQ ID NO: 989 - DNA, 1302 bp, HOMO SAPIENS
agctggggcgcggccgcctgtctgcacagacagcaccatgtcgctcatggtcgtcagcatggtgtgtgttgggttcttcttgctgcagggggcctggccacatgagggagtccacagaaaaccttccctcctggcccacccaggtcccctggtgaaatcagaagagacagtcatcctgcaatgttggtcagatgtcaggtttcagcacttccttctgcacagagaagggaagtttaaggacactttgcacctcattggagagcaccatgatggggtctccaaggccaacttctccatcggtcccatgatgcaagaccttgcagggacctacagatgctacggttctgttactcactccccctatcagttgtcagctccgagtgacccactgcttgtttctgtcacaggaaacccttcaaatagttggccttcacccactgaaccaagctccgaaaccggtaaccccagacacctgcatgttctgattgggacctcagtggtcatcatcctcttcatcctcctcctcttctttctccttcatcgctggtgctgcaacaaaaaaaatgctgttgtaatggaccaagagcctgcagggaacagaacagtgaacagggaggactctgatgaacaagaccctcaggaggtgacatatgcacagttgaatcactgcgttttcacacagagaaaaatcactcgcccttctcagaggcccaagacacccccaacagatatcatcgtgtacacggaacttccaaatgctgagccctgatccaaagttgtctcctgcccatgagcaccacagtcaggccttgaggggatcttctagggagacaacagccctgtctcaaaactgggttgccagctccaatgtaccagcagctggaatctgaaggcgtgagtctgcatcttagggcatcgctcttcctcacaccacaaatctgaacgtgcctctcccttgcttacaaatgtctaaggtccccactgcctgctggagagaaaacacactcctttgcttagcccacaattctccatttcacttgacccctgcccacctctccaacctaactggcttacttcctagtctacttgaggctgcaatcacactgaggaactcacaattccaaacatacaagaggctccctcttaacacggcacttagacacgtgctgttccaccttccctcatgctgttccacctcccctcagactagctttcagccttctgtcagcagtaaaacttatatattttttaaaataatttcaatgtagttttccctccttcaaataaacatgtctgccctca

SEQ ID NO: 990 - DNA, 370 bp, HOMO SAPIENS
  misc_feature (26)..(27): n is a, c, g, or t
aaaaactgctttttcacgtcaaatgnngttggttttataattttatggaaactgaaggggactagctgaagttatttattactttccagcagctaataaatgttggtgtttaatagctgctgctctttaatatgggggtattgaataacttacataaaatatgttagcaaaacttgaaaaagttaaagcactgtccacttcttatggacttcttggccatttcctctcctttctcttcccctaaatgggaatggactgtaggtagacctcatgagtataagtctcagatgtccattatgttaccactggaaccatttagattagaagctgatcttcagtaaatatatttacattatccagtttgatcaga

SEQ ID NO: 991 - DNA, 504 bp, HOMO SAPIENS
  misc_feature (94)..(94): n is a, c, g, or t
  misc_feature (105)..(105): n is a, c, g, or t
  misc_feature (347)..(347): n is a, c, g, or t
cttccccttgtatcttctgataacattagctgtagtaaaaaggcgcagttcccatagaaaagccaaacagaggaaggatatgattccatttgancgatgaactgnaactggaaggggtgactcctgattttgtatttgacagattgagtcacttctgttccatctagccaacatttgggctgtagaaagaagcccctgaattgattgtttatttcagagagatgggcatgattctcactactttgccctgtagtcgcttggaggacaaatggcttttggagccatttggttcccaaactttctttagttttaataaaacaattattaaacagtgagaccctaatctnttacctaataagagtaagtgaggaaaacgccactatcagctgaatgtgaattccttgtgggaaaggtttatgcaactttcggaggcccagtctgtacatctctgtgcccaaatgtggccatttccactttgtccagcagagccctttaatcttatgc

SEQ ID NO: 992 - DNA, 4740 bp, HOMO SAPIENS
acaccgcacggcgaagtgggggagggcagtccgtgtgtgtctgtgttgttgttcggcggcggcggcggcggtaagatggctgcccacgggggctccgcggcgtcctcggcgctgaaggggttaattcaacagttcaccaccattaccggtgcaagtgaaagtgtaggaaaacatatgcttgaagcgtgcaacaataatctggaaatggcagtcactatgtttttggatggtggaggaatcgctgaagagcccagtaccagttcagcaagtgtctctactgtcagaccacacacagaagaagaagttcgtgccccaattcctcaaaagcaggaaatactggtggaaccagaaccattatttggtgctcctaaaagacgacggcctgcacgttcaatttttgatggtttccgggattttcagactgaaactattcggcaagaacaagaattaagaaatggaggagctatcgataagaaattaactacccttgcagatctattccggccacccattgatttgatgcataaaggcagctttgaaacagccaaagagtgtggccagatgcaaaataagtggctgatgataaacattcaaaatgttcaagactttgcatgtcagtgcctcaaccgcgatgtgtggagcaacgaagctgtgaagaatattatccgggaacatttcattttctggcaggtttatcatgacagtgaggaaggtcagagatacatacagttttataagttaggggatttcccctatgtttccatattggacccacggacaggtcagaagctagtagaatggcaccagttagatgtatcttctttcttggaccaagtgacgggatttctgggtgaacatggacaactggatggactttctagcagtccccccaaaaaatgtgcccgttcagagagccttatagatgcaagtgaagacagccagctagaagctgccatcagagcctccttacaagaaacacattttgattcaacacagacaaaacaggatagccgctcagatgaagaatctgaatctgaacttttttctggcagtgaggagttcatatccgtttgtggctctgatgaagaagaagaggtagagaatcttgccaagtccagaaagtctccccacaaagatttggggcatagaaaagaggagaatagaaggccgctgactgagccaccagtcagaactgatcctggaacagccacaaaccaccaaggattgccagctgtggattcagagatactggagatgccacctgaaaaagcagatggagtagtggaggggatagatgtaaatggaccaaaagcacagctgatgttgcggtatccagatggaaaaagggaacagatcactcttccagagcaagctaaactgctagctttggtgaagcacgtgcagtctaaaggatacccaaatgaacgttttgaacttctcaccaactttcctcgaaggaaattatctcatctggactatgatattacattgcaagaggcaggcctttgtcctcaagagactgtctttgtacaggaaagaaattaacaccatggcttgacctctctcagcttaccccttttttcccttttcctgtgagatacatgtcactaagtatgcattttggctcataggaccacagagccaaagttgggcaagcaagtcaccttccttctcttatttcttgatctctcctataatcagtctctttctccccctttgtttctttctcctcttctgttttctcgctccccactccgtacccttctgcctccccctccccccacacttttctttcttacctaatctggtgaccaaactgaagtgtaaggataagacctctcctagtactagcagcaggaattgtgtgttccagtaagtggtctcttgcacggcacttttttgggatcaaatgttaacgttactccccagactcttcgggcaaaggaatggctagattcagagtaagaacaaccctcccttttttgtaagtccccgtgtttagcagggagaagaaattctctaacatgggtttggttttgttgtgttcttcatgtggaaatgtcgcttaacaaaatatccaggcttttgtttacgtggaaaaagcatcccttgtaatgattgctcatcatacttaaaaacctttttcaaaggattttcatgttcccagctataaggactatttccatgacatgtgttattggcagaatgagtgttaaatatggagcatatagcatggggtgactttcattgtcctaacctgagacagttttccttattactctgtattgatcctgctagtccaagaatggacatgaagtgaacctatcgtggtgactgggataggaaggtgcttgctatttttgccagcacagcatattagttcctttggagccctccattgtctgagtctgcagtgatctgtaggaaggcagctggtcaataatcatgtagtacaatggcttggaattgtaaccactatggttattgattgtcctgtgttgtttcaggcatacttaggtatgtccctggggaaaaagaaaaccattcagctgagagttgctaaccatgttcttttggttagaaataatggttcattttttgcccctggttggaatagtctctaaaaggctctggtgactgaattgaacatgagtccgcatgctgttttctttcaaaaggtatcaaaacggaaagcctctctaaggggaagacctttcaactccattcagaagacaacatttagtaaggaggatggcggaggttactagtaattttcagatgtcttgggctttttctgccaacaaaacccaaaatcaaattagagttggtgaaagctttcttcagtgtttttagaagaggccatcttgaatctgtagaataccatttacacatcaacttcaccctatgctcatttcgtattttgagcttaaatggagtcctctgaagggggggtagtcgtgattctggtggcaaaactagaacttttaacttgtaaaatgaaaaatattaaatggacctttttgtcagttgaggatttagattgattcttttatctgaggagcgtatgttcctcagatgttgcgtagagacctttaggttttcatctactttaagattgctctcttggcaattaggggatttgggaaaagaagaaaaaaagatgccatgtgttgctagtacacagttataggatatggtttctaatggttgaattttgaggaactctccctaaagaatgagttttatatctcctcaaggaaatcatggaaaaatctgtttattcttcagtgagtccttttgaattaatgttcttaaatttttttctaagtctgtgtaagtgcttatgtataagtatataattgtataaatatttataaatatatttatataattacggtttcatttctaccttgagtcaaagttctgtctttagattggtgactgagtaatacttacactttggtgttttttcttaggttcttgaggcttacttaactagcagcttctgatttattgagtgaaagatggttttcatgttaattcctcagttgcatctctgaacttggataacatacttgccgtttgaaaaatagagctgtatactgtcaaaggtgcactggagggtaaaacatttgttggtagtagacaagctcagaaatccaaaaattcagggagggcacagggtaagaagagaggtttgctcagctttgtgctctgatggcacccatctgtactccagcaaagtcatagctgaagcccaaatcgctcaaacgtgtgaagtcaatcatttttcctatagggctctgtttccttttctttaccttctagcttctcttgataaaacagttgggagaactgccaacgtgttcatcagtgagagggtgtggttctttccgatatgttcagcacgtgcatattcatttatgagaaaccaaagtaacttcttcaactcgggttactgtgggatgattaagtagatataaagtgatttaaaagacagcatggtactttcactcagcttaacatgcagctgggatgtctacaatacaagatgtggtgggttttattttattttattttgaggcaggagtgtaattatcttagggttgatataaaggcccatgggaagagttacggattgtacatgggaagaatccataaggagtattgccttgctcaagaatttaatccgctgacagtatgcttcttccagtttgccttacttcctctgcaagtttctttgctccttagggcagaggttttattgaatagattaaatgaggtcagtaagattagttaaaaatagtcattccttgtgggtgttggacacagcttgaaaggagtgtttaaaaaaaaaaagctagggaggaaaagaacaagaaagatagacttcgagagtgataagagaaaaatacagggagatggaatggaaactaccaggaaggccgggcgcggtggctcatgcctgtaatcccaacactttgggaggcggaggtgggcagatcacctaaggtcaggagatcgaggccagcctgagcaacatggtgaaaccccgtctctactaaaaatacaaaaattacctgggtgtggtggcgtgcacctgtaatcccagctactcagaggctgaggcaggggaatggcttgaacctgggaggcagaggttgcagtgagccaagatcgcaccattacactccagcctgggcgacaaagcgacactccatctcaaatttaaaaaaaaaa

SEQ ID NO: 993 - DNA, 390 bp, HOMO SAPIENS
  misc_feature (161)..(161): n is a, c, g, or t
  misc_feature (179)..(179): n is a, c, g, or t
  misc_feature (188)..(188): n is a, c, g, or t
  misc_feature (194)..(194): n is a, c, g, or t
  misc_feature (281)..(281): n is a, c, g, or t
tgtgagcagatgcctgtcagggacagctctatcagaacagaccgagtccagcccagtgagccgtgatgttctctcactgctcggtcccccctctgccatctacagcgacataggttgggtctgttcccctggcagacagcaggccttcagagccctgccanaatctcttgtgtctcccntagcacacncacatncctccccacccaccaccgccaggcctggatagccctagttctctcccatttcttggtgtcagggtgttcagaccttttaagcagatnaatgctaactcattcaaggcttttaaaacccagtgccttagcagggtacagtggcacacacctgtagttacagctgtgtgggaggattgcaggagttcctgtctagcct

SEQ ID NO: 994 - DNA, 288 bp, HOMO SAPIENS
ggcagaaatcagtttgtgatgggctattgatggtaaactaaggagctaaatggaaagctctggcaaacccttgaatgagagagaaatgatctaacagagaatcctctaacagaagtaggatgaacagattaaaggaaaaagtagggggagaccaggtgggaatctttcgcaccaagtcaggaaggaaatagagttgtcacaaaagctgagggaaggaagaggaggagaggcaaattcaagggactaaagaggttgactctttagaacttggcgatgatgtgaaaatgt

SEQ ID NO: 995 - DNA, 2100 bp, HOMO SAPIENS
ctgcccatccgtcccgccccctagacgcacgtccgctcgcccggcgcccgagccagtccgcgcgcacgccgtctgcgccccgaaagccccgccccaaggcgcgcccgcccaccgctctccacgtgctcgctggagggcggtgcgaggggccgagccgacaagatgttcttgctgcctcttccggctgcggggcgagtagtcgtccgacgtctggccgtgagacgtttcgggagccggagtctctccaccgcagacatgacgaagggccttgttttaggaatctattccaaagaaaaagaagatgatgtgccacagttcacaagtgcaggagagaattttgataaattgttagctggaaagctgagagagactttgaacatatctggaccacctctgaaggcagggaagactcgaaccttttatggtctgcatcaggacttccccagcgtggtgctagttggcctcggcaaaaaggcagctggaatcgacgaacaggaaaactggcatgaaggcaaagaaaacatcagagctgctgttgcagcggggtgcaggcagattcaagacctggagctctcgtctgtggaggtggatccctgtggagacgctcaggctgctgcggagggagcggtgcttggtctctatgaatacgatgacctaaagcaaaaaaagaagatggctgtgtcggcaaagctctatggaagtggggatcaggaggcctggcagaaaggagtcctgtttgcttctgggcagaacttggcacgccaattgatggagacgccagccaatgagatgacgccaaccagatttgctgaaattattgagaagaatctcaaaagtgctagtagtaaaaccgaggtccatatcagacccaagtcttggattgaggaacaggcaatgggatcattcctcagtgtggccaaaggatctgacgagcccccagtcttcttggaaattcactacaaaggcagccccaatgcaaacgaaccacccctggtgtttgttgggaaaggaattacctttgacagtggtggtatctccatcaaggcttctgcaaatatggacctcatgagggctgacatgggaggagctgcaactatatgctcagccatcgtgtctgctgcaaagcttaatttgcccattaatattataggtctggcccctctttgtgaaaatatgcccagcggcaaggccaacaagccgggggatgttgttagagccaaaaacgggaagaccatccaggttgataacactgatgctgaggggaggctcatactggctgatgcgctctgttacgcacacacgtttaacccgaaggtcatcctcaatgccgccaccttaacaggtgccatggatgtagctttgggatcaggtgccactggggtctttaccaattcatcctggctctggaacaaactcttcgaggccagcattgaaacaggggaccgtgtctggaggatgcctctcttcgaacattatacaagacaggttgtagattgccagcttgctgatgttaacaacattggaaaatacagatctgcaggagcatgtacagctgcagcattcctgaaagaattcgtaactcatcctaagtgggcacatttagacatagcaggcgtgatgaccaacaaagatgaagttccctatctacggaaaggcatgactgggaggcccacaaggactctcattgagttcttacttcgtttcagtcaagacaatgcttagttcagatactcaaaaatgtcttcactctgtcttaaattggacagttgaacttaaaaggtttttgaataaatggatgaaaatcttttaacggagacaaaggatggtatttaaaaatgtagaacacaatgaaatttgtatgccttgatttttttttcatttcacacaaagatttataaaggtaaagttaatatcttacttgataaggatttttaagatactctataaatgattaaaatttttagaacttcctaatcacttttcagagtatatgtttttcattgagaagcaaaattgtaactcagatttgtgatgctaggaacatgagcaaactgaaaattactatgcacttgtcagaaacaataaatgcaacttgttgtg

SEQ ID NO: 996 - DNA, 2793 bp, HOMO SAPIENS
ctacccctttgtgagcagtctaggactttgtacacctgttaagtagggagaaggcaggggaggtggctggtttaaggggaacttgagggaagtagggaagactcctcttgggacctttggagtaggtgacacatgagcccagccccagctcacctgccaatccagctgaggagctcacctgccaatccagctgaggctgggcagaggtgggtgagaagagggaaaattgcagggacctccagttgggccaggccagaagctgctgtagctttaaccagacagctcagacctgtctggaggctgccagtgacaggttaggtttagggcagagaagaagcaagaccatggtggggaagatgtggcctgtgttgtggacactctgtgcagtcagggtgaccgtcgatgccatctctgtggaaactccgcaggacgttcttcgggcttcgcagggaaagagtgtcaccctgccctgcacctaccacacttccacctccagtcgagagggacttattcaatgggataagctcctcctcactcatacggaaagggtggtcatctggccgttttcaaacaaaaactacatccatggtgagctttataagaatcgcgtcagcatatccaacaatgctgagcagtccgatgcctccatcaccattgatcagctgaccatggctgacaacggcacctacgagtgttctgtctcgctgatgtcagacctggagggcaacaccaagtcacgtgtccgcctgttggtcctcgtgccaccctccaaaccagaatgcggcatcgagggagagaccataattgggaacaacatccagctgacctgccaatcaaaggagggctcaccaacccctcagtacagctggaagaggtacaacatcctgaatcaggagcagcccctggcccagccagcctcaggtcagcctgtctccctgaagaatatctccacagacacatcgggttactacatctgtacctccagcaatgaggaggggacgcagttctgcaacatcacggtggccgtcagatctccctccatgaacgtggccctgtatgtgggcatcgcggtgggcgtggttgcagccctcattatcattggcatcatcatctactgctgctgctgccgagggaaggacgacaacactgaagacaaggaggatgcaaggccgaaccgggaagcctatgaggagccaccagagcagctaagagaactttccagagagagggaggaggaggatgactacaggcaagaagagcagaggagcactgggcgtgaatccccggaccacctcgaccagtgacaggccagcagcagagggcggcggaggaagggttaggggttcattctcccgcttcctggcctcccttctcctttctaagccctgttctcctgtccctccatcccagacattgatggggacatttcttccccagtgtcagctgtggggaacatggctggcctggtaagggggtccctgtgctgatcctgctgacctcactgtcctgtgaagtaacccctcctggctgtgacacctggtgcgggcctggccctcactcaagaccaggctgcagcctccacttccctcgtagttggcaggagctcctggaagcacagcgctgagcatggggcgctcccactcagaactctccagggaggcgatgccagccttggggggtgggggctgtcctgctcacctgtgtgcccagcacctggaggggcaccaggtggagggtttgcactccacacatctttcttgaatgaatgaaagaataagtgagtatgcttgggccctgcattggcctggcctccagctcccactccctttccaacctcacttcccgtagctgccagtatgttccaaaccctcctgggaaggccacctcccactcctgctgcacaggccctggggagcttttgcccacacactttccatctctgcctgtcaatatcgtacctgtccctccaggcccatctcaaatcacaaggatttctctaaccctatcctaattgtccacatacgtggaaacaatcctgttactctgtcccacgtccaatcatgggccacaaggcacagtcttctgagcgagtgctctcactgtattagagcgccagctccttggggcagggcctgggcctcatggcttttgctttccctgaagccctagtagctggcgcccatcctagtgggcacttaagcttaattggggaaactgctttgattggttgtgccttcccttctctggtctccttgagatgatcgtagacacagggatgattcccacccaaacccacgtattcattcagtgagttaaacacgaattgatttaaagtgaacacacacaagggagcttgcttgcagatggtctgagttcttgtgtcctggtaattcctctccaggccagaataattggcatgtctcctcaacccacatggggttcctggttgttcctgcatcccgatacctcagccctggccctgcccagcccatttgggctctggttttctggtggggctgtcctgctgccctcccacagcctccttctgtttgtcgagcatttcttctactcttgagagctcaggcagcgttagggctgcttaggtctcatggaccagtggctggtctcacccaactgcagtttactattgctatcttttctggatgatcagaaaaataattccataaatctattgtctacttgcgattttttaaaaaatgtatatttttatatatattgttaaatcctttgcttcattccaaatgctttcagtaataataaaattgtgggtgg

SEQ ID NO: 997 - DNA, 1434 bp, HOMO SAPIENS
cgatctcctggcaacgctgcggccccgcccacatcatgacgcccgaggagaacgcgggtaccaaactcttgctgcagggttttgagagccgcttcctagtggcgcgcacactgcgctccttcccctggcagagcttagaggcaaagttaagagactcatcagattctgagctgctgcaggatattttgcagaagactgtgaggcatcctgtgtgtgtgaagcacccgccgtcagtcaagtatgcctggtgctttctctcagaactcatcaaaaagcacgaggctgtccacacggagcctttggatgagctgtacgaggcgctggcggagaccctgatggccaaggagtccccccagggccaccggagctatttgttgccctcgggaggctcggtcacactctccgaaagcatggccatcatctcccacagcaccacgggtctggtcacatgggatgccgccctctacattgcagaatgggccatcgagaacccggcagccttcactcacaggtctgtcttagagcttggcagtggtgccagcctcacaggcctggccatctgcaagatatgccgcccccgggcatacatcttcagcgactgtcacagccgagtcctcgagcagctccaaggaaatgtccttctcaatggcctctcattagaggcagacatcactgccaacttagacagccctagggtgacaatggcccagcgctggactgggacgtagtgacggtccatcagcgctctgccttccagctagatgttgtcattgcagcagatgtgctgtattgcccagaagccattgtgtcactggtcagggtcctgcggaggctggctgcctgccgggagcaccagcgggcttctgaggtctacgtggccttcgctgtccgcaattgagagacgtgccagctgttcaccaccgagctaggtttttgcttgtctgatgactgatggctccacccagacctgccaaccactcccgcggccccatccagaagtggctcagcgtgcatgaggaccatctccaacatccctgtgattgtacccccaaccaaccagcagcaagaacctattgcctagtcacctcccctctctttccccaactatcattgaaaaagtctggcttccaaattttccgggagactgatttgggcccagccccagggcgcaaggccgcttgcatcagcagcgtgcgtgagcagatgcgccagcaagatagcaaaagcaggaagagagccagccggaagacaagtacctctgaagatggagaaagaggccatctgggtacaacgttgcagttacgtcagaccaggacacttcctgtttacaggagactataaaacctttgccccatcctcacttggggctgacgccgttttaggcctcagcccgccagcacccaggctctcattaaaacagcatgttgctccaca

SEQ ID NO: 998 - DNA, 9874 bp, HOMO SAPIENS
cccacctctccgcgctgagcagccacgtcggcggcggtccctggtccagggaggggcgtggcaaaggcccgtgcgcggtacgtgtcccgcccctcgctgcccggagcccggatgaagagtaacgccattaccgccggagccgccgagagccttagccgacggaaactggacactggaccggcagcgccatgagactcctcccccgcttgctgctgcttctcttactcgtgttccctgccactgtcttgttccgaggcggccccagaggcttgttagcagtggcacaagatcttacagaggatgaagaaacagtagaagattccataattgaggatgaagatgatgaagccgaggtagaagaagatgaacccacagatttggtagaagataaagaggaagaagatgtgtctggtgaacctgaagcttcaccgagtgcagatacaactatactgtttgtaaaaggagaagattttccagcaaataacattgtgaagttcctggtaggctttaccaacaagggtacagaagattttattgttgaatccttagatgcctcattccgttatcctcaggactaccagttttatatccagaatttcacagctcttcctctgaacactgtagtgccaccccagagacaggcaacttttgagtactctttcattcctgcagagcccatgggcggacgaccatttggtttggtcatcaatctgaactacaaagatttgaacggcaatgtattccaagatgcagtcttcaatcaaacagttacagttattgaaagagaggatgggttagatggagaaacaatctttatgtatatgttccttgctggtcttgggcttctggttattgttggccttcatcaactcctagaatctagaaagcgtaagagacccatacagaaagtagaaatgggtacatcaagtcagaatgatgttgacatgagttggattcctcaggaaacattgaatcaaatcaataaagcttcaccaagaaggttgcccaggaaacgggcacagaagagatcagtgggatctgatgagtaaatgttcctttgtgcaacaattcggtctttacttaacctgccctaatatttttcggcctgatgggaattagtgcagagaagccatgtcaccatagaaggcaactcctacttgtgtgtggactgagcaatcagagtctgtggcgataatattgctgaaaatgcactgcattcatttttctaaagtaacaaatttggtttttttttaaaccattaaaatctatgtgtgtgcgtgtgtatgtatgtgagcagttggtcttaccagaatcattgttgaactacctgaaacaagtctttagaatactaaatataatgctgttgtctcttcctttttgacattttctgattttttcccccaaaactcagttaatatttacccactatgattattgatgtcctgccttgaacagttttaaagaaaacaatttttggaatagctcaaatttcaattgatggcacaaatcagcattttgttgttgttactgtattacaattagtattctaaaggcagaagcagaagtagctgctttttagcaatagaattgtttcagtattttgctgctgtttaatgcgcatcttcagaaaacttcccagtggcttcaaggaatttggggatctctctggcaacaaattgtgaaacatgaaatttctgctgactttaatatatgaaacctaatcctacccccttttttaacaaaaagaaactagtacatttgtgaaaattgtgttgtgttgtccattgttgctctagttctgacccagaggtagctctggagtgattttagacctactcactcagttgtgtgtaggtttttttgttttgttttgagagagaatttttctctccttaatagaagcatcctttttaaagagaagttgccttggtccacacactaagcagaaaaccaagttatcaggacagagatatttcccagttactcctaatcaatgaagaaagtgagttggatatttttaaagcagttaactaattttttcttacctaatcttttgggagttttgcttgttgatataacctttttagttaacctgaaagattccaaaaattgttcttaagtgcttgagactggaaccaaaattaaattgtacttcataaaatcctcttatagagttactcttgccctagattgtaaattaagtttggcattattgtcagactggatggagggtgaagtaaaatagtatgaacaattaagaggctctccccctcttgtctttaagccatattctcctacatgtattttataagaaaatgttaagtcaaattttagtggctctttaattcctgacctcttcattctccttttcagtataacctcccctatgctcatgcccacacagacaaaaaaacaaaacgaaatacacacagaaaaaagtctttccaaactgtttaagtatttaaacatctgagccaaagcagatagaagttattgtataattgttaatcactttgcaaataggggctatcaaattacctatattggcattgctggattataaactctatatctgtaatataaagtgtttgagtttttaattgggctgttatgatcagtagttgattttgagaaagctctatgagctctaagtaactgcatggttttttgtttaatgtaatataggagacccttcacattcccaaggaatatattccaaaacatttttgtgaatatctaagtttgtgaaactactagggcatgatacagtaaggtgtaattacagaatttacgaaatgtaaatggcctctacagagttttatggaatacctggtactaacgtaggcagctgcaaaaccacactgagttacagctgtcagccctcctcattcctaaataacttgccttacatatcagccctcccacttctgaagttcaaattagtgcctcggaaatgtagaatttattatttgtcatttttttttttttagcatagattgagaacagttgaactcttaaatcctcagatgccaggggtctgctctagcatcagtaagtatttagcagaaactaactccgtaatgaatggaattcaattccacacatggtttgttcaagcacacttaataagtagcctattttttaaatgtctttttaaaatgtaaatatttggatgaagtttttctttgttttgatatattcatttgctacaccaactatgttttcagaattcatcttttgaacaacttggtttcagaatatgtaaaatgactttaaggatcttgtgtatcaaacctatccccggatgtgtgagaataatgtgttcataaagcatggatctcgctttggttgtatagcttcctcatttacttcatggtcttacatagctggtgactttcagggctaatctgccctctaaagcattgtcccaggagaggaaaaggaaatgggacctcagaagtagaagcctcagggaaggagtaaagtagaaatcagaagaaaagaagcttcacttgatagtaataaggtttttaacttcaagtaccttcagaaaatgtgattttgataagaggaaagggcaaatttagaccttaaaaaatatggaagaactactgccttaaaagtgcatttgtggcacatcagcctagaactgtatcatggctgtgctggggagaagtaaatggtggtaatgtaacattgccacctttacttaatgatgtgttattttcgaggtacagtagatcaatatagtaataggcgagcctcatatatagcattcatcttgtacaatgatatccatacccttgatatgaaggaaaattgacttggtttgtgcatttgaatactgaaataattttttaaaactcagtgacacataccatctcttgccaagactagaccctgtattttagttcctaaattagatgtttaaatttaaaaacattttcagatgtacttaagtacttccatagtacttttttttttttttttttttttgccccctgagacggagtctctgtgtcacccaggctggagtgcagtggtgcgatctcggctcactgcaacttctgcctcttgggttcaagcagttctccctgtctcagcctcctgagtagcttggattacaggcgcccgtcaccgcacctgcctaatttttgcatttttagtagagacggggtttcgtcatttggccaggctggtcttgaactcctgaccacaggtgatacgcctgccttggcctcccaaagtgtgctgggattacaggcgtgagccactgtgcccggcccactgttcactttttgaatggcatcattttatagctgtagaactaaaatcaatgtttgccccaattttcttaagtaaaactctactttgagctcttacctccaacttagtaaaaagcagcttcacacacaaacaagattcttactggtggaatgttaggtttcgttgttaagttaatctgtctataagctcatccttagaggatatttgaggaggaagaacaccttgcagctgacttgcaaacatctaaataatttatttcgggtgcttatgaatgttactaatggattttgtatgaatttttatcccttttcatttatacaaaaacctgggcttttatgttaattatatcatctgaggttctaaggttttttttttagattttgaaatttagggataatagctcttaggtttgggtaccactttgctgcagtttaagaaagggggaagggaactcatttattaaacatcaatcacgtgctgtgttctgtttgttttctagtcatcatatcacacacctttacgacagctcactgaaggaaggtgatactgttcccattttgtagatggaatagacaaaacctgaatttaagtagcttgctcaaggttccatattgaatatggaaagttcaaatcatctcagtaatgaatataccatatatacttgctgtattgtatctatgataattcagttacccacaatacccttttaaatttctgttaatgacatacctttaaatgtctccttgatgaacagaatcatggtctttaaaaacattttcatgggttgattgcattttcaagctctaaaggattgaaagataaatcttcacgttaaaggtaagagtgaagtatctgctcttgggttacagaaccagatagtactagaactaagattacagggtaaagctgcttttatcttttttctttttctttttctttttttttttgacatggggtctcactgtattgcccaggctggaatgcagtggcatgatctcagctcacggcagcctctgcctcttgggctcaagcgattctcctgcttcagctttccaagtatttgggaccacaggcgcacaccacaggcctggctaatgtttttgttttgtttttggtagagacggggtttcaccatgttgccaggctggtctcgaactcctgagctcaagtgattcacccaccttggcctcacaaagtgtcaggcttacaggcgtgagccactgcgcccggctcacagggtaaggcttctgtctggtgtgttgtattacggattttgcttaataggcacagtgaggcattaaaaagaaaattcagtatgcctgtagaaaggataatccttgtttaaagtctccaaattgcagtcaaagatgttttgactgtgcctttttttgttcccctgctgtcccttatgtagacttctgtcagtacccatggcagcctgtcatcttgttgacatctccttctggactgtgagctctgtatctggcttgtttttcatccccagcttctagttcacaattaggtagaaccctattactctttgaagaaggaacaagaaaatgtgggccagttttcatttgccattcttccatgtgagttagtatggttcgtaagtattcctggtgatacgctagtattggcaattctgtgaggttgaacaaaggggtggtatggtgtgctagcgtgggaattaggagacctctgggtcttgacagtgccctggccactaagcaaaggcagttcatccttggagtctcaatgtgcttttttgttaattgagatatgcttgaagtatcagccctaaatagtctgattctgtgacctacaaacccttacttaattcagtgttactataaatgattcttcccttaaacctactttttacttagcaaaagagaaaaaaaaaaaaaggaaacgctcatgtcaggctgcctgggtttgaaccccagatcccctcttagttggaggcaagttgtatgatgcttcagcttttggttcctgcctcctaaggttgttaggagttactgtgtgtagctgcttagaacattgcctgggtctcagtaagccgcttaagtgactgctctcattttcgctgtaaagcaccatactgtaataacatcccatgaagcatggggcggggaagagtatatggtaccttatggactttgatgtggtggggtagtaggtaaattctgaatatgtaagctacatagtattctttttgtaactaaaggataaaagttttaagatgggcatgtaatatggctagcactggattttaatgatgagccagagtaataaggctggcaaggggagtttttgttttgtaataaatctcttacacctgcacatccagttctttttaaaaacacgtttgaagaggctccatatttctcagtgaagctgttggggttcatgttatttttgaaaatcatcttgcaatttatttcagcatcagactgaaccacccaaagaaaattagtctatttctgaacagttttttcagaaaccatattggtctgatcacccaacatttatagaaataggcgcttaaggcctagaggcatttcagaaaggagaatgagaaatactgtggtcaagagtagtgttcagatggagaacatcaagcatctgctctgcccttccacacacatcctcatttcatcttcacaactgccctaggtaaccttgttatctgtaatgaaacagcctcaaggagcacagaggcactcactcctcacgtttggtctgttgccatttccggcttggttggaatagggtaggagccttttggcagggagcacattctcagtaatgcagagtgcactcacctgggttctagcttcaacacttaggatttgcttgatattttgtattctctgaggcactgcctgtatttgtttctgctatcacagtccagagtcaagcttcatttataaagactgggcagggcatggtggctcactcctgtaattccagcactttgggaggctgaggtgggtggatcactttaggtcaggagttcaagaccagcctggccaacatggtgaaaccccatctctactaaaaaatacaaaaaggccgggcacggtggctcacacctgtaatcccaacactttgggaggccaaggtgggcagaacacctgaggtcaggagttcaagaccatcctggcgaacatagtgaaacctcgcctctactaaaaatacaaaaattagccaggtgtggtggtgcatgcctgtaatcccagctacttgggaggctgaggcaggagaattgcttaaacctgggaggtggagattgtggtgagctgagatcgtgccactgcactccagcctgggagatagaacgagactccatctcaaaaaagaacaaaaacaattagccgagcgaggtggtgcacgcctgtaatcccagctactcatgaggctgaggcaggagaatcacttgaacccaggaggaggaggttgtagtgagtcaaggttgcaccactgcactccagcctgggtgacagagtgagactgtctcaaaaaataagtacataaataataagtaaaagctactaacaattaaaaaataaataaataaagacaagactgtctggaaaatggctctcctaaaaggaccagttgccatcatccacagtggaagattcaaagcagttggtccttggtacgtatgagaagcggatttcattcccttgaattctacagagcagtttattagagtgaatgcattttaaggccttgcatttgatatgtcatccagttcataatcaagttgcctttttctggctaaaacataatgattatgtatttttctcatttggtcctacaagctgctggccctttgtccctccactgtgggaatcagatctagaggaggctgagcctgcagacacagcagtggccaaaaggtcactctaagtgttttgtcttgactccttacttgaagtccacccagctagcacacatctggtttatactgaagccccctgcctagaaatactcatttcaggaaccaccagtaagcatctgtgaccacacaggctttttgactgatggcttcccggatctggtttcaagggataaccccgtctgtgtgcatctatggtcttctctctacagcgaggactttgcagtgctgcttgtggtccacacaaggggctcagagctgagtctgaactgcttcatggtcaccagctcctgtcccttccagtcttgagaggcttttttctccagatggaacctttccttcccgccgttttctcggtctctggctgtttttctcttgtgcccgtctaattggacacctcctggcttccatctctgtggttctcctgcctcacttcctgttctgttgtttttccgttttgtcaaaatatctcctatgttcttggcttccttttcgtcgccaggttttcagctttcctttagctcttcttctaatatggcttctgcccacaaaagcctgctctgtcaggatctcatggttctccacttgccagaaccttcttcagcctcagttcctcggcctcaacttgtacgtttaacccattgaccaccaccccccaaattcaccttcatttctttgaccctgctcctcactccttttctgttgaggaatctgttgactaactccaggctcactcaggctcaccgtcctgctctctgcaccagcctttccagagcgtgccagttctcatggcttcatctgttaactgttgatcacttcagtcctgatttttagacctaaatggtttccttaacgccattctaactgcctgtgactcattttcacttacagtgtttattgtaacgccaaaccaacaaatcacaggtgcttgcttctctccataaatctccccagtctaactttttgtcattcaacatgactcgtttatccaacctgaaatcgcatatagccccaagtatggtgttttgtacacaggtatttaataagtgacttccagttttggctctgctatgaataaaaagagatttcagttctcttcactttgaaatctaacaactcagagaacattgaagaaattggaatttagttgggatgaaatacttgtggtttaaaatatttctgttcatattttctaatttgttgccggaggtcttgggttttctatttgagtgcttgcaaactcaatgtgatttctgtcagcatatcttaggtttgtttgttatgaaacttatgcagtgtgaggttctatctgaaaatgttatttagctatcttctgggactatttaatgaaagtggggtcatgaatccttaaaattcttgtgcagctttgagaaacatttctgttatttgggtatcagtttgtaagtgtggtaaagccaagatggaaacgagcactttgctttcttggttgttgttactggtctaacctcctgcttgaactagtctgctgtcctgtcaaatgcatctttttatttacatgtcccttaaattaaagctgatcatgaaagtatttgtgtgcaacatgaaatgttttctaaagtaccagtgcatattcctgcttggtctcaagacgcacgaggaatccaaaatagaagcaaaaaaaaaaaaaaaaaa

SEQ ID NO: 999 - DNA, 1505 bp, HOMO SAPIENS
cagagtctccgcttaggcggcccgtgggggtcggggtcgcggtcgcggtcgcggaccggggacagagcaatggggcgggcgcgcagcgccggctgcactcccagagcctcccaccgccgccccacggccgcctagcgcgcgccgggactgcatttcccataggcccacgctgcggagcaccgcccacccgagtctcacgcgagtgcgctgccgcgaggtgtccctgccgcagcccccgcccgcccgcagagcttttgaaaggcggcgggaggcggcgagcgccatggccagtccgggctgcctgctgtgcgtgctgggcctgctactctgcggggcggcgagcctcgagctgtctagaccccacggcgacaccgccaagaagcccatcatcggaatattaatgcaaaaatgccgtaataaagtcatgaaaaactatggaagatactatattgctgcgtcctatgtaaagtacttggagtctgcaggtgcgagagttgtaccagtaaggctggatcttacagagaaagactatgaaatacttttcaaatctattaatggaatccttttccctggaggaagtgttgacctcagacgctcagattatgctaaagtggccaaaatattttataacttgtccatacagagttttgatgatggagactattttcctgtgtggggcacatgccttggatttgaagagctttcactgctgattagtggagagtgcttattaactgccacagatactgttgacgtggcaatgccgctgaacttcactggaggtcaattgcacagcagaatgttccagaattttcctactgagttgttgctgtcattagcagtagaacctctgactgccaatttccataagtggagcctctccgtgaagaattttacaatgaatgaaaagttaaagaagtttttcaatgtcttaactacaaatacagatggcaagattgagtttatttcaacaatggaaggatataagtatccagtatatggtgtccagtggcatccagagaaagcaccttatgagtggaagaatttggatggcatttcccatgcacctaatgctgtgaaaaccgcattttatttagcagagttttttgttaatgaagctcggaaaaacaaccatcattttaaatctgaatctgaagaggagaaagcattgatttatcagttcagtccaatttatactggaaatatttcttcatttcagcaatgttacatatttgattgaaagtcttcaatttgttaacagagcaaatttgaataattccatgattaaactgttagaataacttgctactcatggcaagattaggaagtcacagattcttttctataatgtgcctggctctgattcttcattctgtatgtgactatttatataacattagataattaaatagtgagacataaatagagtgtttttcatggaaaagccttcttatatctgaagattgaaaaaaataaatttactgaaatacaaaaaaaaaaaaaaa

SEQ ID NO: 1000 - DNA, 6774 bp, HOMO SAPIENS; identical to SEQ ID NO: 299

SEQ ID NO: 1001 - DNA, 466 bp, HOMO SAPIENS
  misc_feature (51)..(51): n is a, c, g, or t
  misc_feature (65)..(65): n is a, c, g, or t
  misc_feature (130)..(130): n is a, c, g, or t
  misc_feature (150)..(150): n is a, c, g, or t
  misc_feature (387)..(387): n is a, c, g, or t
acaggcaaatactacaaagcttcttaggacctagccttggaggtcctagantacgacttctgctncatcctattggaaaagcaagtcattgtgaccagcacagattcaagaaatgggagattcgactctnacctgtcaatgtaaacagcnagcatgtgcatgcagggaggaaagaaattgagggcatcatcttgaagactatcatatcacaccattattccaactagtgaacattatgttttagatgggtagtactagctactcatctgtcccccagaaacccaagctaagcatggacatattgaagagaatgtcagcaccattaaaaaaactctagaaaaatcacatgtgatgactgaggttaattcagtctgtcaattacatcantataattgccttcttgtaaccctaagtatggtgaagcagaattgaattctacaaaagtctttcatctgttttcctatgg

SEQ ID NO: 1002 - DNA, 4684 bp, HOMO SAPIENS
ggcagaccgtcacgtgacgacgtcgattcgcgtgcggcagtggcgaagttgacaaaccccgcgaaaatcgactctttgcatcgcacattttgttgattttccctcgtttttctttctctctttcccccgtccatccgaaagagggttggaaaaaaacaaaacaaacaaacaaacaaaaaaaaaacctaacgctgttgggacccggaagcggaaagggcatctttgaggtcgatacttccgggtcattgggagagtgcgggattcctgggccgagagcgggtggctgagccgggacctcgcgtgattctcggaacccgaggagaagcggcgtccggggctatggctgtgactctggacaaagacgcttattatcggcgagtgaagagactgtacagcaattggcggaaaggagaagatgagtatgccaacgttgatgccattgttgtatcagtgggtgttgatgaagaaattgtttatgccaaatcaactgccttacagacatggctctttggttatgaactaactgatactatcatggtcttttgtgatgacaaaatcatctttatggccagcaagaaaaaagtggagttcttgaaacagattgccaacactaagggcaatgagaatgctaatggagcccctgccatcacactgctaatacgagaaaagaatgaaagtaataagagtagctttgacaaaatgattgaagccattaaagaaagcaagaatggcaagaagattggagtgttcagcaaagacaaattccctggagagttcatgaagagctggaatgactgcctcaacaaagaaggctttgacaaaatagatatcagtgcagttgtggcatataccatcgctgtaaaggaggatggggagctcaacctaatgaagaaagcagccagcatcacttctgaagtcttcaacaaattcttcaaggaaagagtcatggaaatagttgatgcagatgagaaagttcgacacagcaaactggctgagtctgtggaaaaggccattgaagagaaaaaataccttgctggggcagacccttctactgtggaaatgtgttaccctcctatcattcagagtggtggcaactataatctcaagttcagtgtggtgagtgacaagaatcatatgcactttggggctatcacttgtgccatgggtattcgcttcaagtcttactgctccaaccttgttcgcactttgatggttgatccttctcaagaagttcaagaaaattataactttttgctccagcttcaagaggagctgctgaaggaattaagacatggtgtgaagatatgtgacgtgtataacgctgtcatggacgtggttaaaaagcagaagccagaactgctgaacaaaattaccaaaaacctagggtttgggatgggaattgaattccgtgaaggctccctagtaatcaatagcaaaaatcaatacaaactgaagaaaggaatggttttcagcatcaatttaggattctcagacctgactaacaaggaggggaaaaagccagaagagaaaacctatgccctgttcattggtgacacagtgcttgtggatgaggatggcccagctactgttctcacttctgtgaagaagaaagtgaagaatgtggggattttcctaaagaatgaagatgaggaagaagaggaggaggagaaagatgaggcagaggaccttttgggaagaggttctcgggcagcattacttacagaaagaacaagaaatgaaatgactgcagaagagaagcgaagagcacatcagaaagaactagcggctcaactcaatgaagaagcaaagaggcgattgactgaacaaaagggagaacagcagattcagaaagctcgcaagtctaatgtgtcctataaaaacccatctctgatgcctaaggaaccacatattcgggaaatgaagatctacatcgataagaaatatgagactgtaataatgcccgtgtttggcattgcaacaccgtttcacattgccacaatcaagaatataagtatgtccgtggaaggagattatacttacttgcgaatcaacttttattgcccaggcagtgctctgggcaggaatgaaggcaacatctttcctaaccctgaagcgacttttgtcaaggaaattacataccgagcatcaaatattaaggcacccggagaacagacagtaccagccttgaaccttcagaatgctttccgaattattaaagaagtacagaaacgttataaaactcgagaagctgaagagaaagagaaggaggggattgtaaaacaagactcactggtgatcaatctaaaccggagtaatccgaaactgaaagatctatacattcgcccaaatattgcccaaaagaggatgcaaggctcactggaggcccatgtcaatggcttccgcttcacatctgttcgaggagacaaagtggatattttgtacaataatattaagcatgctttgttccagccctgtgatggagaaatgattattgtcttgcactttcacctcaagaatgccatcatgtttgggaagaagcggcacacggatgtgcagttctacacagaagtgggagagataaccacggacttggggaaacatcagcatatgcatgaccgagatgacctctatgctgagcagatggaacgagaaatgaggcacaaactgaaaacagcctttaaaaatttcattgagaaagtagaggctctaactaaggaggaactggaatttgaagtgccttttagggacttgggatttaacggagctccctataggagtacctgcctccttcagcccactagtagtgcgctggtaaatgctacggaatggccaccttttgtggtgacattggatgaggtagagctgatccactttgagcgggtccagtttcacctgaagaactttgatatggtaatcgtctacaaggactacagcaagaaagtgaccatgatcaacgccattcctgtagcctctcttgaccccatcaaggaatggttgaattcctgcgacctgaaatacacagaaggagtacagtccctcaactggactaaaatcatgaagaccattgttgatgaccctgagggcttcttcgaacaaggtggctggtctttcctggagcctgagggtgaggggagtgatgctgaagaaggggattcagagtctgaaattgaagatgagacttttaatccttcagaagatgactatgaagaggaagaggaggacagtgatgaagattattcatcagaagcagaagagtcagactattctaaggagtcattgggtagtgaagaagagagtggaaaggattgggatgaactggaggaagaagcccgaaaagcggaccgagaaagtcgttacgaggaagaagaagaacaaagtcgaagtatgagccggaagaggaaggcatctgtgcacagttcgggccgtggctctaaccgtggttccagacacagctctgcaccccccaagaaaaagaggaagtaacttctgaactttggccctgagctccattcttcctccagccaacccctgaaaattttacatgacatagaaactgtatttttcctttcgttttcatttgaagttttgccatttgtgtttatgggtttagggggccatttgtgtggaccaatctactcggggaattccaggcccaccaggacacgtgccaatggccccattcagatggcaagggaggaggtgttcttgaagacaggaggaggctcccgctgttaataaatattgtttcattcttctctcttcctgtcaccttctgccaagacattgatggcttctgacatcttatttggtgtctcaaagctgtatttccaagacagtggtacaaggtgacccttaattacccgtatcatggttcttgaccagcacattcaatcctccaacctaccctactgccatgaccttccgcacatctctaagttttatctttgcaatactcaaggttctcggaaatttgctaatggttgtgataaaccatacagcttgagccagtgaggcagattgggctggtgccttcgtctgagttttcctgctttcctgcctcgtgcagattctgaggtatatctgctgccttggaagacataagaagcagtgatactccctggctcggttattttctccatacaatgcacacatggtacaatgatagaaggcaaaattgccactgtcttcttttttttctcatatatctaaggaagatatatcaggttgtgcctcatgtaccgcttctagtgaaatgtagaggaaggctcaaaggagtcaacatttatatctggaagggacaagtcatgccttgggcctagaataccctgatgagaaaagagaagaggaagggaggccatatctacaacacagcctctcggcactgctgctccttattttaactttgtcttgcattgtcctgtatttatcacagtttctgttgaacagcttttcaagtatttggggagtttatcttgccatcctccccttctggttctctgcacccacctgtcccactgcagttccttccgtgctctgtgactttaagagaagaaggggggaggggtcccggattttatgtttgtttgttttttctccttagcagtaggacttgatattttcaattttggaagaactaaaagatgaataaactgggttttttttgttgtttgtttttgtaaattca

SEQ ID NO: 1003 - DNA, 4296 bp, HOMO SAPIENS
agatgccgcctggcaccaagcgcagccgccgctgccgcactttccacttgtattgatcacctctcagccccgcgcagccggctcgcccgagcggaccgcggccagcgcgccagcccttggcagccccggagcagtcgggctccgggaggaaactccttgggagcgccctgtccggggtgccctctgcgctctgcagtgtctttctttctgcctgggaggaggaggaggaggaggaagaggaggaggaggaggaggaggaggaggaagaggaggaggaggaggaggacgtctggtcccggctgggaggtggagcagcggcagcagcagcagccgccgccgccgccgccgctgccgccgccgccggaaagggagaggcaggagagcccgagacttggaaaccccaaagtgtccgcgaccctgcacggcaggctcccttccagcttcatgggcaaagtgtggaaacagcagatgtaccctcagtacgccacctactattacccccagtatctgcaagccaagcagtctctggtcccagcccaccccatggcccctcccagtcccagcaccaccagcagtaataacaacagtagcagcagtagcaactcaggatgggatcagctcagcaaaacgaacctctatatccgaggactgcctccccacaccaccgaccaggacctggtgaagctctgtcaaccatatgggaaaatagtctccacaaaggcaattttggataagacaacgaacaaatgcaaaggttatggttttgtcgactttgacagccctgcagcagctcaaaaagctgtgtctgccctgaaggccagtggggttcaagctcaaatggcaaagcaacaggaacaagatcctaccaacctctacatttctaatttgccactctccatggatgagcaagaactagaaaatatgctcaaaccatttggacaagttatttctacaaggatactacgtgattccagtggtacaagtcgtggtgttggctttgctaggatggaatcaacagaaaaatgtgaagctgttattggtcattttaatggaaaatttattaagacaccaccaggagtttctgcccccacagaacctttattgtgtaagtttgctgatggaggacagaaaaagagacagaacccaaacaaatacatccctaatggaagaccatggcatagagaaggagaggctggaatgacacttacttacgacccaactacagctgctatacagaacggattttatccttcaccatacagtattgctacaaaccgaatgatcactcaaacttctattacaccctatattgcatctcctgtatctgcctaccaggtgcaaagtccttcgtggatgcaacctcaaccatatattctacagcaccctggtgccgtgttaactccctcaatggagcacaccatgtcactacagcccgcatcaatgatcagccctctggcccagcagatgagtcatctgtcactaggcagcaccggaacatacatgcctgcaacgtcagctatgcaaggagcctacttgccacagtatgcacatatgcagacgacagcggttcctgttgaggaggcaagtggtcaacagcaggtggctgtcgagacgtctaatgaccattctccatatacctttcaacctaataagtaactgtgagatgtacagaaaggtgttcttacatgaagaagggtgtgaaggctgaacaatcatggatttttctgatcaattgtgctttaggaaattattgacagttttgcacaggttcttgaaaacgttatttataatgaaatcaactaaaactatttttgctataagttctataaggtgcataaaacccttaaattcatctagtagctgttcccccgaacaggtttattttagtaaaaaaaaaaaaacaaaaaacaaaaacaaaagatttttatcaaatgttatgatgcaaaaaaagaaaaagaaaaaaaaaaagaaaagaaaacttcaattttctgggtatgcacaaagaccatgaagacttatccaagtgcatgaccggatttttgtggttttgttcattttgtgtttaatttgtgttttttttttccagctgtatgaaatgggctttctgaagtttaaatagtccgacttcacccatggtgttctgtgcttgcagtgcgagtgttgctgtaattcagtgttgccgtcagtgtctcttttcttagctttctgtctttctttcaacgtagtgtgaagtgtcttatccttttctatgaattccaatttgccttaactcttttgatgctgtagctgtttcagtaaaagttagttcaaactaatgatgtagaatgctttgaccaaatgagctggtctattatgccttgtaaaacagcagcatagggcttttaaaaggtagtcaataaaagttgctgaaattttggcttttttaaatatgtagtaggtgtttttaatgatttttcacataatgtgtaaggtagtgaaatgcaagaagggaaaaatgttttgtgtgaaacacattttctgactggggaacttttattagggtaaattgtttgtaaggctgtacgccaacagtttcctctgatagtttgactgatttaggatatctgctgtatgatgcaatgtaaagtcttttttgccttttttcaggaaaaaaaaaaagctaacttgatgtactagatttagtgtaggtagtgttggggttggggatgggggtgggggaggggagtcactgaatgttttgtccttcctttatactaatgatagtgctttagaatgagaattatgcctgaaatctggcaaaccgaaaaatgttgctattgcaacaaagtggcaaaagctaaaagtaaggatttatcttcaaacataagctgagataacgaatagaagcaaaacgattggctactagctctctctctctctctctattaggtaaatttgaaaaataaaaatgacttggcacttttaaaggtaacttcaccaaagaccgaagagccagtaaccagtagctccaacttgtctcagcatcacatcttctgtgctctttatttttgccggaccagtttgcggttaggagaatgtgccttttttgtacctttgcatttaggttttataattttaattgatgtatggacacacacaaacaaaaaagcatgaaggaagatttggatccaagcagtgccacactttacatcatcactacaagtgttcaagtgtaaagaaaaccaattttgaaactatgaaattcctgattcataaatacacagttatttctactttagtacatataagataattcactgttattaaagctcttttattaaggcaattgcatatgttttaaaagcaatggtaaattaagttgtcttccaaaactgtgtacttgtctggtcagctgtgtatgatcagttatctacctcagagtctattttcttttgtgctgggacaggttgctggccctccctgtttccacagaccaaatcctcctagctcaggagctagggctaagcagttatttctttcaagtattttttagttcttaaattttatgcttgtatttgatgatagatgtcagtgacatttcatagtttcaaaagtccttgctgctctgagaagtgtagattctagtgaaaattacatagtcataagagaaatgtgtttttgtttttgtttttgtttcatttttttaaagttgtggtattattggttctatgctccctggaatattactgctttgtgaaagtccagactgaacgcagcaccctctgtgtacctagtacagttataaacctgggtctctcactacttgatatttttgcattagttaagacagaaatttgatagctcggttagaggggaggggaaatctgctgctagaaatgtctgaactaagtgccatactcgtctgggtaagatttgggaaacataacctctgtacataaaaaaaaaaaaatcagttaaacatcacatagtagacagccattaaattataaaaaaattaatttatgaagaaagaccttttgtacagattgaaaaaaaaagattttcatagagatatctatatgatcaagagagttaattttttatttttgttttactagtgccacagacttgccagtggtaacttatttgtccggttcaagataactctgtagttttctttcctaggacttgttgttaaacgccaaaagacatttttgaactgtacatttgatcagattgttagcttttctgttttatttcttttgagaacctttgaataaaaaacatctgaaattttaaaaaaaaaaaaaaaaaaaa

SEQ ID NO: 1004 - DNA, 478 bp, HOMO SAPIENS
aacccgacactactttcaaggatgtagcaggattgagcttgcttttattttttcctagtggattttgtttaatttgttttgcctaaatcgtcaggcttatgatcacacatcgaagtcttggattaactgcgaaggcctccttctatttgccgcggctttggtggacatataggaataattcttccctggattgcaatacaatgcggaagattttctttctcctcttctaatccaaaagaggggaggggaggaaagaagaggggaatccatccattcccggcgtgttcgcggggggttaatgttgcgtgttcgctgggggttaatgtttgccttatgaccaagtctctgtgtccgtgcctctctccattttctcttcctacctcaaacccagcaacttagaaaacggctgtagcggaaaaaaacccgctgctttgttctcccgccaaaggagccaaaagggacaaactgctgcgctctg

SEQ ID NO: 1005 - DNA, 4544 bp, HOMO SAPIENS
gctggctccgccggccgccggctcccagacgcaagcggagggcggaggggaggggcaggcggcgcccgggagggaggcaccgggccgcgggccaagcctaccgggggtcccttgctacccatatgtgtgaagaaaagggggaaatgaaagccctagaacccacactgcagtgggcatgggatcatcctggaaccaggagaaacgaggttagggctaccaccttaaccgcccaggtgctggctctgcgtgaatatcttaggaaatgcaagctgaggacaggtcacaatttgggtctgcagcagaaatgctttcagaacagacagcagcgctggggacaggatgggaatcaatgaatgtacagctggatggagcagagccccaggtggaaaggggaagccaggaagagcggccatggagaacagtaccaggacctctggagcacctgtgctgtgaccttgaagaggagccacagtcccttcaggagaaggctcagtctgctccctgggttcctgcaattccccaggaggggaacactggagactgggagatggcagctgcacttcttgcggctggatcacagggcctggtaaccatcaaggatgtgtcactgtgcttctctcaggaggagtggcggagcctggacccctctcagacagacttttatggagaatatgtcatgcaggaaaactgtgggatagtagtctctctgagatttccaattcccaaactggacatgctttctcaactagaaggaggagaagaacaatgggtccctgacccccaggacttagaggagagggacattctgagggtcacatatacaggagatggaagtgaacatgagggggatacccctgaactagaagcagaacctcccagaatgttatccagcgtgtctgaagatactgttctctggaacccggagcatgatgagagctgggattccatgcccagcagctccagaggaatgctcctggggcccccttttcttcaggaagatagtttctcaaacctgctgtgtagcacagagatggattccctgttaagaccccacacatgcccccagtgtgggaaacagtttgtatggggttcccaccttgccaggcatcaacaaacacacactggggagagaccctacagctgcctcaagtgtgagaagacctttgggcgaagacatcacctcatcaggcaccagaaaacccacctacatgacaagaccagcaggtgctctgagtgtggtaagaatttccgatgcaactcccatctggccagccaccagagagtgcatgcagaaggcaaatcctgcaaaggccaagaggttggagagagccctggcacaaggaaacggcagcgtgccccaccagtgccaaagtgtcacgtgtgcactgaatgtgggaagagctttggccgaaggcaccaccttgtgagacactggctgacccacactggggagaagcccttccagtgccctcgctgtgagaagagctttggccgaaaacatcacctggacaggcacctgctcacccaccagggacaaagtccccggaacagctgggacagaggaacatctgtcttttgaaatctgtttccactacagctatggtcaagtctatcagccggtgctaccaggagtcactgccagggctgccgttctcctgaaccccagtggccagaatcataagccctgaccccatccctagaaagatgaggtcccagcaatggccagagcatttctcaccagttctgtgagatagcacataaaaatagagttctttgggcaaaacttttgggaagcaatgcatcctacatgggctgatattcagcctgagctgttctcaagaggagagtggtactggcagtttatggctgaaatccattctgattggttggagtctatgctataccagttgttaaacattttgagtatcactcttgcatactgttactattatattttctctatatatagacagaaaggccattttagaatattaaaggctctgaaaatttctgcagtagacccaactgaaggttctattaaggcagtgtttcctaaatgtatttgacctcagtatcctttctatttacatcccacagaactggtgactatgaaacactctggtgaacactgggttagagagtaacaaggaaacaagagatagtgatcaggcatccagagcccccttttttatccatatgaaagccaggggggccagaccttgttcatgtgtgggtctgtcttccttatgccaatcagcagtatatacatcacctctcaccctcacctgctgaaaaaataacctttttacccattattcctactcccttcatcctgcacatacatatatccagctgagagatcacactacaaggctaagagatgatctaatacccccaaatagccctggcccacacagaaaaacagaaaaacaaaaaaaactttatccccttgaacagtcccctctctcctcttgactgtctttatgtgtctgtgtatttgtgtgcagggtctttgaagacagcatgctatgtgcaaactgtacaagctaggttttctaggggctgtgttctggggatgagggtagtggggattatatggggttttttctttgtttcaagacaggaagcagtctggttaagggagaactagtggaaagggttaaatgacaggttaagttgagtacaaagctttcccagtactgctgagattaagacaattgtggatgtgtatgtctaggtttgaatctctgggctgcagattgcttttgccctggcagagaaagaggagtctttggggaggtgagctgtttcttgttgatttcaggcaagaggcacatagaaactttgtattgagtggggattttgttttaagtgctggaaaattagggcaggaattacgtgtttgcaagttgttgccatcactggtttgaatttgactgcctcatcaaggggcaagagttattcttgaagatctcattctcccagaaacagaactttagggaaaatggctgtggcttagcttttcagctgctgcagggtaataagctttctggttggttttccttccaattctggaaaggtgtccacactaagacccttaactctagggcttgcataagtattctagcatcgttagctaatgagttggtcattgtttctctttatcaataattgtgttaataccaatcttataatttaaaaattatcttgtatgtaagagcagttcggggttagggaggaagaggagcaaagtgggatattttctctttaatgcttagatactgtttcttccctaagatgtgtttctcaaccacaattggtggaatgaaccagagaggcaagaggaagtgaattgcaccaatttagtttagcgactgtgccttttgcaggaaaaactgggtgaatcacagctcctcagagtcctggactcaactagaattgaagatagacttattttgctgactgggcttcttagagtttatgtgacttgaacagcttggcccctgcctcccttctgctactgtgagcagccttccttcttccttcattcttcctggaatgcagttctcttgcttatgatcctatgaataaggcaaaatggctggtctttgtaaggcaggtcttgccctagcttctcagaaacaggagcattttaggatcagtattaggagatgccccagggagtaagaaagtattgggttcagtgataaatctggactctgacatttcttttactctccctctttaatactaaaagctctgcataagcaatggttcagaacctgtcttgggtacagacctgttgaatctgacagaaaccagaaacgcacttttgagaaaaagacatttgtaattcactcagttttccatacacatttagcaggttcaaagcccatctgtggaatccctaaactgccttcaaagaaagggagttccccgatctaaaatggtcattatatatttgtgtcaagaattagaaggcaagggtcactaaatattttaaggattaaggtaccagaggcatcagtggtataaggatggagtctggtctttaattacgacaagggtattgcttacattctactctctggttttcaaaaagatctgacatgctgacaaatccagctcctcacaaatcttgtttgaaggacttgtgggaagtgatattccttactattagatcacgccccttataactacatgttaacatccagccttttatctgtttgagtaattgtagggatagaaagtgaagcccccagagttaggtgcaagtatagcacccagctgaaaggcatcatggagtctaagggccttctacagaaggggcaatcctttgggttatttctggtgtaccactgtcttctctacctcggtccaacaccacctctcttggacaaaaaataaaacaagcaacagccatcagatgagtgaatagatttgaatgatttttcccacagggaatcagcctcaaatgttcatgtttcaccccgtcccctttaaataaaaagaatctctgtgttctctttgggcaaaatgtaaaa

SEQ ID NO: 1006 - DNA, 10448 bp, HOMO SAPIENS
gcccgctccgcccccagcccgccttcctcccgccgcgccctccgcctccgcccgcacctcgctagcgttcccctgtcttccccaacgccccggagccgccggccgctagcgtcagcgccagccagaattaaggaagttcactggagtaaaatggaggcctcagtaatattacccattctgaagaaaaaactagccttcctttcaggaggaaaagacagacggagtggcctcattttgacaattccattatgcctcgaacagacaaatatggatgagctgagtgtcaccttagactacctactcagcattccaagtgagaagtgtaaggctagaggatttaccgtgattgtggatggcagaaaatcacagtggaatgtggtgaaaacagtagtcgtaatgctacagaatgttgttccagctgaggtgtcccttgtttgtgtggtaaagccagatgaattctgggataagaaagtaacgcatttttgtttttggaaggagaaggatagacttggctttgaggttattttagtgtccgccaacaaattgactcgttatatagaaccatgccaattaacagaagattttggtgggagtctcacctatgatcacatggactggttaaataagaggctggtttttgagaagtttacaaaggaatctacatcattattagatgaacttgctttgattaacaatggaagtgataaaggaaatcagcaagagaaagaaaggtctgtggatttaaactttcttccatcggttgatcctgaaacagttcttcagacagggcatgaattgttgtccgaattacagcagcgtcgatttaatggctcagacggaggggtttcatggtctcctatggatgatgaacttcttgcacagccacaggttatgaaattattagattcactccgagagcaatatacccgctaccaggaagtttgtaggcaacgtagcaagcgcacacagttagaagagattcaacagaaggtaatgcaggtggtgaactggctagaagggcctggatcagaacaactaagagcccagtggggcattggagactccattagggcctcccaggccctacagcagaaacacgaagagattgagagccagcacagtgaatggtttgcagtgtatgtggaacttaatcagcaaattgcagcactcttgaatgctggcgatgaggaagatcttgtggaactaaagtcactgcagcaacaacttagtgatgtttgttatcgacaggccagtcagctggaatttaggcaaaatctcttacaagcagctcttgaatttcatggtgttgcccaagatttgtctcagcagttggatggcttattagggatgttgtgcgtagatgtagcaccagctgatggagcatcgattcagcaaactttaaaactgcttgaagagaagctgaaaagtgttgatgtgggattgcaaggtttgcgtgaaaaaggtcaaggtctcctggatcagatctccaatcaggcatcctgggcctatggaaaggatgtaaccattgaaaataaagaaaatgtggaccacatacaaggagtgatggaagatatgcagcttagaaaacaaagatgtgaagacatggtagatgtgcgaaggttaaagatgcttcagatggtgcagttgtttaaatgtgaagaagatgctgcccaggcagtagaatggctaagtgaacttctggatgctctgcttaagactcacatcagattgggcgatgatgctcaagaaacgaaagttttgctggaaaagcatagaaaatttgttgatgttgcacagagcacttatgactatggcaggcagttgctacaggccacagttgtgttatgccaatctttgcgctgcacttctcggtcatctggggatacacttcctcgactgaacagagtatggaaacaatttacaatagcatctgaagagagagtacatagattggaaatggctattgcatttcactcaaatgctgaaaagattttgcaggactgtccagaagagcctgaagctattaatgatgaggagcaatttgatgaaattgaagcagttgggaaatcacttttggatagattaactgttccagtagtttatcctgatggaaccgaacaatattttgggagtccaagtgacatggcttctactgcagaaaacatcagagacaggatgaaactagttaatctcaaaaggcagcagctgagacatcctgaaatggtgaccacagagagctaatagctaccagctacctacagatttgcagttcataatcccgcatgttgtcaacatactacagcattagccaccacaccttaagatgcatttcacagccaaaataagtctcatttcttttcatgacacatttctctttacatgttaacaccttgctactaccaaggcataattacttaacatgcttcgaggctgtagattccaagtatcttaaaagaaggaactataaacattgcactgaaaacttgctttaaagctttacctgacctgtcagtttgtagacaaacaactgataataagctttgaatggtgctaataagagtaggaattctctctattaaaaagaaaaaaaaaagttgcccttcctccacaggtgatttagtaaatttagacagtagttaaactcttgttagtagacagtggtgtcctcaaaattttactttgtaattcttcagaattgattatttttattgtgtcaatacagagaaagcctttcagatctttgatatatcatagtcattaaaagaccttttcctatttgtattgataatgtattaaaagttgtttgtgcttaataaaagacttctttaaacatcttatttaatttagtagttacatcctatttccaaacatgagtgccttatttaaaagggcattcttaggactgtgaggatggtttaatatttgttttttcatggtggttgcatgtattttagacaggaaatacatatgtaagcatgtgtatataataaataagcatgttttatcatgaaaaattattgtgaacaatttagatctttaagaacttattaataatggaatactatttctaatttttctctttttcaacttgaaaaatattctcaaaattattaactaccctgaagatactttgtctttaggggaggagggctgaggaagaaggcatacataattacttcagtgtaatcctttatatcagagtaatctttcaggaactaaaatagcaattgttaataaaatttagtttctcattatagtctaaaagcaaaataaattctgaagtagtccaataacagaactgtatgacccctttagaaataaaatttatcatgaaatgctagttcttttaagtttgtattaagtttaaatggtaaaatgcatataatttaaattttatgtatttttatttcagaacattttttaaaatattaaaaattattttttagtcttgtagtcattacaaaattataaacgagttgtatactggttcctttttgaggtctacaaacatgctcgtgtatcttccaatgcaaaaaaaaaacccctcccttttaacctgctagtttttccagccttcttcactgactgacagacttcttggagaaatccacatccagtgcccctacatcctcatcactcactactcagcaccttgcagtctggttttacacagcactctactgaaactgttcttttgaaagtcagcaatggcctcccagttaccaaactgaatggtttttttctccgtctgaatcccttacccttttctctgcaacatttacaccattgagcaacctttcctagacagtgtctccttccttgaagatgctatcctctgaaataactgtgagtacagtcgcataaccctaatttaagatgtgcctgctgaacatgtgctctctcagatcctgtcctcagaatgcttttggctcttttctcggtatctcatccttagagtttttattttataccaatgttctggattacatacctggtccagaaatctagacttgtacttctttttaattgcctagttgacatttcaaccttgattaaagattgacaatatttatcaccttttcctcctggaacaatttaggttaatggtgcagccttttttcctagtcaaacatgccaggaagttcagggcaaagttcaactgctccctcttgtcttatgtggtcactgcttctgagaacatccaggaagttctttctatacttgaatcatcttctcagtcctttggggctttactgctatgagtatgaacttttgtgattatttatttcagtcttcatgatggtgctatcacattctacagttgtttatgtctgtacccagtaagctcttttgagggaaggaatcttgtcttctcctattcccagtcttgctcatgcataacagatgcccattcctcctaaatatgaatgctgtattataggcattagtaataatccctgttacattgcagtctgaagtatgttttaaacatacttttttaaagttagaactgacttacaagtgaatctattcttagattcttagatactaactactttagatatttagttatactcaataactaaatatcaatactcaatatctgtttcttctgaatttcagagtagttagaatgtttttcttaagactttgctagaaaggaactggtttgttagtaattctgccatcaactcatggagttataattgccaaatgagttaatttttatataccttaagctatcttgcctacaaaaagtaaaataaggcaggattcataaatgttacttgtaaattgagtgtttcacatgaggccaagtatgattttaacataatgaatatcattgctcctcatctgtaaatttgctgctgctttcatatgtgtatctgtacatagagttatgaatgaaaatccagtaatgccctaaagcaactttcttccatagggtcaaagctcacttaaggtaaacgtgtgaaaaaagtgactgcagtgtgtttgaaaccacaagctgtttctatgtcataaattaacatcagcttgcaagtctctgaaagaaccactcatttgtaattggtatatatgtcacaacctcccacattcctttagcccatctcagggaattattgaaacgctggcagggttagtttcattttgttttggtttttttgggtttttttgtttgtttgaggattttttttttcttttatcatttgtttgctcctgtgtaagcttaatatataatggcagtttggcatctgttcttcgcacatgtctaacccagcagagttatgcaaaaatgatgacttcattttaggtcaaattggctttgttcccagtcctcattgttggtcactttgttcagttctggtgactcattggtgatgttgatgaaactgctcagcctgccagctgggatattgatggcaggtctaggcttcattgttaggtagaagattgaatacttctcactttatacaaatttacattggctattgctcccatgtgttagctagtcttaacatgtttgttatttcgttatcttattagctgacatacggagtggtattattagtgtcgtactccttagcgtgagcatgacaattaagttaccttactaacagtgatgagtaaaccatactctgatctaaacccattgttaccaatgatgtgattatgaagttagctgaatctatggtctacatttgaagaaatagttcagaattctctactacattgtaagttacttgctaatagagattgggcattattatgtactactccccttctcacatcctacccaaagtacacaaggccgtagtaaaatactgttgctactaaaaactaaacatactgtggttgctaatgtcctttacatcttcagcctatagggaatggtacaggcagaaacaagcaccattaagtatattatcatcagtagtgagatctgtatgattaggatatctttgcttaagcccccaaaggaaaaattctctagcattaaaaacatggctggaacatagctaagcagttaacctaattagtagacttattgttaacgttcagtcctaaaaatgaaaagcttcagttgggagtagaaaatatactatgctggtatatagagcaacaaataccctgatgagataaaatgaagtagaaacttaccatttgacattatttgactttcatacatgctactgaaaagtctaggtttagctaagaagcataaataatggcagtacttgtagaggaaagaacataccagctaaaacaagaactgtaatgaatataatggaaagtgtttggagcttgaatacttggcttcaaaaatctggctttgccatttactgttaaaaaaatatctgagaatttatctcaggctgtaaaacagagaagtcataccaatttcaagaataaaatatgatataaagaattgttgaagccaaaatatccagaaataaacagaatggaaggtatcattgctataattatcttttcagaataaaaaatagagtattctttatcctttctgttgtctcacatgacaagcatgggatggtgaggaaatggcatattgcctatgttcgccgccccacccccttagttccaccaccccttcaccgtcacccccagttcactagtgtatcagaatgcatcttcagaattacacactgaagatacaaaaggtccagttggtaagctcatcagtaaataacaaggctttgaaatctgacaaattagctatttttgtaggaagataatagaacagcaagatggaagacaagtgatgagtatcatctgttttgaggttgacaaggtgtgacataaccctgttaatagacacaagtaaaagaaaatcatactaggattggatattagtgagcgagcaccgaccagtagaaacaacaacagcataaatctgttatttaagtatcccaataatgaggttaaaaaaaaaaaaaaaacagaacaaagcatgaaaagaccacaattagtgctggctatgcttagagaggagcagtctcttggtaaactcaggcagtgatgatgaacagaaaatggccgactgatactgtaatagaggcatagaactaaggacactccgtgagctggcataaatacaggggagtctttaagactgaaaaaagttcatgggtatgacacttaatatgactcaacattactgcagaattttaaagcaaacatgaaagcttgagaataaacactagtccctctacttcaagaaaaagcagaacctgtactagaacatgaagaacttagagatcaaaagacagccagaactatgatgaaatattttgaaagcagtgggcacatttttaaagattttttttggagaactttatgaggctgtatgtataattcctatatgtaattttataggaattcttaactgaaagtagttatcaactgctacttatcaggagcagtgttattagggattttaagttaggcatgtagaaaactttctgacaaaagggctattgaactccagccagttcccagtgaatctccaggaggcaccttagaagtcttcacaagctgaataccatgtctttagggtgtccaaatgcttctgtcttgggggagagatgagagatgactgggtgcctttccactcagaacacagtagaccactcactatttatgaccaagcctcacttcttttctattacagttacagattcttttttagtctggaagttagggtaaataaaatttgtatgtttgatttttctcttaggaatgttttctcatcttaactcttatgttatctttatggccaacagatttgctcagaatatatcatcaaaatatatgtattgtattttgtaaaggtgaaaggatcgaaataccactttgacagttataaaccagagtagatttgagaactgattgctcacatcacacttacgaatagtctcagaagcctttaagagaaacttacttctcaatggacacttagaagaatttgatgatcttactgtcataaaatcagtaatgaaattctcagcaaaactatttggtaaacattgcaccctgtatttttacccaacatcttgttatgaaaattatcaaatacattaaaaagttaaaataattttatagtgtactcactacctagatgctaattagcattacctatgcttgctttgtcacatatccattcatcatttcatattattatttgatgcattttaaattgcatatcattaactagagttcattgttggcttttttacataaaattagcatgcaatgaagtgcatagaaatatgtgttcactgaggtttggcaaatgcatatagtgctatggaaataggaaacgttatcaccaccctagaaagtttccacactgccctttccagtcaattcctgtccctacttgaccctcaaaggcaaccactgttcctttttctaccataagatttttctgttctaaaactttatataaatagagtcacgcaacatgtacgcttttctacaaggcttcatttttttattgctgttcttttttattgctgagtagtattccactgtatgacaatattacagtttgttttcttaatttcctattattgatagatacctgggctgtttccaggattggccattataaataaagctgctatgaccattcttacgtaagtctttgtgaacataggttttcatttctttgcagtaaattccttggattagaattgctgggtcacagggtagttttaaaagaaactgccatacctttttccagttcagttttattgtgccctgtattttgtattttgatgtgcataaaggtgtaaactatttttatgatccatattgaagtattagaagaagtgagtttggaataacaatggcattgttcatggtcaaggatgacaattggaactatctgaggaaagcaaagacctgtctgccccagacagctcctcaaggggttcctatgcctgaaactttagcaatatttcactccttgaaaggttaaagcccaaccatggtgatatgttagctagaagaaacagcactggtttgtttatgttactaactttcaccacccgttttcagtaggtaaagtaagactgatcattgaacagaaaaggttatttctgtgatgaggttgagggggtagtggaaagcatgtattgctagtaagccccaggtacagctatgtgagagagagtcacctggacagggaagtcccccaaatggtggccagaagagcagaaaacggggtgggaaaaattctacctcacagttttgcataggggatagctatgcttttacgggacattttagcgtttaaaaatattttcaatattgtctctttattcaataccacccagctgtagttttttcacactctgatgactctcttatccactcttttacctctcccagctgttctattacatacagcattcacctgtattagtctatagaattataatcatctgtgtgtttctaatgctcattttcaaaaatatgtatggtttattcgatttttcctattaaaattttaagggctgggaaatttggcttctactgtaaatccttataatgttccacacattgtaaatatgcaataaaaatgttaacaactataatggcagcaggttttggtatgtatttctttgatatattgtcactttggacaataagtttgatttctgttaataaaagttgttcataaaatctagggagaattaagtcacactggtctctataagataatctgatgaattctgcatctttgaatcaatttgagttattttttgtaaaggtttaaattgtttctaacagtgttacctaaaacctttcattaaatcaaaaatgtaacttgtatattctgaaataacctggagtcttagaagacagaggcttctgcttccctctcccgtgaccccaacaatcccttcccacaggcttggcacagaagttcagtgctttctctacgtctcatgttgtcagaaataggttctcaccataatagacagtggtgaaatttccattgttcctactgagaagtccatttttaaggcatcaaaggtgaatgtgtatttagggatggaggaggcatattacaacaaagctgtatttaaaataacacaatcatatcatgctataaacaatagcagttccagaatggctactaaggattttggactgccagactttggaaattggcaagccttataccttgtccaatgaagttaagtacatttgagtgacagttcaacatacaagcaaaaaaatatatagaagacattgtacatttgttattaatggacatgtttactttacatgttagagtatccatccatctctaggttttccattagatgcttcattgtatccacaaacctgtttcaaaccattgaagtgatcttaccattgtgtttgttcaaaataaaattgggagaaaatgtgaa

SEQ ID NO: 1007 - DNA, 2251 bp, HOMO SAPIENS
gacgtcacggtcactgacagcgtgagcccgcggcggctgctgccatggtggctggcggccgggtaagggtctgagtggatctcctgccaggccagagcgccttcgggggccgcggcggaaggccaggagtttgcagccagggcgccgggtttgtggtctgcagtgtcgtgaggctgaggtgcagcatgtctagactgggagccctgggtggtgcccgtgccgggctgggactgttgctgggtaccgccgccggccttggattcctgtgcctcctttacagccagcgatggaaacggacccagcgtcatggccgcagccagagcctgcccaactccctggactatacgcagacttcagatcccggacgccacgtgatgctcctgcgggctgtcccaggtggggctggagatgcctcagtgctgcccagccttccacgggaaggacaggagaaggtgctggaccgcctggactttgtgctgaccagccttgtggcgctgcggcgggaggtggaggagctgagaagcagcctgcgagggcttgcgggggagattgttggggaggtccgatgccacatggaagagaaccagagagtggctcggcggcgaaggtttccgtttgtccgggagaggagtgactccactggctccagctctgtctacttcacggcctcctcgggagccacgttcacagatgctgagagtgaagggggttacacaacagccaatgcggagtctgacaatgagcgggactctgacaaagaaagtgaggacggggaagatgaagtgagctgtgagactgtgaagatggggagaaaggattctcttgacttggaggaagaggcagcttcaggtgcctccagtgccctggaggctggaggttcctcaggcttggaggatgtgctgcccctcctgcagcaggccgacgagctgcacaggggtgatgagcaaggcaagcgggagggcttccagctgctgctcaacaacaagctggtgtatggaagccggcaggactttctctggcgcctggcccgagcctacagtgacatgtgtgagctcactgaggaggtgagcgagaagaagtcatatgccctagatggaaaagaagaagcagaggctgctctggagaagggggatgagagtgctgactgtcacctgtggtatgcggtgctttgtggtcagctggctgagcatgagagcatccagaggcgcatccagagtggctttagcttcaaggagcatgtggacaaagccattgctctccagccagaaaaccccatggctcactttcttcttggcaggtggtgctatcaggtctctcacctgagctggctagaaaaaaaaactgctacagccttgcttgaaagccctctcagtgccactgtggaagatgccctccagagcttcctaaaggctgaagaactacagccaggattttccaaagcaggaagggtatatatttccaagtgctacagagaactagggaaaaactctgaagctagatggtggatgaagttggccctggagctgccagatgtcacgaaggaggatttggctatccagaaggacctggaagaactggaagtcattttacgagactaaccacgtttcactggccttcatgacttgatgccactatttaaggtgggggggcggggaggcttttttccttagaccttgctgagatcaggaaaccacacaaatctgtctcctgggtctgactgctacccactaccactccccattagttaatttattctaacctctaacctaatctagaattggggcagtactcatggcttccgtttctgttgttctctcccttgagtaatctcttaaaaaaatcaagattcacacctgccccaggattacacatgggtagagcctgcaagacctgagaccttccaattgctggtgaggtggatgaacttcaaagctataggaacaaagcacataacttgtcactttaatctttttcactgactaataggactcagtacatatagtcttaagatcataccttacctaccaaggtaaaaagagggatcagagtggcccacagacattgctttcttatcacctatcatgtgaattctacctgtattccagggctggaccacttgataacttccagtgtcctggcagcttttggaatgacagcagtggtatggggtttatgatgctataaaacaatgtctgaaaagttgcctagaatatattttgttacaaacttgaaataaaccaaatttgatgtt

SEQ ID NO: 1008 - DNA, 6139 bp, HOMO SAPIENS
gtcttcctcccccagggttgtggccacgcgcagcggcggcggttgttccgcttcccctccggcccgggccgtcgccattgccgaaggctccctcccctcccctccctggcgtgcgcaggactccgccgccgctgggcctagcggtagcagcggctgctccagcgcggcgtctcttcccgccccgcttccccttccctcccctcccctccccgcaccgcgcgctagcccggggcggctccgcagcccgccgggagctctgaccgaggcgcctcgctggggcggggaccttgccttgcccggggccatttcataattctgaatcatgtctgataacggagaactggaagataagcctccagcacctcctgtgcgaatgagcagcaccatctttagcactggaggcaaagaccctttgtcagccaatcacagtttgaaacctttgccctctgttccagaagagaaaaagcccaggcataaaatcatctccatattctcaggcacagagaaaggaagtaaaaagaaagaaaaggaacggccagaaatttctcctccatctgattttgagcacaccatccatgttggctttgatgctgttactggagaattcactggcatgccagaacagtgggctcgattactacagacctccaatatcaccaaactagagcaaaagaagaatcctcaggctgtgctggatgtcctaaagttctacgactccaacacagtgaagcagaaatatctgagctttactcctcctgagaaagatggctttccttctggaacaccagcactgaatgccaagggaacagaagcacccgcagtagtgacagaggaggaggatgatgatgaagagactgctcctcccgttattgccccgcgaccggatcatacgaaatcaatttacacacggtctgtaattgaccctgttcctgcaccagttggtgattcacatgttgatggtgctgccaagtctttagacaaacagaaaaagaagactaagatgacagatgaagagattatggagaaattaagaactatcgtgagcataggtgaccctaagaaaaaatatacaagatatgaaaaaattggacaaggggcttctggtacagttttcactgctactgacgttgcactgggacaggaggttgctatcaaacaaattaatttacagaaacagccaaagaaggaactgatcattaacgagattctggtgatgaaagaattgaaaaatcccaacatcgttaactttttggacagttacctggtaggagatgaattgtttgtggtcatggaataccttgctggggggtcactcactgatgtggtaacagaaacgtgcatggatgaagcacagattgctgctgtatgcagagagtgtttacaggcattggagtttttacatgctaatcaagtgatccacagagacatcaaaagtgacaatgtacttttgggaatggaaggatctgttaagctcactgactttggtttctgtgcccagatcacccctgagcagagcaaacgcagtaccatggtcggaacgccatactggatggcaccagaggtggttacacggaaagcttatggccctaaagtcgacatatggtctctgggtatcatggctattgagatggtagaaggagagcctccatacctcaatgaaaatcccttgagggccttgtacctaatagcaactaatggaaccccagaacttcagaatccagagaaactttccccaatatttcgggatttcttaaatcgatgtttggaaatggatgtggaaaaaaggggttcagccaaagaattattacagcatcctttcctgaaactggccaaaccgttatctagcttgacaccactgatcatggcagctaaagaagcaatgaagagtaaccgttaacatcactgctgtggcctcatactcttttttccattttctacaagaagccttttagtatatgaaaattattactctttttggggtttaaagaaatggtctgcataacctgaatgaaagaagcaaatgactattctctgaagacaaccaagagaaaattgcaaaaagacaagtatgacttttatatgaaccccttctttagggtccagaaggaattgtggactgaatcactagccttaggtctttcagcaaacagcctatcagggccatttatcatgtgtgagatttgcattttactttgctgactttgttgtaatagatcccattcattgtcccctttggggtatttccaatacttgaatggcagattggagtttttcagagtatgtgtttcatctgctagtctttctctccttcatagcttttcttttcctggacttgctccttttgagttgcttttgcgtttctcatgcctaggcaagtgtaatagaaattatgtagctccttatgttggcaaaggagctctatatagtttcactttgtataaaagttaggaccagctgttgttacatgtaatattttagttcagaacttgacctgaaggaagggaagaaaagtatgtgatttttaccttttttaacaaatgtgaaaaagtcagttttagaaatttcgtggtagtaagttcggcatttgttacatgtatagagagaagactaataatctctatttataactaaatcattgagatagaaaaagattcccattgactgtagacttcttcccattttgtcttcccttctgcctgtttccccttcaggcttggctctaggaaccaaagtgatttgttgttgttccaacctgggctttgtgactttggttagtgccactaccttcttccctcctttcccccttcaatttggaaataaatttctgtatatgttgcaattttaggtttaggtttgttctttttctttttcattaatcctctctcacctcacagataccccctcccatggcaaataatataataaccagtgaattttcaggaatttaaaaattagcttttttccacttaaaggagaaaaatatttgggactagcagcagaggcagtaagagatgtgaaccttggtgagctctgatacagtgagaagagattatactcatgaaagagaatgttagtgttacagagaagcagccgatagcaaatcgactgtagagacttggcggcggtggcattgccccaggtcgtcagcagtgtggtattatctatgagaacttgagcgacagagtatttcttgatgaatttatagatcatttgagatgttgagttactttagtttagttttgttttgttttttcaaataagtagagactattgtaaaaaacgagaaaggaaaatgaaatgtgcgtgttgatagcaataatttgtttcttttaaagattctaaaaggtctgagacctgtagcattaattatttgagtgccctcccttctcccctcccctcccttttctcttctcttttttcctctcctcttcttctcctttattcattgttttgcttttggagtgggtgttgttcaagtatctgtggtttggttctggcattttgttcccaccatccccttcccccattaacttcccccctgcttgccatcctgcagtagtataaatcatgaataaaaaataattttgctgttgtagtatacattggagaaactggcaggttttatttccattattttatttccactatatctatgataagatgcaattataaggagagaagtgactgttttttattgataaggcaagattttcagaaaaatgagtaaaataattaatgaaacatatttagagcacttaatggtctctgttttcaatataattcttgatttcatttttctctggaatatattggccttctacagctattactgaattatagaaactggtttatttctggcagaaagctgcagtgccacctgagttccaaattttaccattctttgtaaacagttggatggattatgataaagaagatgctaccaatgaaatagaaaaccaacgagatgagaagactgtgatcctcatgtactcagaggcacttccctcctaagtcaaagaccatcctcactgactatgtgccaacgcctcgtttcaggcttgtgactcaacaaagggcttttccattgatagaagcagtttgggatttgtagttgcgacttcttcgatagttacctgcacgtccattgctggcaactgacttgtcattaaaacctggctctttggttaagggagctacgctgtggtttattcttaagttacgtggataaactaacctctaacagaaatatactttggttaattttgaaatgtgtcatttttaaacaatcttaaaagtaatacagaattgtgatttattaattttaaaacattcagaacttgttgaaagaaaaattatatctgaatcaagattcatgttttttatttttattttttttgatacagagtctcactctgtcactcaggctggagtgcagtgacatgatctcagctcactgcaacctccgcttcctgggttcaagcaattctcatgcctcagcctcctgagtagctgagaccacaggcacccgccaccacacccagctatttttttgtatttttagtagagacagagtctcaccacattgcccaggctggtctccaactcctgagctcaggcagtctgcccaccttggcctcccaaagtgctgcagttacaggcgtgagccactgcacctggcctcatgttttttaaataattgccttttatatttaccctttttgtcatcactttagaatgaaaattcccatttaaatctgaaagttaccttaatagtcctcttgtgttattaggacagtattattatagtacttatttattttattttagatttaaagttatcttctctttttcttttttcttctgctgcttttagggacaattaaaactgggaaactatgaaacatggaacattttatcctacctgaaagtaaacgagtaattgtgaagcataagacactgaggctaatacaactctgtcttcatgtgttgactgcctggcacatagtattcattctcttccctttaacatagaagtgtccagctgcgtacagtctagtaaccagcaactgtaaacgaacctgtgcctctaacaagcgattctaaaccacctatgagtatttcttttagggctcacttaaatacatgtttgtatatactgtattctagccagaataattttagatctgatcaggtagtagctaaaattagaaaaaaacaaaatagatgcttaaagaatttgcatccatttttgagtctaaatcttttaaaatatactgagatccacatctagtgaaatgtcagtgtcaaaatattatagattatagctaaaatccagattaatactcatttggggttttttatagtggaacttcatagtaatacaaaaagcagattgtcttcctgtctccgctgctcccacagtaggtattgaaactggtaaaatcagttttttgatagtgtgtgtatataagaaaaaatagatacacacattcttttttctcagtcaacacattgattgaacactctggcaaagatgctgtggtggatgaggttggagttcgaaagaagaagcaagcgctggcctggccttgaaagaaccgaagtctttcccattcacttctctagaaagctgccaagacagaggcagaaagaaatggatgatagttctgtcaagcacacttctgttctcttagaacttagaagtgtttctaagagaacagaagtaataagagaaacagttacgtgtggaattcaacatctttggttggaacgcattggctttttttttcttgttttgatagaaatggaattaagcaaaagtagtttttgtcttttctgttgtcttcaaattttatgccttttatttttaatttaatcccgttcaattatttaattgttatacattgacattaactgctgtattttgactttgttcaataattttgttctttcagggctagaaataaactttttaaaaaaagtgtgcatttttccctttcctaaacttttattctttcttttgatcagcgtaaaagaatattttaatgtcttttgatagcataaaagaatatttaaatgtcttaataggttttcaaagaacatttagtatttttagtgataaatgttttaaaccttttaa

SEQ ID NO: 1009 - DNA, 3939 bp, HOMO SAPIENS
ggtcggcctctgctgcgcctgcgtggtcgggaggggaagtgaggcggtttcctcggcgccttttccggcagcggcggcggcagaactgggaggaggagttggaggccggagggagcccgcgctcggggcggcggctggaggcagcgcaccgagttcccgcgaggatccatgacctgacggggccccggagccgcgctgcctctcgggtgtcctgggtcggtggggagcccagtgctcgcaggccggcgggcgggccggagggctgcagtctccctcgcggtgagaggaaggcggaggagcgggaaccgcggcggcgctcgcgcggcgcctgcggggggaagggcagttccgggccgggccgcgcctcagcagggcggcggctcccagcgcagtctcagggcccgggtggcggcggcgactggagaaatcaagttgtgcggtcggtgatgcccgagtgagcggggggcctgggcctctgcccttaggaggcaactcccacgcaggccgcaaaggcgctctcgcggccgagaggcttcgtttcggtttcgcggcggcggcggcgttgttggctgaggggacccgggacacctgaatgcccccggccccggctcctccgacgcgatggggaaggtgctatccaaaatcttcgggaacaaggaaatgcggatcctcatgttgggcctggacgcggccggcaagacaacaatcctgtacaagttgaagctgggccagtcggtgaccaccattcccactgtgggtttcaacgtggagacggtgacttacaaaaatgtcaagttcaacgtatgggatgtgggcggccaggacaagatccggccgctctggcggcattactacactgggacccaaggtctcatcttcgtagtggactgcgccgaccgcgaccgcatcgatgaggctcgccaggagctgcaccgcattatcaatgaccgggagatgagggacgccataatcctcatcttcgccaacaagcaggacctgcccgatgccatgaaaccccacgagatccaggagaaactgggcctgacccggattcgggacaggaactggtatgtgcagccctcctgtgccacctcaggggacggactctatgaggggctcacatggttaacctctaactacaaatcttaatgagcattctccacccatcccctggaaggagagaaatcaaaaacccattcataggattatcgccaccatcacctctttcaattgccactttctcttcttttgaatttgaactctggagttactgttctacagtttggcggggacggggcttgggggttttctcttttgtttgtttccctttctttttccttttttttttttttttttttttgttggctttgcgttaggatgctctgatctgacatttgacatgaacacaaagttgctagatgctcttgttgacttccagcagatgggatgggggaaacacagcagttcttggtaaagtcctttgtaataatagtttgatttttttatttcgagagaatctttcattttcctatgtatgcttttttccttttttgcccagtttccttatcacttgctgtagatggcttattttgcattcatgcagactatgttgcaagtctgtttcatctagtaaactgaaaattattgcttaatcaaactgccgtttgtcttttatatttaaggccttccccccccttccttatgagttctaacttagtaatttcaaatgtgaccttttatatctaagaccagtatagtaaacttagcccacagtggcaaataatgagtaatattgtaatatgttccagttgcacctcagtatgttaaacaggtaatgtaagaagttctctgaaatgtcagcaagtaagttctgaaacacatcatgcatgagtaggaataaaacccaagttccccataacgtagataacttaatgctgcataaaaatatgaaagtgtaacccatgaaggacactttttctttccactgcaaagttagccactttgctgtttttcctcttttttaaactttgaaaatagactctttccagaaattggagcaataatggtgttaccacacacagattaaataatttgtagatattttaagtgacttttgggcaaaactggaatgtatacttttaccttgtttcaaacacctaagaccagtaatttaaaaattactaaaaggtttactttgttcattaataaaacatttaacaattcaaattatatgcaccttttacctagttgaaaaaaatacacattcctgttttcacattatagcaactgattaagctgaagctgtaagtcattttttatagatgagtgatccgcatctccatcaattagaacactggaaaagatgttttataaaagaggtatttaattttgtttgtaggattaactcatgcaaataataaaaaagatatcctgttggttcaatagtacactgtctcctttaaggaaggaagcgtgatgaatgaatgatgtgtagacttgagggatgactattaaaggggacgtaggatgaagagaaagaacctacagatgacaatgaatgtaaacttatttttcttcatgtgtaagcagtgtgctcgctggtgatatccagatcctaacaagattacttggttagctggttaggaccagtaactggattgcgaccactatgataatattttgaaccaaatgttaatgcttgatgcagaattgtaaagcagcatctggttcctatatagccttaaggattaattttagtgatcctcaaggaattaaatagggaatttcagaaatgtagactgcaaaggcagtatacaggaaaaggtggagtgggttttgtttatgagggtgtctgaaaactaaaattgagcgggatatcatggtatagttggacagtattggtccttcacactttggccatattgtataatggagcttttaccaaagatgtatgagaagtgtaagactataaaaaaatgaactattcaaagtaaaactcttaacaaacattttacttaaagcagatgcaaaagggtattctcatgtaggctcctgttggtgcagagggatttttttgatttcaggatacaactaaagtacgaagttctcagtttcactttagtagaaagagctctagaaatgaggctgataaacacatctaagaacactggttgctttctaaaatttccaaagctccaccataaatgtaatttttagtgtttcaaatgattgcattttaaagtatataaatatgggttatccaatatcaatgctatagtaacatcctgaaacaaaacaagcacaaaggtataaatgcctaaactggaggaaacttgaaaccctcatgttaaatcttaaatgtagtatttctaacttgtgaagacagattggtaggcagccatttttttgtgtcttaaaataactgggggcatagttaaaattttatacatcaagtgattgctattattgaatgttgcaggtgagatgtggttatttttagtttatttgaaatgtttgactggaaaggggggagggggaagcaaatatttgaaatttggaaaaccctaaaccttttggtaagaaattgtaattttcacttaaaattttctttaaggatataagaggtttataattgatgtagttaaattgaacaataaccattggtgactggagcaggtaattatagcctgcagaaaaaattatctaagaattttaaaaataagatcctgaagttgtttaattgcatccatttctgtatttatgtgaatttataaactgcagtaagttttgaatgaggttaatcttgtttaatataagtaaatgagtctgtagactgtgatctccccaaactaaaaagtacagtacttggaattgtgttctttatggttgtagtgttggtaaagcactaatatgcagaaaataaaggaattacacagtgca

SEQ ID NO: 1010 - DNA, 4525 bp, HOMO SAPIENS
ctcttcaagatggcgggcgccggagactagcttccgcttccggtgtgagcggcccggccgggggggcaagatggcggcggcagtaggggttcgtggccggtacgagctgccgccttgctccggcccaggctggctcctcagcctttccgccttgctgagtgtggcggcacgaggggccttcgccaccacgcactgggtcgtcacggaggacgggaaaatccagcagcaggtggattcaccaatgaacttgaagcatcctcatgacctagtcatattaatgagacaagaagcaacagttaactacctcaaagaattagagaaacaattagttgctcaaaaaattcacatagaagagaatgaggacagagacacaggactggaacagagacataataaagaagacccagactgcatcaaagccaaggtgcccttaggggacctggatctatatgatggcacatacataactttggagagcaaagacatcagtcctgaagattatatagacacagaatctcctgtccctccagacccagagcaacctgattgtactaaaattctagaacttccatatagtatacatgcttttcagcacttgagaggtgtacaggagagagttaatctttctgcacctctgctacctaaagaagacccaatcttcacatatttatctaaacggttaggaaggagtatagatgacataggtcacctcattcatgaaggcctacagaagaacacttcctcgtgggtactgtataacatggcttcattttactggagaattaagaatgagccatatcaggtagtagaatgtgccatgcgagcacttcacttctcttccaggcacaataaagacattgccctggtcaacctggcaaacgttctacacagagcacacttctctgctgatgctgctgtcgtggtccatgcagctctggatgacagtgacttcttcaccagctattacactttggggaatatatatgcaatgcttggggaatataaccactcagtgctctgttatgaccacgctttgcaggccagacctgggtttgagcaagctataaagaggaagcatgctgtcctatgtcagcaaaaactggagcagaaattggaggctcagcatagatctctccagcgaacactgaatgagttaaaagagtatcaaaagcagcatgaccactacctgagacagcaggaaatcctagaaaaacataaactgattcaggaggagcaaatcttaagaaatatcattcatgagactcagatggcaaaagaggcacaattaggaaatcatcagatatgccgactggtcaaccagcagcatagtttacattgccagtgggaccagcctgtacgctatcatcgtggagatatctttgaaaatgtggactatgttcagtttggtgaggattcatcaacctccagtatgatgtctgtgaactttgatgttcaatcaaatcagagtgatatcaatgattcggtcaagtcttctcccgtagcccattctattctctggatttggggcagggactctgatgcatatagggacaaacagcatattctatggcctaaaagagcagattgtacagaaagctaccctagagtccctgttggtggggaattgccaacgtattttctgcctccggaaaacaaaggactcaggatccacgaactcagcagtgatgattattctacagaagaagaggcccaaacccctgactgttccataactgacttcagaaaaagccacactctgtcctacttagtcaaagaattagaggttcgcatggatctgaaagccaaaatgccagatgaccatgcacgaaaaattttgctttcccgtattaataactatactatcccagaagaagaaattgggtctttcttatttcatgctattaataagccaaatgctcctatctggctcatactcaatgaagctggactatactggagagcagtaggaaatagcacttttgctattgcctgtcttcagagggctttgaatttagctccacttcaataccaagatgttcctcttgtcaacttggccaaccttttgattcattacggccttcatcttgatgccactaagctgctacttcaagctttggccatcaatagctctgagcctctgacctttttgagcctgggaaatgcttaccttgctctgaagaatatcagtggggcacttgaggcctttagacaggccttgaaattaaccaccaaatgtccagagtgtgaaaacagcctgaagttgatccgctgtatgcagttttatccttttctgtacaacatcacttcttctgtttgcagtggtacggtggttgaggagagcaatggttctgatgagatggagaattcagatgaaaccaaaatgtcagaagaaatactggctttggtggatgaatttcaacaggcatggcctttggaaggctttgggggtgcactagagatgaaagggcggcgtctagacttacaaggaatacgggtgctgaagaaaggtccccaggatggagtggccagaagctcttgctatggagactgcagaagtgaagatgatgaagcaacagaatggattacattccaggtcaaacgtgtaaagaaacccaaaggagatcataagaaaactcctgggaaaaaagtagaaacaggtcagatagaaaatggacatcgttaccaagcaaacctagagatcactggccccaaggtggcatctcctgggccacaaggaaaaaaacgtgactaccagcgtctgggatggcccagcccggacgaatgcctcaaactccgctgggtagagctgactgccatcgtgagtacctggcttgcagtttcttcaaaaaacattgacatcacagaacacatagattttgccacccctatacagcagccagcaatggagcctctttgcaatggcaatctccccacgagtatgcataccctggaccacttgcatggggtttccaaccgagccagcctgcactacacaggggagagtcagttaacagaggtattacaaaatctcggcaaagaccaatatccacaacagtcgcttgaacagattggcacccgaattgccaaagttttggaaaagaaccagacgtcctgggtcctctccagcatggcagccctctactggagggtgaaaggccaaggaaagaaggcaatcgactgcctccgccaggctctgcactatgcgccacaccagatgaaggatgtgcccctgattagcctggccaacatcttgcacaatgccaagctctggaatgacgccgtcatagtagccaccatggcagtagagatcgcaccacactttgctgtgaaccacttcactctgggcaatgtctacgtggcaatggaagaatttgaaaaagcactggtgtggtatgaatccacattgaagcttcagcccgagtttgtcccagccaagaaccgaatccagaccatccagtgtcacttaatgctgaagaagggacggcgctctccttagtgcacttcttccttctctctttctctttactcatgctctaaaaaaaaagaataagaaaagaaaccaatcattgtcagtatctactattaatgatgtgtgtgaaaataactaagacttataacaggacttttacatatgtgggaattggtttgtttttgtttttacgtttctcctttcccccaaccaacctcagaagaggcaccttcagaaacacacatttcttaaaaggaaagtgcagcttcaagatattgtgtaaatactgagccaagacatttctggagctgtgctctgtctccaaaaacctcaatgcctttagggcttttctcagtggtccagctagccttctctttggaggaggatgaagccgcattgcacattctctgcttcctgtcgtagcctctgttgtcaatggaaatgcggaagcccatctggtgcccgtcagtgagaagcaacgttctgcgctctctccgttagacctccatgctgtccccagtcttgtccattccatgctgctgtgttacaaactctcagaggtagtttgcaggggaggaaggggaatatgattttaaaaacaaaatatttacaacaacaaaaattcttaggatcacctgacctttgtaatgttatttatgttggggagggaggggggctgagaaggggaaatcagcagtgtgcaacatctttataatttgtactttaattacaaatcacaaggaaaccaataagttgaaatcctatataacaggtttatatatatagaatatgtatatttgaagccctctacagactgagtctatgttttactaattctttgttcactgtgttacccatcttggaataagttgtgaatgtcagctccctctctctgaggcctccagacttagctcctcaggagggtaatgagccaaggttgagtgtttccatacaatgcttttacctttgatcccaggagaatcagaaactccaacattttggaatcttcaagggcacatactgagaaaaaaaataaaattgtttatgagcaaaata

SEQ ID NO: 1011 - DNA, 1979 bp, HOMO SAPIENS
ccgcaggtaggaggaacgtaccaactgcgaggcggggggtgcgcgcgaagacccccgcaggctgcgcttccggaagtaacccctggcgcatcccggaatccagagcgcccactacggcctttggccaggccccctgggcgcgttccgggagctcaggcctgcggcgctgggagaagcacgctggccaacaagttgggtggtgggcacgcggcccaggggtcaggggccgccaggcggcgggcggcggggctgcggctcttacctgccgaggaggcgccggctctgcggtgcggagttgcgccggacttcccagcttggccagtggctccgcaggctgccggctccacccctcagattcatttggattcaaggttggctctcaacagtgccagctgcactgtcatcctaaagtacttctgtggaagagaacatggtggtgtcactgttgtaccagtgatgacacaaaatcccagatctacctgacgggcctgcgagggttgaagattgtgaagcaatagcctaagggactggctggcttcgagcagggcatcggaaccaggcctcctggcactggcctgggtagagccagggcgagcaccagctgacccccagtggaaccctgtgacagtcctgccagggcccaggccatcccaaccgacttccatctcatggaccctccagcggagaagccgggagaggctggcggactgcagatcacaccccagctgctgaagtcacgcacaggcgagttctccctggagtccatcctgctactgaagctgcgtggcttgggactggctgacctgggctgcctgggagagtgcctgggcctggagtggctggacctatcaggcaacgcgctcacccacctgggcccgctggcctccttgcgccagctagctgtgctcaatgtctccaacaatcggctgacgggcctggagccactggccacctgtgagaacttgcagagtctcaatgccgcaggcaacctactggccaccccgggccagctgcagtgtctggctgggctaccgtgcctggagtacctgcggctccgagaccctttggcccggctcagcaacccgctctgtgccaacccctcctactgggctgcagtccgggagctgctgcctggcctgaaagtcatcgacggtgagcgtgtgattgggcgtggtagtgagttctaccagctgtgccgagacctggacagctccttgcgtcccagctccagtccaggccccagagccaccgaggcccagccctgggtggagccaggctactgggagtcctggcccagccggagcagctccatcctggaggaggcctgccggcagttccaggacacactgcaggagtgctgggacctggaccgccaggccagcgacagcctggcccaggcggagcaggtactcagctctgcgggccccacctcttccttcgtcttctgaacgtggcctatggcccaggacagcctggcaggtggcctcgctgcccccagttcccctctctgcccccacactcgtcttagttgcttcacactggtcactggccctgcacactgggctattgctttatccctatcctgagagcagcccctccccaccatccctccacatgctgcaaggacagactgaagggctgtgagcaggtgtaagggctcccacatccgtgagcctgtgtccgcagctgctgccactctgggctgctccagcctgcaacttagtggaaggaattacttcctcctgaggctacaggcgagaaaggtagggatgggccagcctcccgtctcagctgttgggagacagtaggcaggctgagtggcccagagcactcctggaagtgggactcccctgccttgcaaatgtgcctctccagactgctcctgcacttaccccctccccgcagcaccttctctgcccgttcttgtccacacatctattaaatgcttctgttttcatttgcaaaaaaaaaaaaaaaaa

SEQ ID NO: 1012 - DNA, 483 bp, HOMO SAPIENS
  misc_feature (37)..(40): n is a, c, g, or t
  misc_feature (66)..(66): n is a, c, g, or t
  misc_feature (76)..(76): n is a, c, g, or t
  misc_feature (116)..(116): n is a, c, g, or t
  misc_feature (165)..(165): n is a, c, g, or t
agaccccgtctctaagacaaataataaacatcaaaannnnaattaaaaaaaacccaacccagtgtncccttcagantcctgagtggtttgtttcatcttcctctattctggcttgngtcatcttcctctcttgtaatggataaaaactccaaatgaagacaaaantgaggaatttgtcaaaaaaattgaattgccaacaaaagccatctttggttgatcaaacggtacagacgtttcagttagacaagagggctaagtttctgagacccattgtacaggattattaatattattcatttttagccctcataataaggtattataaatgtcaagattgctaaaagaatacgtttttaaatgtcttcattataaaaaataagtatgtgaggtgatggacatattaatcagcttaatataatcattttatagtatatgtagctatatcaaaacatcacattataacccataactacatgcaattat

SEQ ID NO: 1013 - DNA, 3897 bp, HOMO SAPIENS
agaggactgagggccggtgcttccggtggctgcccagaacttcttatgtgcggcggcgtgatgttgggcggccacagagagattggtgtttttgtgaggcagtgagacctaaggtaacctttatcaaaaggatggagttgggaaaaggaaaactactcaggactggactgaatgcgttgcatcaagcagtgcatccgatccatggccttgcctggaccgatgggaatcaagttgtcctaactgatttgcggcttcacagtggagaggtcaagtttggggactccaaagtcattggacagtttgaatgtgtctgtgggttgtcctgggccccacctgttgcagatgatacacctgttctactcgctgtccagcatgagaagcatgtcactgtgtggcagctgtgtcccagccctatggagtcaagcaaatggctgacgtctcagacttgtgagattagaggatcactacctatccttccccagggctgtgtgtggcacccaaaatgtgctattctgactgtgttgactgctcaggatgtctccattttccctaatgttcactctgatgattcccaggtaaaggcagacatcaacacccagggccgcattcactgtgcatgttggacccaggatggcctgaggctggtggtggcagtaggcagcagcctgcattcttatatttgggacagcgctcagaagactcttcacaggtgctcctcctgcctggtgtttgatgtggacagccacgtctgctccatcacagcaactgtggactcacaggttgctatagctactgagcttccattggataagatctgtggcttaaatgcatctgaaacctttaatatcccacctaacagtaaagacatgactccgtatgctttaccagttattggtgaagtacgctctatggataaagaggcaactgattctgaaacaaattctgaagtatcagtttcttcttcctatttagaacctctggatctaactcacatacatttcaatcaacataagtctgagggtaattctcttatttgtctaagaaaaaaggactacttgacaggaactggccaagattcttcacatttggtccttgtgacctttaagaaggcagttaccatgacgagaaaagtcactattccaggcattctggttcctgatctgatagcatttaatcttaaagcccacgtagtggcagtggcttccaacacttgtaatataattttgatctactctgtcattccatcttcagtcccaaacatccagcaaattcgattagagaacactgaaagaccaaaagggatatgtttcttgacagaccaactattactaattttggtaggaaaacaaaaactcactgatacaacatttcttccttcttcaaagtctgatcagtatgccattagcttgattgttagagaaataatgttggaagaagaaccttcaataacatcaggtgaaagccagactacctactctactttcagtgctccgttaaataaagcaaatagaaaaaagttaattgaaagtctttccccagatttttgtcaccaaaacaaagggctgttgctgacagttaataccagtagtcagaatggaaggcctggaagaacacttattaaagaaatccagagtcctctgtctagtatctgtgatggctccatagctctagatgctgagcctgttacccagccagcatcgctgcccagacacagcagcacaccagaccacaccagcacactggagcctcctcgtttgcctcaaagaaagaacttacaaagtgaaaaggaaacttatcagctgtctaaggaagtggaaattttatctaggaacctggttgaaatgcaacggtgtctttctgaacttacaaaccgtctgcataatgggaagaaatcctcttcagtgtatccactctctcaagatcttccttatgttcacatcatttaccagaaaccttattatctaggtcctgttgttgaaaaaagagcggtgcttctctgtgatggtaaactaaggctcagtacagttcagcagacttttggcctttctctcattgaaatgctacatgattcccactggattcttctctctgctgacagtgagggctttatcccgttaaccttcacagccacacaggaaataatcataagagatggcagcctgtccaggtcagatgtcttcagagactctttttctcacagtccaggtgctgtttcttctcttaaagtctttacaggccttgctgcccccagtttagataccactggctgttgtaaccatgtagatggcatggcttgatatctgcagtgtccttgctgtgtagctcttcagatgagaccattacaaacaaggcctgcttgacactggacactcgccaatgagactcccactgcactcaggcgaagcgcttgccatggtcggctctcctggtttccccctgtttcccctgagctgaggctcgctgctgtgtagcagagctcagtctttattagatggctccgaaagtggtgtttatgtattcatgactgtgtggttttgactaagggcagaattctcagaacaaaacaatattatggtgccatatggatggtgttttatggtttctctgaggctttgtgtcccttgtccaaagctgcattgaagctgtcttaggagcacttaaaagataccttggcattgttataggtctttttcttggcttcaagaggaggttgaggagtctgctggggggcatgtgctctagcatattaacctcaaaccagcaagaattagcagagctccaaggaggaccagagacccactggcttctgctctcaggaacaggaagtggctctgatgttgcctggacctcccagaatttaaaccaaaccctcttgcttccttaacaaattctggctgacgaaggtccaggtactcttaaaaactggccctgggaaaattttgaatgaaatttcaagggaatttgtcccctctgggttccacttgaggttgtgccgatgctgctaccacactgtcgagcccaggtaagtcctactgcaggattttgtgctgtggccactcatgagtgtccctgaaataactttttttttttttaaatccagttttgggatcacgcaactttcctatttttctcccagtagtcagctcccttagttaacttgtcactttaatttgatatttttattttctctccttttaagtcttagagaccagcagagaatctgtgagagaaagtatttcaggaagttagaaattcaaccgaatctgaggtagtcctaaaaagtgccattttgtttcacttatgggctaaagtaccagcttagtcaggtaagagccctgacccacttcagatggtaacaccacttctcactgccttcagatggaatcacagatttcagtcacggcgcataacaaattgatcagtgagtggctaggcatctgcagataaattgtttcagccatagaagctccattagcacatatgcttccttttccccccttcctttaaaatcatctggaaagaaactattttgtgcccttggggactcctgtctgtctgttacagtttaccaagatggagctgggttaggaaagaagtgagggcccattttgtggttcaagtgcactagacagctgctggggtaggaagcacaggcaatgtctgtaatcagctgtgggagagcagtgactgagaacagtctgaggcctggctccacttggaagtatctggggtgcgatgaaatcacaattatcttgaagcctaaagagggaactacaagactgttaactaagatcaatgtgggcacctaaaagggtatgttaaaatcaccatttctcaggtcaaaatactgtgaataagtcttcaataaaatcactaatggttattgtggctgttaaa

SEQ ID NO: 1014 - DNA, 3520 bp, HOMO SAPIENS
gcggccgcccctcggccccggagcccctcggcggcgccaccatgtactcgggagccggccccgcacttgcacctcctgcgccgccgccccccatccaaggatatgccttcaagcctccacctagacccgactttgggacctccgggagaacaatcaaattacaggccaatttcttcgaaatggacatccccaaaattgacatctatcattatgaattggatatcaagccagagaagtgcccgaggagagttaacagggaaatcgtggaacacatggtccagcactttaaaacacagatctttggggatcggaagcccgtgtttgacggcaggaagaatctatacacagccatgccccttccgattgggagggacaaggtggagctggaggtcacgctgccaggagaaggcaaggatcgcatcttcaaggtgtccatcaagtgggtgtcctgcgtgagcttgcaggcgttacacgatgcactttcagggcggctgcccagcgtcccttttgagacgatccaggccctggacgtggtcatgaggcacttgccatccatgaggtacacccccgtgggccgctccttcttcaccgcgtccgaaggctgctctaaccctcttggcgggggccgagaagtgtggtttggcttccatcagtccgtccggccttctctctggaaaatgatgctgaatattgatgtgtcagcaacagcgttttacaaggcacagccagtaatcgagtttgtttgtgaagttttggattttaaaagtattgaagaacaacaaaaacctctgacagattcccaaagggtaaagtttaccaaagaaattaaaggtctaaaggtggagataacgcactgtgggcagatgaagaggaagtaccgcgtctgcaatgtgacccggcggcccgccagtcaccaaacattcccgctgcagcaggagagcgggcagacggtggagtgcacggtggcccagtatttcaaggacaggcacaagttggttctgcgctacccccacctcccatgtttacaagtcggacaggagcagaaacacacctaccttcccctggaggtctgtaacattgtggcaggacaaagatgtattaaaaaattaacggacaatcagacctcaaccatgatcagagcgactgctaggtcggcgcccgatcggcaagaagagattagcaaattgatgcgaagtgcaagtttcaacacagatccatacgtccgtgaatttggaatcatggtcaaagatgagatgacagacgtgactgggcgggtgctgcagccgccctccatcctctacgggggcaggaataaagctattgcgacccctgtccagggcgtctgggacatgcggaacaagcagttccacacgggcatcgagatcaaggtgtgggccattgcgtgcttcgccccccagcgccagtgcacggaagtccatctgaagtccttcacagagcagctcagaaagatctcgagagacgccggcatgcccatccagggccagccgtgcttctgcaaatacgcgcagggggcggacagcgtggagcccatgttccggcacctgaagaacacgtatgcgggcctgcagctggtggtggtcatcctgcccggcaagacgcccgtgtacgccgaggtcaagcgcgtgggagacacggtgctggggatggccacgcagtgcgtgcagatgaagaacgtgcagaggaccacgccacagaccctgtccaacctctgcctgaagatcaacgtcaagctgggaggcgtgaacaacatcctgctgccccagggcaggccgccggtgttccagcagcccgtcatctttctgggagcagacgtcactcacccccccgccggggatgggaagaagccctccattgccgccgtggtgggcagcatggacgcccaccccaatcgctactgcgccaccgtgcgcgtgcagcagcaccggcaggagatcatacaagacctggccgccatggtccgcgagctcctcatccagttctacaagtccacgcgcttcaagcccacccgcatcatcttctaccgcgacggtgtctctgaaggccagttccagcaggttctccaccacgagttgctggccatccgtgaggcctgtatcaagctagaaaaagactaccagcccgggatcaccttcatcgtggtgcagaagaggcaccacacccggctcttctgcactgacaagaacgagcgggttgggaaaagtggaaacattccagcaggcacgactgtggacacgaaaatcacccaccccaccgagttcgacttctacctgtgtagtcacgctggcatccaggggacaagcaggccttcgcactatcacgtcctctgggacgacaatcgtttctcctctgatgagctgcagatcctaacctaccagctgtgtcacacctacgtgcgctgcacacgctccgtgtccatcccagcgccagcatactacgctcacctggtggccttccgggccaggtaccacctggtggataaggaacatgacagtgctgaaggaagccatacctctgggcagagtaacgggcgagaccaccaagcactggccaaggcggtccaggttcaccaagacactctgcgcaccatgtactttgcttgacatgttttagtgtttagcgattgtgtaccgagtgggattcacgagaccagctacactcagaccaacagatggccagcccttccgtgacagccagcatcgaacatgagacgtcattgattttattagattctccgttttccagaatgccttccgtcccagatttcaaacttggattttgaactgcagacctgtatgagaacccaatgtcataggaaatatggtttgctaaaatctataagctgcttattaaaacagagtcccgtgtgtcctaaaaatctcctaaaaccagtctatgaactcagggctttaaaacatttttaatttatttggtcattcaatttacttgtttttaatacatgattctctatgaaattgatgggctcaaactagctgtgaatcttctgagagtgaaagcaacacaaaacacaagtgtggttttaaagccttgaacattctgatgttgtcactaaagttgatttccaggcgatgctcgtgtgcccctggcgtggctcacccaagttcctcgactgagggccggtggccatgcagaggcgtccgcaggtgccgtgttctgccagcaccgcccttcacccggcctgaactaaggagcagtggcagaaggtgggccccgtgtgtttacagcatttccaggtccagagaggttggcagacaagtgccattttaataaaaaatgtatttaaaaaaagaaaaaagacaatatactgacagtctaatcatcagatttgtcctataggactgtgacatttattttccaaagtttttaaagaatacgggtctgtggtgataaatacagtacaatcctttttcactgttatgtctttaatgtaagagaagaatatatatatctggtttgcagtaaaaaaaaaaaaaaaaaaaaa

SEQ ID NO: 1015 - DNA, 3809 bp, HOMO SAPIENS
gcgacgtcacgctcggctataaaaggcgcggctcggggcccttgcggcgctggaggagctcgaggctgaggctgccggggggctgtgggctaccgggccgccggcgcctcagcgatgttttactcagggctcctcactgagggcggccgcaaggagaccgacatgcgggaggcggcgtcactgcgacagcagcgccggatgaagcaggcggtgcagttcatccacaaggactccgccgacctgctgcccctggacggcctcaagaagctgggctcgtccaaggacatgcaacctcataatattctgcagaggcgcctcatggaaaccaacctgtctaagctccgaagcggtccccgtgtcccttgggcctctaagacgaacaaactcaatcaggctaagtctgaggggctaaagaagtctgaggaggatgacatgattttggtttcttgccagtgtgctggaaaggatgtgaaagccttggttgacacaggctgcctatataatctcatctctttggcctgtgtggacagattgggactcaaggagcatgtcaaatcccacaagcatgaaggagaaaagctttctctaccccggcatctcaaagtagtgggccagattgagcacctagtgatcacactgggctccctccgcctggactgcccagcagctgtggttgatgacaatgagaaaaacttgtcccttggtctacagactctccgatctctgaagtgcatcataaacttggataagcaccggctgatcatggggaagacagacaaggaagaaatcccttttgtggagacagtctctttgaatgaagacaacacttcagaagcataactacagcctgcagcatgtctgcacgtgtgcatgcatacacaccgggttgacagatagagaaaactgggtttgaaccaaatgccgtagtgacttgctgtggaccaagtccttccatctaatagaagctccaggggctccttcccattcagacctctctagactatagtctatgcttagagatcttgtctggttatggccattgttttttactactttgatcacttaacttatagaccttttttgacactgccagtctcacttgtggcctatttctctgcttcttccaggaatttgcttttattagtcaagtataggggctgccaggttctgtgtctccatagatatatgtgcttcttttcctatagctaaatgtataataaacaggaacctgacctttacctcctttcagctgtttcaaacaggtgccaggatacctatgtcttagaattagagtttcttcaaattgattcattgatttctcaagtatggattatgtgaaagagcccagggacattatccattacagtttaactctttcatttaaaggtccagagaggcaagtgaattgtctaagttcatatattaggtcagtgactgaagggaccaagaacgcagacctgatttccaagccaagactcccatgctgcctcatttgtattcaagcctttaacaggagggcaaagaggtgagaatgtgttaaaaaaaaaaaaaaaaaggcagagcatgggaggaatattctctggagatggatgctaggatgatttgggtagctctccctcctgtgtgccaagcccagtaaaagttccttgccccaaactgtcacatttaggccctcatcttggtgcctaaaaacgagcgtacaaagatgaatgaaatggtttctcactgtgaacctcttggaggaaaggaggaaccacagacagaggaatattaatccctctctgatatggaattgaaggcttaagtaaatcagagtgtcactgtcagacgttgattactcccaagatccgatcagcatttctgcccatcctattatgtgtctgtcaaggactgaagtagctggaaaccaggagtagagaaagatggggggaaaaaaagagcaaggccagaatagaagggagtagactgagtagaatcagttggtggagaggcctatctagataaacctttctgggaggcagggaatgacattttcaggcagggaattgagatgttcagttctgtcctgatacaaggaaagaggcagagcaggagccggcaatgttaaggacaactttttataactgcccagtatttcctgacccctgtcaaaggttggggagaatacaaggtttcttgaagctttttgactggggtgtcacattaggcacacaggtgtctataatggaatctccccttcagtttggtcatagaagtgcttggacaagtcagaaaaatagctagctgtgggtatccctttaagatattcccaagtctaccctgtgtcatagcagtagttctcagagtgtttgtttaaaggatcccactttgaactttgccaagtactaccaactaccttgtctggtgttcagcaactgcccctactgaacagccctttggaactctgaatgatttgggcctcacagaagctccctaaagcctaggaacttggtgactatcatttgaacaactaggcagccatactgcagtcagttgtcatggggtcattccctaggcccccttcctatcagcctctacctaaagaagctagataggaagctaagcacagccatggttgggaggctatatctaaagctcatgaggggtgatcccggggttaccagccttcagcactccctctagcaacaccccattctcttacctagcggggatttgtacctttccactgaggcctctccatgctccttccctacctttcatggcaatactttggcctgcctcttatcctggtactaagttgaagtaaagctcaccctttacttccctacttgaaagttctactctgagccttgactcttagccacagtgaggcatgttgaaggttcctgctggtttattctttttttttttttttttttagacagagtctcactctgttgcccaggctggagtgcagtggcacgatctcggttcactgcaagctccgcctcccgggttcatgccattctcctgcctcagcctcccaagtagctgggactacaggcacctgccaccacgcctggctaattttttgtatttttagtagagacgggtttcaccgtgttagctaggatggtctcgatctcctgaccttgtggtccgcccacctcagcctcccaaagtgctgggattacaggcgtgagccaccgcacccggccttcattcactttctttaaatgcctccaagttgattattctcctagctcatatctccttgatgtgcatgagggagcactgggtctaatttttgggggctgagaaggtaagaaggtgaggtcagtttttcccaggagtcctaaaaaattctggtaccttacattgagggtgtgggagaaagggtgtcatagttctgaaaataggcagtagcatgaagcaccagacctgtctcattccttattagatgtctatctcaaataacagagtttgaaaaatattggttttatcatttgatatttccatgcctgactcgggaaaataacattttctgacttctttctattttcttgccctgcacagaccctacctggtacaattttctatttcttagctcaaagtgtctatacaatgggttgcctggtatgtcagctgccctcactcttgtgtaatagaaatatattgccaggctggggacgtggaggagacgaactggattcctccctcctcctgttgccaggcctctctgcattggcactttatcctttcagtgtttctggctgtgttgggttcatttgtgagactgatgtaacaataaagtgaaatcttcccctctg

SEQ ID NO: 1016 - DNA, 722 bp, HOMO SAPIENS
tttcgtttttgcagagatgcaggtattgtcatgttgcctgggctggtctcaaactcctgggttcaagcaatcctcccacctgtgcctccctaagtgttgggattacaggcatgagccgctgcctccccgcagcatggggggacttcttataagcatttttatttatttatttggaattcggatggatagatcatgttggcctgataatgtatgtgcaagagcacagactctggggtctcatggacaagccccactctgccccttgcttaatgtctctgagcctcagtttcctcatctgtaacaagggcagaaatgccatccgtgtgcagcagagtaccgacgaaaggatggatgcaatgctcttatggcagtgccccacccaaggcacaaggaaaaaccacgaaagcaattccagtttacaccacgtcccaaactggattttccattcgactataattcctcccaataagggctcaaaacgttgtctaaggaaagtcgattggttgttgcccagggctggaggagttgggggaaaacggggagtgactgctgatggagacagagtttccttttgagatgatgagaatgtcctgaagctggtcatgctgatggttgcacgtatctatgaatatactaaaaaccatcgaattgtacactttagacatgtgaattgtgtagcatgtgaattaaacctcaagtcgttattttaaaaaaaaaaaaaa

SEQ ID NO: 1017 - DNA, 8907 bp, HOMO SAPIENS
ggagagcgagagaccgaacgaggagacgcgaggaggagggaggaggaagagagggagggaggcgggaggagcgcggaatgaaaagctcggaggggcgaaaaagcagcacagcaaagcccaagttgctgagcgagcggagcgctcccgcggcccggagccgagcggccgccgcgccccggagcccggcccggccccgcccgctctgggcccccgcaggccaaggccgccgggcgggggcggggacgaccaacttggggcgcggcgtagccccgctctcccgagagctcggagcccgggagggctacggccgcggccagacggcgggagaggagcgcggcgagcggaggcggcgagcggcgcccgcgccgcagccccggcctgggcgagagcgcgaatatttttcaaaagactcaaactttcctcctttccccgttttctggggcccttcttgcctggaattgctctccagattcccgcggggcgccgggctgctattcttcccccgggtttatcggcggctcggctaacttcacggacccggggacccgcggcgctcgtccctcggccgaacccagcccgcgctgctccccggatcaggagggccgggcccggggctgcttcgccgccgcgagtgctttcagcccggccccctggagtcgggccgctgagcccacggcagcggccgcaggactggaaacagcagattgattaactcgagcggagccccggcctccccgactccgctccgctgaggggcggccccagtgcggggaaacgacaagtttgtcagtcgtccgtggcctgttggatcgaagcgccgcctccgccgccgagaggtccccggcgcctagcatcccgcgcggacggccctgggtacccggggcggctcggcggccgggctcctcgggtcggggcgctggctgctgtgccgggcgcgccgaggcacccggggctgggccagcgccccctgcgtccccacgcgggcagcggccccgccggaggagaaacacgggtcgccgccacctccgcctcttcagtctcctggtcttcgtcgccgctctctctctcacctctcagggaaagggggggacataggggcgtcgcggggccccggcgaatgcgccccccgccgcctctcgggctgcgccgcctcgcggggatgaagcaccggccgtgaagatggaggtgacctgccttctacttctggcgctgatccccttccactgccggggacaaggagtctacgctccagcccaggcgcagatcgtgcatgcgggccaggcatgtgtggtgaaagaggacaatatcagcgagcgtgtctacaccatccgggagggggacaccctcatgctgcagtgccttgtaacagggcaccctcgaccccaggtacggtggaccaagacggcaggtagcgcctcggacaagttccaggagacatcggtgttcaacgagacgctgcgcatcgagcgtattgcacgcacgcagggcggccgctactactgcaaggctgagaacggcgtgggggtgccggccatcaagtccatccgcgtggacgtgcagtacctggatgagccaatgctgacggtgcaccagacggtgagcgatgtgcgaggcaacttctaccaggagaagacggtgttcctgcgctgtactgtcaactccaacccgcctgcccgcttcatctggaagcggggttccgataccctatcccacagccaggacaatggggttgacatctatgagcccctctacactcagggggagaccaaggtcctgaagctgaagaacctgcggccccaggactatgccagctacacctgccaggtgtctgtgcgtaacgtgtgcggcatcccagacaaggccatcaccttccggctcaccaacaccacggcaccaccagccctgaagctgtctgtgaacgaaactctggtggtgaaccctggggagaatgtgacggtgcagtgtctgctgacaggcggtgatcccctcccccagctgcagtggtcccatgggcctggcccactgcccctgggtgctctggcccagggtggcaccctcagcatcccttcagtgcaggcccgggactctggctactacaactgcacagccaccaacaatgtgggcaaccctgccaagaagactgtcaacctgctggtgcgatccatgaagaacgctacattccagatcactcctgacgtgatcaaagagagtgagaacatccagctgggccaggacctgaagctatcgtgccacgtggatgcagtgccccaggagaaggtgacctaccagtggttcaagaatggcaagccggcacgcatgtccaagcggctgctggtgacccgcaatgatcctgagctgcccgcagtcaccagcagcctagagctcattgacctgcacttcagtgactatggcacctacctgtgcatggcttctttcccaggggcacccgtgcccgacctcagcgtcgaggtcaacatctcctctgagacagtgccgcccaccatcagtgtgcccaagggtagggccgtggtgaccgtgcgcgagggatcgcctgccgagctgcaatgcgaggtgcggggcaagccgcggccgccagtgctctggtcccgcgtggacaaggaggctgcactgctgccctcggggctgcccctggaggagactccggacgggaagctgcggctggagcgagtgagccgagacatgagcgggacctaccgctgccagacggcccgctataatggcttcaacgtgcgcccccgtgaggcccaggtgcagctgaacgtgcagttcccgccggaggtggagcccagttcccaggacgtgcgccaggcgctgggccggcccgtgctcctgcgctgctcgctgctgcgaggcagcccccagcgcatcgcctcggctgtgtggcgtttcaaagggcagctgctgccgccgccgcctgttgttcccgccgccgccgaggcgccggatcacgcggagctgcgcctcgacgccgtaactcgcgacagcagcggcagctacgagtgcagcgtctccaacgatgtgggctcggctgcctgcctcttccaggtctccgccaaagcctacagcccggagttttacttcgacacccccaaccccacccgcagccacaagctgtccaagaactactcctacgtgctgcagtggactcagagggagcccgacgctgtcgaccctgtgctcaactacagactcagcatccgccagttgaaccagcacaatgcggtggtcaaggccatcccggtccggcgtgtggagaaggggcagctgctggagtacatcctgaccgatctccgtgtgccccacagctatgaggtccgcctcacaccctataccaccttcggggctggtgacatggcctcccgcatcatccactacacagagcccatcaactctccgaacctttcagacaacacctgccactttgaggatgagaagatctgtggctatacccaggacctgacagacaactttgactggacgcggcagaatgccctcacccagaaccccaaacgctcccccaacactggtccccccaccgacataagtggcacccctgagggctactacatgttcatcgagacatcgaggcctcgggagctgggggaccgtgcaaggttagtgagtcccctctacaatgccagcgccaagttctactgtgtctccttcttctaccacatgtacgggaaacacatcggctccctcaacctcctggtgcggtcccggaacaaaggggctctggacacgcacgcctggtctctcagtggcaataagggcaatgtgtggcagcaggcccatgtgcccatcagccccagtgggcccttccagattatttttgagggggttcgaggcccgggctacctgggggatattgccatagatgacgtcacactgaagaagggggagtgtccccggaagcagacggatcccaataaagtggtggtgatgccgggcagtggagccccctgccagtccagcccacagctgtgggggcccatggccatcttcctcttggcgttgcagagatgatgagagctgtgtggccacccccccaaccttgcccccggcacaccaaagtgtccacattgtaccaaagactgacccccgccagctggggtgcccaggggcagggccggcccgccagggagggggcctgcattggctgcaaggatgagcagagaacaaggacagaggccaggcactgaggccctggagacagctgttccacttgcacacacgcacacactcatgctcacacacacagagatatattaaagcacaagtttctatctgacctgccagcaccttctttactgcaaagacaggggacttgcctgaatggcatccgccaacccagggacctcggcgcaacataggccttgtccttgctgcactcgtggtgtgcttctgactttaccctgtcccctaagtcaaggccgaactccagcctggtggctttgccagaagggagccagaagtggggcagacatggagcccctcccttggtcagactctgggactcctgagatgggagaggcagggatcagaggacgaacaggtgggactttgcgagctctgtgactgtcccacgtccaggagacaaggaaggtagggcacctgctgcacacgattctgtccagagtgagcactggatggtggagaccataggtcaccccagattccttgacctatttctgggacaccatatttccctcctcagtgtgcaccctttgaagggacccagcacagggtcttgggcctgggcagtctgaagactgataacttccccactccaccctacaagcagtgggactcctgagaacacggttctctcctagcctcagcccccagctgggtctcagaggagctgggggagcggtggccagcccattttctggggtgaggcttgacttggagaaaggcagaagagacgtcccgcttctgtgatttggtgcccccatatcagacaatgaatttggaagtggagaggggccttcatttcttatctacttggcatgaaagggtgccctggataggagggtgtgtacagggcaaaatgccaaaaagcactgtctagttgaaagttcccttctccacccaggggcagtgaaggaggaggggcttatagagctgggattggtggagggagcaggtgccagtcccctcactctctgggagctgtgaaagggatccctgtccttgggtcctgggttaggcacctgagattgacatgatgggatctagatctttcctccttgacatcacctgagcccccacctagccatccatgggagagagaaggcccagccccttctagaatgactctttaggcatgcgtgcatatgtgtgtatgtgtttgtgcccgtctgtgtctaggtaccaccgtgggtacattgttgggcaggagtgtgtgcaaacacaggtctgtgtgtgcaatctcacatatctgcctgtgagactggattgagacccattcgtttctatgaatgtccgtgtacgtcagcgtgtgtgtccaccttcctgagtgatgtgttcgcttgtagggtgctggctgaatagactctgtccagccctgttctgtagtctcaagctgcctgcgatggcctgaaattccacctttcatcccctatggatgacggagagcttacagatgaccctattgaatgcaagcacctttggtgaggagcatcacagggctccttctggagcatttggtggggacagctgcagagaagaggcctggaactcgggcagcactgcagtgccaggaggcaggcggggaaccgaggcaaaggctgcccatctccccctgccaggcctgtgtgatcattatcaccaacagctggtgggtggccgggccaggatgcagcggggccttctgatgcccaatcagcacggctgccttcctgacccagtcaaggcctctgtctgaaatgagtcgctccaggttctcagcatacacttccatcgcgtctgtcgggtattgttccttaactgtcccatctgtgcagagtccattgccccaactagactgtgagctcctcctctgagccttccaagtcccccctccaccttcgccacctcccgctcgtgcccagcacaagtgagcctggtgtggaaaccactccattgcccggtggaatggattctgtaatcagtggttcctggccttgcctgcagaatagaaccaccagagtcctttaaaaagtattgctgcttggttcccacctcagaggttctgagttaattggactggagcgcagtcggacatcaagaaatgttgaaaagctccttgggttctcctgacagcaggaaccactggcctggcaccacctgggtgcttcctctgtgccctcgctggggtaggcattggagcaccagagatgaatagccccaagtgctccctctttggggttcccaaggcaccctgtgcctgcttccctcagaggaccttccaatccatttgccccgcaaccctggctgctccgacaggggagacttgtctcccttgttcccctcaggatccatagagtggacagtaaaggtgctcagtacatgttggctgagctgaactgcatacatgtggcccccaggttcctggtctttatggacgaagggcacaaggtggaggggggatggggggatgctgctggaggtctcagtgggtgcagacagccctgccttgaggatggcttgacctgggattgacaaaatgtgtctgctgaaatgctgaggtccccacgtgtgaatgggtgaggctgatgtggatgtctgtgtgtgccagcaggtgggtgggggatgtgggtgtcagtgtatgccagtgggcactgtaaatgtctaggcatgtgctggtctctgtgtgtttgtgtgttcctcagcaggaatgagtgtctttgtgtatcacctggtgacttgtcagtgtctgtgtctgtgtgtgcctgtgagccagcatctctgtatcagtgttgctcatgctgtgtctttgtgcgccatggtgtgtcagtgtctgtgtgttgatgggtggcccatgagtgacccccgccaggggagaccaggctggctggatccagcacatctccccagtggcagcctcgccctctgggtcagggtgactgaggcattttgtggccttaaaacggggtgttcagggtcagccctcagggtgctggggcccttccatcccttgtccccttcaggttggtgaaaaggactccgggggccaggtgctgtatagcagcttatggaagtctcagctgggctatcctgcccttgggagcacagacaggctcctagggtgctgagtgaagcctgaagaccaagccccctcctcctggaatgctccttccacccctacctctcagagatgggcctgacacctctttctcattcattctccttttccctgtgctctgggaaagcccctggctcaggctgtcagagtgaggatggacctcaaaagtttgatcccctcgtgcagatgaagaagctgaagcccagagtggggaaggggagtggcccaaggtcacacagctagtttgagtagagccagtcttgggagagccaagtactacagccctgggggtgtcacaccgcttgtcactgcccctgaggtctcctgccaaacaactgcagggagtttggctaacagtcctgtgtccagggtgccggtggggatgttatagatgttgctgggatcctgccctcggctccaaattctggcctctcatcccaggctgcagacccttctgccccatgacaggcctgggtgccacacagaggtggccaccctcccaccacagtgtctgcagctgctgcccttctcccaggcccccagacagaagagaccctgtttcccctcctctcccctgtgacttcacaagagcttgggctaggagtgaaggtcagcatgttctcatgtgctcatcctcttggtttccccaaagaccgggagggtcacggatggggcgtgcagaatccttgtgttttttctcgctgggcagcttgaggggctggggagtattcccagggtctttgctctggagagtccctgcagagccactggctgaggttgggttcagggttcagcggagtcctccatgcttccaaaggccgggaagcacccgcctctctatcgagtcagtgctgtgcgtgtgtgtctgagaatgtgtgtgatgtgtggagtgtgcgtgtgtttgtgtgtgtgtgtgtgtgtgttggggcagaaggaccactctttcctggggatcccttgacccttataactagaagggaccttagggagcatctaagctggtgcccccattgtacaggcgaggtccagagggatggcatctgcccaccccaccccttgccctcttgttgcctgcactcatttcccagggaccctcctaggataggactgccctccttcctggccccctcccgccatcctcccagccacccacataatcaccatctcagcccaactctggtggccctctaggtctccatgcattcttcctgccctagagtagccagctcaccaaggcctttatccccagcccaggagaagggtcagggagggaaggggctgcaccagccctgagacctcaaagacttgggagaaaagccaaaactcctcatgcccaggcccacatgtctgaccaccccagcccaccccgccaccaaggtaaaagcacaacaggagacccccttattaatgggtgaaatgattggggttgtttttttagtcacacagccccatcctcacccctttgccttgctgtctgtctccaccccagcctctgttccccatttgcctctctttcacctccaagcccccaaatgtaacctctagttgcggacgcggttgttctatcaataaagctgcagtgttctagcgctcagcgt

SEQ ID NO: 1018 - DNA, 1796 bp, HOMO SAPIENS
actttcgctatttgaagacattaggaagttatgtggtggctccgtaccctcctttctccatccgaggccggggtcctaaagtcggtgtcacggtggcagcacccagcgttttgttggctctttcgccagcagcgccgagcggggggttttctgtcacagcacttgttgcaccgaatttctcggtcgcagaacctctcttttccgagggtcgacattttctgcgtgacaacaccgttggttccgccaaaatggatgttgtccttgggaactcctccggctggcgtcactcttagggtcccagcaccgccatttcgccaagccgagttctcttggtcgcggcacatcttgttcctcggtgcctccattttctcggtggcggcagcgctctggtagccgatctgagggatttggaatcgcagccagttgcgcagagtctggggttcccgggcgacgccggcgctgggcgggggagcccgccgctcctccgagccagaggcagaggagctgcgcggacgccgtctcttcacagcgccgcgagcgccgacgcacgggttcctgctcggcctcctgaacccagtcccccggcggcgccgctggcgtctctatcgcaggcccctgcggtttcgcccgtcgttggcttcttggtcctagcaagtttcgatttcgcggtgcccgctatttctacctcttgtccaaataactagccaaaatgtgatttctcagcctaagcaagtcccgatttagggcatcggtctagccctggctgcgatttcttggtcctaggaagtcactgtttagctgtagcaaggcagacttaaccgtgcgatggtgacttttctttttctttggttctttttcttttctctttctttcttgatacggggtccggctctgtcgcccaggctggagtgcagtgccgcgatctcggctcactgcaacctccgcctcccgggctgaagcgatcctcccaccccagcctccggggtagctgggaccacaggcacgcgccaccacgcccgggtaattttttgtatccttcctagagacaggatttcgccatgttgcctgggctggtctcaaactcctgatttcttagtctgaccaagtcagagtttagttatttcttaccgtagcaagttgagagttattccagtttgcgatttctggttgtaacaattctggctttaaccatgcctacataattttagtagtagcaaattcctgttccgtaataggagcccccattatagccatgcgtgcggtttataactcctgtattaatctaggtactgaagaatgcaatttaaaaaaatttagcagtgtctggaatttttaaatcataccaagttagaattcgcaatagtctcgccctggctatgctggcgatttttcactcatgtagaagttggggtacgtcggctacagataattgttggtgtcgcaaataccggtttaaccatggctgtttcttcttaatccgaggaaacttcggataggcgcaagaggcacgggtttagtgctgacaaatataatggtaggatctcaccattcgaccctgtttgcaatttctttctgtttgtaggatgctttgtatgttttgtatactcaaaaaaaaaaatttttttttggtgtatcttgttctggcagcgaggttatcagtgtattttgttttaatttctatttgcttttaaatttttaattattttttaatttaaatgttacggtatttttttcttacccactgtcttccccggtagaataaatgtggcgtatttcttctactgaaaaaaaaaaaa

SEQ ID NO: 1019 - DNA, 447 bp, HOMO SAPIENS
  misc_feature (68)..(68): n is a, c, g, or t
  misc_feature (72)..(72): n is a, c, g, or t
  misc_feature (74)..(74): n is a, c, g, or t
  misc_feature (77)..(77): n is a, c, g, or t
  misc_feature (80)..(80): n is a, c, g, or t
  misc_feature (91)..(91): n is a, c, g, or t
  misc_feature (94)..(94): n is a, c, g, or t
  misc_feature (112)..(112): n is a, c, g, or t
  misc_feature (124)..(124): n is a, c, g, or t
  misc_feature (135)..(135): n is a, c, g, or t
gaaagcctcgtgttttagaacggcgggtgggaaggacttgatgcgccgtgttcttgcagaaagggcangggncnatnccnccttgtgcttngcntggcacatggtaggggcntaggtatttggncgaatggagtnatgtccagagaaagcaggactttggctcgggcaaggagtgggtggcagtagggaggactgtggtctgtggaagggtcactgtggctcttggctttctcctactgtccctgccgatggtgacagccagccagcctcctggccgcaccattgtaccgcctctttcttggcttggtcctgggcgtggatgtcagatttgctttgttcatgtaaaatgtggtgggatcatgtctccctcaaatcaaattccaaccaaaatcaaaacaaaacaaatcaagcgtctcagtgaagacagccctgagggttctgttgtct

SEQ ID NO: 1020 - DNA, 1299 bp, HOMO SAPIENS
ttgttggaagacatgaagatgctggaagacacagagatgctggaagacgtggagatgttggaagacgagcagatgctggaagccctggagatgctggaagacctggagatataggaagacatggatttgttggaagacgtagcttagttggaagacatatattttctggaagacgtggattttctggaagacatggcttggttggaagacgtggattttctggaagacgtacctttgttggaagacatacctttgttggaagacgtacctttgttggaagacgtacctttgttggaagacacaagtaggctggaagacattaatttgatggaagacatggctttgttggaagacgtggatttgctggaagacacggatttcctggaagacctggatttttcggaagctatggatttgagggaagacaaggattttctggaagacatggatagtctggaagacatggctttgttggaagacgtggacttgctggaagacacggatttcctggaagacccggattttttggaagctatagatttaagggaagacaaggattttctggaagacatggatagtctggaagacctggaggccattggaagatgtggattttctggaagacatggcttttttggaagacgtagattttcaggaagacccaaattatccggaagacttggattgttgggaagacgtggattttctggaagactgggaggttactggaagacatggattttctggaagacatggattttctggaagacgtggatcttcaggaagacatatattggctggaagacctggattttttccggaagatgtggattgactggaagacctggatttggtggaagacgtagatttttctggaagacactgactgactggaagacctggatttctttctggaagacactgattgactggaagacctggatttctttctggaagacactgattgactggaagatctagatttttctggaagaactagatttactggaagacttggatttggtggaagacacagatttttctggaagacatggattagctggaagatctgtatttgatggaagaccttgaaattattggaagacatggatttcctggaagacgtggattttcctggaagatctggatttggtggaagaccagtaattgctggaagactggatttgctggaagacttgatttactggaagacttggagcttcttggaagacatggattgtccggaagacatggattgtctggaagatgtggattttctggaagctcaggattatctgg

SEQ ID NO: 1021 - DNA, 2008 bp, HOMO SAPIENS
cctgccccggcggggggtcaggatcctccacaggtaggcgcagtcagctggagcgtcgcggcggtccgccggtcgtggagggcgtgtcctgcggcgcgatggccgtagtgttgccggcggttgtggaggagctcctgagcgagatggcggcggcggtgcaggagagcgcgcgaattcctgatgaatatctgttatcgctgaagtttctctttggctcatcagccacccaggccttggacctagttgatcgacagtccatcaccttaatctcatcacccagtggaaggcgtgtttaccaggtccttggaagttccagtaaaacatacacatgtttggcttcttgtcattactgttcatgtcctgcatttgcattctcagtgctacggaagagtgacagcatcctgtgcaagcatctcttggcagtttacctgagtcaggttatgaggacctgtcagcagctaagtgtctctgacaagcagttgactgacatattattgatggagaagaaacaagaagcataaaaggtacagattgagcatcattctttcaaaatagaatcctgtcaagaaatgcattgaaagcgtcatgattcacatggaaaagaggtgaaatggatcttcagacacttcatgttactgtcccttttccctccaggactgcaggaggtgctgtgggttggagccgtgggctgtggagggtttgtgtatgatgagaagccctgtacagtcttgtcaagaaataccctgagccagtctctgagacgcttcggtaaaaaatgtccctggatggaatcaagattttaaattcaaataaagcctaatatcatgttgtgtccacattatttagtctttttttttttcttttgagatggagtctcactttgtcgcccaggctggggtgcagtggcgtgatctcagctcactgcaagctccgcctcccgggttcacgccattctcctgcctcagcctcccgagtagctgggactacaggtacccgccaccatgcccggctaaatttttgtattttttttttagtagagatggggtttcaccgtgttagccaggatggtctccatctcctgacctagtggtctgcccgcctcgacctcccaaagtgctggaattacatgcatgagccactgcgcctgaccctatttagtcttaagtaactaactgaattactagtaatttttaaaaggttggaatggtgggccaaacagtaagatgaagtttcgacgagtaggtcagttcttttccttgggtccaggaaactattgagcagcaacagaagatcagagcagagatgtggctaaacagtagcaggtatgaaaagacttagaggttctggtttctgtaagcttcaaatatctgtgatgcttgtgccaaaacagcttaagtagactgtattgtttgagagttagtatcgagaacaagggaagaactggtttcactctgcacttctgatctttacaacagggcaattgaaggaacagactaaaaatcgtgtcctggaaggaaactacaggtactaccagggattttcagtctgaagaagaaaagacaaaatagatgacagaaggagtattagaagggagagcgatgagactcagttggacaccgagagagcaaagaagcaataatacgtgaagatgaaaatgaaatcaatttcagcataagaagacaagaacttatggtaaagctgcccacagccagaagaggatcctagaaggacaggaattccctgtctgcagcatttcataagcatgtaatattgttgcagggatactgcagaaggagttgaagcagtggacagacagatgatataggtgattttacagcctaagaaagccctgtgcttgtgcccccaaaacatgaggtgctagtgaatgaatgctgggggaaagcccagggcctaggtgttgcaatgttctgtggttggcagatgctttttgttttgttaaaaagtgcaacagataaaatttatcaatacttttctgctactcaggaaa

SEQ ID NO: 1022 - DNA, 1461 bp, HOMO SAPIENS
gtctaagccccgccctttcctgtcgtgacttaacgcacgcaagcggctccagggtacgtccccgccacgcgcgctcgcaggatcggtgcgtggtgacgtttcgccggcgcgggcgccatcccggaagcgcgagcaaggccgccagatgtgcaggcagcggaggaggagaaagagatggacctcccggactcggcctcgagggtcttctgcggccgcatcctgagcatggtgaacacagatgatgtcaacgccatcatcctggcccagaagaacatgctggaccgctttgagaagaccaatgagatgctgctcaacttcaacaacctgtccagtgcccgcctgcagcagatgagcgaacgcttcctgcaccacacgaggaccctagtagagatgaaacgggacctggacagcatcttccgccgtatcaggacgctgaaagggaaactggccaggcagcacccagaggccttcagccatatcccagaggcatccttcctggaggaagaggatgaagaccccatcccacccagcaccacgaccaccattgccacctcagaacagagcacgggctcatgtgacaccagccccgacaccgtctcgccctccctgagccccggcttcgaggacctgtcccatgtccagcctggctccccagccatcaacggccgcagccagacagatgacgaggagatgacgggcgaatagccctgctgcccggtgccttgagggggtctcagggcagcagcatacaaggtggcagcgggtaaccctgccttgttctgtcatccagggctcctttgctgccccgttctgtcacccagggctcctagggggacaaggctctctcccgaggggtgtggaattcctgggggggtctttaattctggctccttccttcctcagaacatctctattctgcaagacccctctgccatgccagggcacgcccattccagctggagtcgtggggctgggcacaggggaatttttccagagctgagcctgacgtctgctctgaagaatgcttagaaggttcccagacaccagagccagatgtcccccaccaccggtcaggacctccttgaggtgcacaagcacggtctcctctgagttcaccccagcccacccccgcacccactaattctgcttttcctgccccttgctccgtaaaagtatcaaatactttctccttggtatctcaaggaggtttctgagataggtagaagtcttgagacggaggctggccatccattcagccctgagcgtgctgagttctgtgtttctctgaatagaggtgtggaacctgaggggccagcaggcctctctgaaggcctccatggagcaaacggagccacctcgggaaagagtttaatggaatatttttgtacccgatgtttacagatgctgttgggaagttatcaataaaaagacaccattactaaaaagggaaaagtacaccta

SEQ ID NO: 1023 - DNA, 5066 bp, HOMO SAPIENS
ccctcctcccccgcggggttgcacactgcggaggaggccgcgcgtgcgcgcccgctgagcccccgcggcggggcgtccccgaagcgggcgctgacaccgcagtgcaccggacgccgcacgctcttttcgcgaggaggtgtgattgcctatatcagttcttccagctcagcctcaagccctgcctcttgtcacagtgagggttctgagaatagtttccagtcctcctcctcttctgttccatcttctccaaatagctctaattctgataccaatggtaatcccaagaatggtgatctcgccaatattgaaggcatcttgaagaatgatcgaatagattgttctatgaaaacaagcaaatcgagtgcacctgggatgacaaaaagtcatagtggtgtgacaaaatttagtggcatggttctactgtgtaaagtctgtggggatgtggcgtcaggattccactatggagttcatgcttgcgaaggctgtaagggtttctttcggagaagtattcaacaaaacatccagtacaagaagtgcctgaagaatgaaaactgttctataatgagaatgaataggaacagatgtcagcaatgtcgcttcaaaaagtgtctgtctgttggaatgtcaagagatgctgttcggtttggtcgtattcctaagcgtgaaaaacagaggatgctaattgaaatgcaaagtgcaatgaagaccatgatgaacagccagttcagtggtcacttgcaaaatgacacattagtagaacatcatgaacagacagccttgccagcccaggaacagctgcgacccaagccccaactggagcaagaaaacatcaaaagctcttctcctccatcttctgattttgcaaaggaagaagtgattggcatggtgaccagagctcacaaggatacctttatgtataatcaagagcagcaagaaaactcagctgagagcatgcagccccagagaggagaacggattcccaagaacatggagcaatataatttaaatcatgatcattgcggcaatgggcttagcagccattttccctgtagtgagagccagcagcatctcaatggacagttcaaagggaggaatataatgcattacccaaatggtcatgccatttgtattgcaaatggacattgtatgaacttctccaatgcttatactcaaagagtatgtgatagagttccgatagatggattttctcagaatgagaacaagaatagttacctgtgcaacactggaggaagaatgcatctggtttgtccaatgagtaagtctccatatgtggatcctcataaatcaggacatgaaatctgggaagaattttcgatgagcttcactccagcagtgaaagaagtggtggaatttgcaaagcgtattcctgggttcagagatctctctcagcatgaccaggtcaaccttttaaaggctgggacttttgaggttttaatggtacggttcgcatcattatttgatgcaaaggaacgtactgtcacctttttaagtggaaagaaatatagtgtggatgatttacactcaatgggagcaggggatctgctaaactctatgtttgaatttagtgagaagctaaatgccctccaacttagtgatgaagagatgagtttgtttacagctgttgtcctggtatctgcagatcgatctggaatagaaaacgtcaactctgtggaggctttgcaggaaactctcattcgtgcactaaggaccttaataatgaaaaaccatccaaatgaggcctctatttttacaaaactgcttctaaagttgccagatcttcgatctttaaacaacatgcactctgaggagctcttggcctttaaagttcacccttaaggcctttgtttatttaaacatgaactgatggtaactgtacattttgtgctaaaatgcatatttatatgtgtataccatatgtggagatagaaaagacctttaagacaataaaagattgtaggctatctctgtaatcatgcaatagctgttcggattgagaactcttcagccatgattagacgttgactgcatctccctgatagaccaatcagctgtgtcgcacttaaactggagaagttacactgaagtataatcacactgaatgttagactttttcatctgccaaaaccaaaaaccattttgatctccctgtggttatcaatataacgcacaatcacaagtgtatgaggacttagaaattaatcctttgtggtaggagttctgttgaatgatggaaatcttattactaccacaagactatttgatctggtaattggagacttcgggatttaggagatctccatgtctgtatttactctaccactgctaaagtgtgtggtcctgggtagtttacttgcttgcggaaaatgagaattgatggtgtccccaatgccccacctcacagagttactaaaaaatgtctgtaaagcatatttacctcttgggagataggcactatgtaaataaggtaaaatttctgttattacaattattcataataatattcttttcttatttctaagcctttctgggaaatcatttcagtccacaccaaccatattattcagggttcctgccatatgtgtggggtatcctactgatacacacgtattcaaagtttatgggtacaacaaagacatagtacatgtacataatatgtatgtgaatatagttaaatatatttcttcacaatattttaaactgtgaagaactttatcatacaggaaacttaaaacaagaggtgtcaaaagacccaaattaggtgcattttacttgtttatgatggcataaccattgctttaaaatgtttagacagtagaatattgaatttatgctctatttttgtttatttaagcaacacttaatgtaaaagtgcaacaggcaattgaatccaaatttcaacgacaaaaaaaaaaaacatgtattttagagttcatctttggcaaaatctttggttcagggtactagttgtttaaaagttgattcatattcttaccttgtgctgagaaaggttgcattgctgccccttatacacatgctgcagcttgatgttaaagaatttttattctttctgaagaactaattaatgtttaaagcaactgtttaatatgatggcatgtgtgtgtgtgcgtgcgtgtgtatgttctgagtccacttcttttttcctaaataacactacagggattttgtcatattagatttaatttataatttgaaaaatcatctagtgtgtgacctacaggcttagaaatggtatagtcaaagacattttatccacatttctaatagtggacttgattaagtagataagatcagcatctgtttatggtagtaggagaaatagccaaagttgaggattttatgtatgttttcctgtttacctggaaaatagcaattaattggattttttggtaaagattgccttctgtataatgtttggattatataaaattgcaaaaatgataacagcccgctttactgtactaagcctgttactttcatgacgtgtgagcagaatgccttattttgtaatcttgtttaacttgttgctactgggacttgatttactgtggcactagttaagtaagttaaaaaaaagttaaaccctctcattattaaagaggaaaggcgatggtgatgtctgtagtacaatataaaccataattgtgatttaccttaagtaggtataactcttatgggatatacagtatagtttttgtgaatctttacatgatagcattatctttttataattttttttcctaagataaacaaatgcatagttttcttctatgggtgatagaaacagctttttgaagtaatgaaaacctcaaaagatcatgttgattcttaatttttgccttttgcataagcctctttataacatgtatctttaaaacaattaagtctttaggaatgtgtaaccagaactatgttagtattgcttataaaactttagttaggttcaatatatacatatatacatctctatataggtatatagatttgcattttgtcttgtaaaattttatttgaataaattcttcctgtaggtaatgggaaacaaaattaatagttcatatgtcactcatagcatttctatatttgaaagtagcccaatataaaacttttgattctaaaattaaaccagcagcctattacaagcacattctttgattgagtcattggttataaacttactaaatgcagagaaagcagccaatttaggaaacttctgagttggtgggacactgttgattaataatgtactgtatgaattaagtgatgctttaactttgattttacattttaaagttaaaatgtgggcattatgtcagcaaacttaagggcattatgtcagcaagctaaaacattttttttcctgtgcttttaatgtatctctttacatgatctgagagaggattcaagttgatagaaatagctgaggggaaaagggggaacatcttgggatgaagcttgtccttatggtgatggtttaattacagattaaaaaattagaaggaaatttcagtggattaagtgtatagctttcatatctacatttcaagaaattaccattgtaacttgataagagatgatttattttatgtaaacatctttgcaaagcaaggtgtagcagctcagctagatttattactgtgcacgaaagtaaatacctatctcaattattctttttcttttccaatataaagtttgctgaatgtacaagaagagtttatcacttaggatatagaatttttttaggggttgggggaggggatctgttaggaaactgttacctataaacaaagattgactggattcgatccaaaagataaaacttgaagctattctggaactaacatggaaaaatgaaatggctattgtttaaaaaaatgatagaaatacattgttgatgggatatgagttaagtttattttctacaaactgtaattgatgaggacatggataatatcttcatgtttctgagaagtaatctgtatgtggggggaggggataataaatatttctaaccaacaaaaaaaaaa

SEQ ID NO: 1024 - DNA, 6994 bp, HOMO SAPIENS; identical to SEQ ID NO: 778

SEQ ID NO: 1025 - DNA, 3065 bp, HOMO SAPIENS
gggcggggcggccgcgggtcgcgggcggatgacgcgccggggccggcggaggagcagccacttcctggggccgccggccggggccgctggctgcactcagcgccggagccgggagctagcggccgccgccatgtcccaccagaccggcatccaagcaagtgaagatgttaaagagatctttgccagagccagaaatggaaagtacagacttctgaaaatatctattgaaaatgagcaacttgtgattggatcatatagtcagccttcagattcctgggataaggattatgattcctttgttttacccctgttggaggacaaacaaccatgctatatattattcaggttagattctcagaatgcccagggatatgaatggatattcattgcatggtctccagatcattctcatgttcgtcaaaaaatgttgtatgcagcaacaagagcaactctgaagaaggaatttggaggtggccacattaaagatgaagtatttggaacagtaaaggaagatgtatcattacatggatataaaaaatacttgctgtcacaatcttcccctgccccactgactgcagctgaggaagaactacgacagattaaaatcaatgaggtacagactgacgtgggtgtggacactaagcatcaaacactacaaggagtagcatttcccatttctcgagaagcctttcaggctttggaaaaattgaataatagacagctcaactatgtgcagttggaaatagatataaaaaatgaaattataattttggccaacacaacaaatacagaactgaaagatttgccaaagaggattcccaaggattcagctcgttaccatttctttctgtataaacattcccatgaaggagactatttagagtccatagtttttatttattcaatgcctggatacacatgcagtataagagagcggatgctgtattctagctgcaagagccgtctgctagaaattgtagaaagacaactacaaatggatgtaattagaaagatcgagatagacaatggggatgagttgactgcagacttcctttatgaagaagtacatcccaagcagcatgcacacaagcaaagttttgcaaaaccaaaaggtcctgcaggaaaaagaggaattcgaagactaattaggggcccagcggaaactgaagctactactgattaaagtcatcacattaaacattgtaatactagttttttaaaagtccagcttttagtacaggagaactgaaatcattccatgttgatataaagtagggaaaaaaattgtactttttggaaaatagcacttttcacttctgtgtgtttttaaaattaatgttatagaagactcatgatttctatttttgagttaaagctagaaaagggttcaacataatgtttaattttgtcacactgttttcatagcgttgattccacacttcaaatacttcttaaaattttatacagttgggccagttctagaaagtctgatgtctcaaagggtaaacttactactttcttgtgggacagaaagaccttaaaatattcatattacttaatgaatatgttaaggaccaggctagagtattttctaagctggaaacttagtgtgccttggaaaaggccgcaagttgcttactccgagtagctgtgctagctctgtcagactgtaggatcatgtctgcaacttttagaaatagtgctttatattgcagcagtcttttatatttgacttttttttaatagcattaaaattgcagatcagctcactctgaaactttaagggtaccagatattttctatactgcaggatttctgatgacattgaaagactttaaacagccttagtaaattatctttctaatgctctgtgaggccaaacatttatgttcagattgaaatttaaattaatatcattcaaaaggaaacaaaaaatgttgagttttaaaaatcaggattgacttttttctccaaaaccatacatttatgggcaaattgtgttctttatcacttccgagcaaatactcagatttaaaattactttaaagtcctggtacttaacaggctaacgtagataaacaccttaataatctcagttaatactgtatttcaaaacacatttaactgttttctaatgctttgcattatcagttacaacctagagagattttgagcctcatatttctttgatacttgaaatagagggagctagaacacttaatgtttaatctgttaaacctgctgcaagagccataactttgaggcattttctaaatgaactgtggggatccaggatttgtaatttcttgatctaaactttatgctgcataaatcacttatcggaaatgcacatttcatagtgtgaagcactcatttctaaaccttattatctaaggtaatatatgcacctttcagaaatttgtgttcgagtaagtaaagcatattagaataattgtgggttgacagatttttaaaatagaatttagagtatttggggttttgtttgtttacaaataatcagactataatatttaaacatgcaaaataactgacaataatgttgcacttgtttactaaagatataagttgttccatgggtgtacacgtagacagacacacatacacccaaattattgcattaagaatcctggagcagaccatagctgaagctgttattttcagtcaggaagactacctgtcatgaaggtataaaataatttagaagtgaatgtttttctgtaccatctatgtgcaattatactctaaattccactacactacattaaagtaaatggacattccagaatatagatgtgattatagtcttaaactaattattattaaaccaatgattgctgaaaatcagtgatgcatttgttatagagtataactcatcgtttacagtatgttttagttggcagtatcatacctagatggtgaataacatattcccagtaaatttatatagcagtgaagaattacatgccttctggtggacattttataagtgcattttatatcacaataaaaattttttctctttaaaaaaaaaaaaaaaaaaaaaa

SEQ ID NO: 1026 - DNA, 1595 bp, HOMO SAPIENS
agcccctagcgcagacggcggagagcagagagggagcgcgccttggctcgctggccttggcggcggctcctcaggagagctggggcgcccacgagaggatccctcacccgggtctctcctcagggatgacatcatccgtccacctccttgtcttcaaggaccacctcctctccatgctgagctgctgccaaggggcctgctgcccatctacacctcacgagggcactaggagcacggtttcctggatcccaccaacatacaaagcagccactcactgacccccaggaccaggatggcaaaggatgaagaggaccggaactgaccagccagctgtccctcttacctaaagacttaaaccaatgccctagtgagggggcattgggcattaagccctgacctttgctatgctcatactttgactctatgagtactttcctataagtctttgcttgtgttcacctgctagcaaactggagtgtttccctccccaagggggtgtcagtctttgtcgactgactctgtcatcacccttatgatgtcctgaatggaaggatccctttgggaaattctcaggagggggacctgggccaagggcttggccagcatcctgctggcaactccaaggccctgggtgggcttctggaatgagcatgctactgaatcaccaaaggcacgcccgacctctctgaagatcttcctatccttttctgggggaatggggtcgatgagagcaacctcctagggttgttgtgagaattaaatgagataaaagaggcctcaggcaggatctggcatagaggaggtgatcagcaaatgtttgttgaaaaggtttgacaggtcagtcccttcccacccctcttgcttgtcttacttgtcttatttattctccaacagcactccaggcagcccttgtccacgggctctccttgcatcagccaagcttcttgaaaggcctgtctacacttgctgtcttccttcctcacctccaatttcctcttcaacccactgcttcctgactcgctctactccgtggaagcacgctcacaaaggcacgtgggccgtggcccggctgggtcggctgaagaactgcggatggaagctgcggaagaggccctgatggggcccaccatcccggacccaagtcttcttcctggcgggcctctcgtctccttcctggtttgggcggaagccatcacctggatgcctacgtgggaagggacctcgaatgtgggaccccagcccctctccagctcgaaatccctccacagccacggggacaccctgcacctattcccacgggacaggctggacccagagactctggacccggggcctccccttgagtagagacccgccctctgactgatggacgccgctgacctggggtcagacccgtgggctggacccctgcccaccccgcaggaaccctgaggcctaggggagctgttgagccttcagtgtctgcatgtgggaagtgggctccttcacctacctcacagggctgttgtgaggggcgctgtgatgcggttccaaagcacagggcttggcgcaccccactgtgctctcaataaatgtgtttcctgtcttaacaaaaa

SEQ ID NO: 1027 - DNA, 3520 bp, HOMO SAPIENS
agagcaaacggcatatatcttagggtggaagatggataaataattctgtcacacgtgccctggcctctggagctcagctgccagtccacgtctagggaatcttagcatctgggaccaagacactttacagcaatcatcaccctttgcagaggaggtgagctcaccaggactcatctgccatttcagaccttttgctgctacctgccaggtggcccccactgctgacgagagatggtggacctctcagtctccccagactccttgaagccagtatcgctgaccagcagtcttgtcttcctcatgcacctcctcctccttcagcctggggagccgagctcagaggtcaaggtgctaggccctgagtatcccatcctggccctcgtcggggaggaggtggagttcccgtgccacctatggccacagctggatgcccagcaaatggagatccgctggttccggagtcagaccttcaatgtggtacacctgtaccaggagcagcaggagctccctggcaggcagatgccggcgttccggaacaggaccaagttggtcaaggacgacatcgcctatggcagcgtggtcctgcagcttcacagcatcatcccctctgacaagggcacatatggctgccgcttccactccgacaacttctctggcgaagctctctgggaactggaggtagcagggctgggctcagaccctcacctctcccttgagggcttcaaggaaggaggcattcagctgaggctcagatccagtggctggtaccccaagcctaaggttcagtggagagaccaccagggacagtgcctgcctccagagtttgaagccatcgtctgggatgcccaggacctgttcagtctggaaacatctgtggttgtccgagcgggagccctcagcaatgtgtccgtctccatccagaatctcctcttgagccagaagaaagagttggtggtccagatagcagacgtgttcgtacccggagcctctgcgtggaagagcgcgttcgtcgcgaccctgccgctgctgttggtcctcgcggcgctggcgctgggcgtcctccggaagcagcggagaagccgagaaaagctgaggaagcaggcggagaagagacaagagaaactcactgcagagctggaaaagcttcagacagagcttgactggagacgggctgaaggccaggctgagtggagagcagcccaaaaatatgcagtggatgtgacgctggacccggcctcggcgcaccccagcctggaggtgtcggaggatggcaagagcgtgtcttcccgcggggcgccgccaggcccggcgcctggccacccgcagcggttctcggagcagacgtgcgcgctgagcctggagcggttctccgccggccgccactactgggaggtgcacgtgggccgccgcagccgctggttcctgggcgcctgcctggccgcggtgccgcgcgcggggcctgcgcgcctgagccctgcggccggctactgggtgctggggctgtggaacggctgcgagtacttcgtcctggccccgcaccgcgtcgcgctcaccctgcgcgtgcccccgcggcgcctgggcgtcttcctggactacgaggccggagagctgtccttcttcaacgtgtccgacggctcccacatcttcaccttccacgacaccttctcgggcgcgctctgtgcgtacttcaggcccagggcccacgacggcggcgaacatccggatcccctgaccatctgcccgctgccggttagagggacgggcgtccccgaagagaacgacagtgacacctggctacagccctatgagcccgcggaccccgccctggactggtggtgaggcgccctcgtggccgcgggactggccccggggggccccctggatcccaggccagcgctttgctctcctgctccgtctgaagggagcaggtgcaccagccaaaatgtcagcgagggggacaaagagagggacctttgcctacgtagatgtgtatgtgtagtgcgattttcttcaaggaaaggagacaagtccaaagctcgtttgtggattgtgggactgagcgaaggagtacaaatatatccacgtcgctcagagctggggtgctcacggtgggcggtgggcaagaagccagcatggaagaaagaagggagaaaactttggtgactgccttagagggatcagttaatttgtatagttttatattttttgtatatgtttgctagctctaaaaaggtcgagatgcaataacacttcgtaagcaacgagttcacctaagtaaggctcagatcctagttttaaaaaccatttcccattaaaatgaagttggaggaacagctgcttctggagccggggcaaaaatttcaaggtgagcctggagcattgtgtgtggtgaagtaaaataaaggctcaaaacgtgacggcaacccggcaaaagggtagggagccaggccgaaggggcctcactgaccaattgtgggacaatttgaacatcaggatgaataatgacaggagagattataacacactgaataaaaacataatccatgagttcatgctgatactcaaatttctttttaaaaaggagaaacaggaaggtttcttttggaggtgaaatctaattattggtgagagtcttggagaacaggctgtttccagtctcaaagcagtaaccttatacactacttataagtttgaaaggggaaaggttacctttacaatggagacatctaccagatcatccaagtgattaaatttaacatcatcaatgatgggaccaaggacattattagtttgacaactggggaaagaagtgttcttcaccccctacccccaagacattgtctctgtcggccaggctggagtgcagcctcaacctcctgggtccaagtgatcctcccacctcagcacacaacaccatgcccaattttaagtgcgttatagagacgggggtctcactttgttacccaggctggtctcaaactcctgcgctcaagcaatcctcccacctgggcctcccaaaatgctgggtgtacaggcatgagccgctgtgcctggcttcattttcagagtgagacatttgtactgtggctatgtaggagaacattcttgttcttagcaaacatactgaagtttttagatattaattaccacagtgtctgccactgaatttccagtgactaagtggaaaaatataaaacatatgaatataaagaaagaaagagacaagtcaaatgtagtaaaatgacaacacttggtgactctaggtgactggtcgacagatgttcattgtactatcaatgtggctttgctgtgggtttgaaattttgcaaactaagagttgggtggcggggagaaggatacaccaaaaaactaagtgattatctttggatgggaaaatgtttggtaattgcattcttaaaatgtcttctttgtattttttaatgttcaataatgtatatgtatcagttctgtaataaaggggaaaacactttttttaaataaaaaaaaaaaaaaaaaaaaa

SEQ ID NO: 1028 - DNA, 7732 bp, HOMO SAPIENS
gcggccgcggcgggagcggcggcgcactcggggggaagcaggccccactagacgggccgcgccgacgggctccgcgcactcgcagcccggggcgcccccacccccagcgcccgccgccgcgggcagggccggcccggagcgcggggggcggccggggagcgcgagccgggggcgcccgccgaagctcgctgctccgggtcggggtccgggcccggggccggccgcgcgccgcctttgacgcatcggagcgcggctcctgcaggatggagggctccgcgccgccagcggagttgtttgtgcgcaggcggctcgcggggctgggagcgctcaaggtctgaacttccctccggagccgcagctggaggaggcgagcgcgcgaggaggagaagccgcgcggcgcggaggccaccctcggggcgagaggcgcggaaggcgagcgagcaaagcggtcccggagccacggcggccacgcggcggggacccccgggcgttctaggtactggtgaccccggccggggcaggccccgggactcgacaacatggcttccccaccccaccagcagctgctgcatcaccacagcaccgaggtgagctgcgactccagcggggacagcaacagcgtgcgcgtcaagatcaaccccaagcagctgtcctccaacagccaccccaagcactgcaaatacagcatctcctctagctgcagcagctctggggactccgggggcgtcccccggcgagtgggcggcggaggccggctgcgcaggcagaagaagctgccccagctgttcgagagggcctccagccgctggtgggaccccaagttcgactcggtgaacctggaggaggcctgcctggagcgctgcttcccgcagacccagcgccggttccggtatgcgctcttctacatcggcttcgcctgccttctgtggagcatctattttgcggtccacatgagatccagactgatcgtcatggtcgcccccgcgctgtgcttcctcctggtgtgtgtgggcttctttctgtttaccttcaccaagctgtacgcccggcattacgcgtggacctcgctggctctcaccctgctggtgttcgccctgaccctggctgcgcagttccaggtcttgacgcctgtctcaggacgcggcgacagctccaaccttacggccacagcccggcccacagatacttgcttatctcaagtggggagcttctccatgtgcatcgaagtgctctttttgctctataccgtcatgcacttacctttgtacctgagtttgtgtctgggggtggcctactctgtccttttcgagacctttggctaccatttccgggatgaagcctgcttcccctcgcccggagccggggccctgcactgggagctgctgagcagggggctgctccacggctgcatccacgccatcggggtccacctgttcgtcatgtcccaggtgaggtccaggagcaccttcctcaaggtggggcaatccattatgcacgggaaggacctggaagtggaaaaagccctcaaagagaggatgattcattccgtgatgccaagaatcatagccgatgacttaatgaagcagggagatgaggagagtgagaattctgtcaagaggcatgccacctcgagccccaagaacaggaagaaaaagtcttccatccaaaaagctcctatagccttccgcccttttaagatgcagcagatcgaagaagtcagtattttatttgcagatatcgtgggcttcaccaagatgagtgccaacaagtctgcccacgccctggtgggtctcctgaacgatctgttcggtcgcttcgaccgcctgtgtgaggagaccaagtgtgagaaaatcagcaccctgggagactgttactactgcgtggcgggctgtcccgagccccgggccgaccatgcctactgctgcatcgagatgggcctgggcatgatcaaggccatcgagcagttctgccaggagaagaaggagatggtgaacatgagagtcggggtgcacacgggcaccgtcctttgcggcatcctgggcatgaggaggtttaaatttgacgtgtggtccaacgatgtgaacctggccaatctcatggagcagctgggagtggccggcaaagttcacatttctgaggccaccgcaaaatacttagatgaccggtacgaaatggaagatgggaaagttattgaacggctgggccagagcgtggttgctgaccagttgaaaggtttgaagacatacctgatatcgggtcagagagccaaggagtctcgctgcagctgtgcagaggccttgctttctggctttgaggtcattgacggctcacaggtgtcctcaggccctaggggacaggggacagcgtcatcagggaatgtcagtgacttggcgcagactgtcaaaacctttgataaccttaagacctgcccttcgtgcggaatcacatttgctcccaaatctgaagccggcgccgagggaggagcacctcaaaacggctgccaagacgagcataaaaacagcaccaaggcttctggaggacctaatcccaaaactcagaacgggctcctcagccctccccaagaggagaagctcaccaacagtcagacttctctgtgtgagatcttgcaggagaagggaaggtgggcaggggtgagcctggaccagtcggctctccttccgctgaggttcaagaacatccgggagaaaacggacgcccactttgtggacgttatcaaagaagacagcctgatgaaagattacttttttaagccgcccattaatcagttcagcctgaacttcctggatcaggagctggagcgatcctacaggaccagctatcaggaagaggtcataaagaactcccccgtgaagacgtttgctagtcccaccttcagctccctcctggatgtgtttctgtcgaccacagtgtttctgacgctgtccaccacctgcttcctgaagtacgaggcggccaccgtgcctcccccgcccgccgccctggcggtcttcagtgcagccctgctgctggaggtgctgtccctcgcggtgtccatcaggatggtgttcttcctggaggacgtcatggcctgcaccaagcgcctgctggagtggatcgccggctggctaccacgtcactgcatcggggccatcctggtgtcgcttcccgcactggccgtctactcccatgtcacctccgaatatgagaccaacatacacttcccagtgttcacaggctcggccgcgctgattgccgtcgtgcactactgtaacttctgccagctcagctcctggatgaggtcctccctcgccaccgtcgtgggggccgggccgctgctcctgctctacgtctccctgtgcccagacagttctgtattaacttcgccccttgacgcagtacagaatttcagttccgagaggaacccgtgcaatagttcggtgccgcgtgacctccggcggcccgccagcctcatcggccaggaggtggttctcgtcttctttctcctgctcttgttggtctggttcctgaatcgcgaatttgaagtcagctaccgcctccactaccacggagacgtggaagcggatcttcaccgcaccaagatccagagcatgcgggaccaggcagactggctgctgaggaacatcatcccctaccacgtggctgagcagctgaaggtgtcccagacctactccaagaaccatgacagcggaggggtgatcttcgccagcatcgtcaacttcagcgagttctacgaggagaactacgagggcggcaaggagtgctaccgggtcctcaacgagctcatcggggactttgacgagctcctaagcaagccggactacagcagcatcgagaagatcaagaccatcggagccacgtacatggcggcgtcagggctgaacaccgcgcaggcccaggacggcagccacccgcaggagcacctgcagatcctgttcgagttcgccaaggagatgatgcgcgtggtggacgacttcaacaacaacatgctgtggttcaacttcaagctccgcgtcggcttcaaccatgggcccctcacggccggggtcatcggcaccaccaagctgctgtacgacatctggggagacaccgtcaacatcgccagcaggatggacaccaccggcgtggagtgccgcatccaggtgagcgaagagagctaccgcgtcttgagcaagatgggctatgacttcgactacagagggaccgtgaatgtcaaggggaaaggccagatgaagacctacctgtacccaaagtgcacggatcacagggtcatcccacagcaccagctgtccatctccccagacatccgcgtccaggtggatggcagcatcggacggtctcccacagacgagattgccaacctggtgccttctgtccagtatgtggacaagacatctctgggttctgacagcagcacgcaggccaaggatgcccacctgtcccccaagagaccgtggaaggagcccgtcaaagccgaagaaaggggtcgatttggcaaagccatagagaaagacgactgtgacgaaacaggaatagaagaagccaacgaactcaccaagctcaacgtttcaaagagtgtgtgaggcggcgcccacccgctgcccgaggtgctctgtttgtcgaaacacagtaatatttgtatttggctgttgtgctttccaagcgccacagttgccctccccggacgtggtgttatgtggtcatttcagccctaacttctgtgtggatcacagttattcagggttcattttcatccattcttccctttcgctcccttccctggaaaccccgctgcctctgggtcatccgttcagcacgtggtggagaacaagtgccttcagggctggcctcggcctcgagtctcgggacagaggccgccagtggagatcatggctttgggtattatttgacttttagaacaaaagctgtggttaagatctcatttttattgctttttcccacgtcccacgagacactattttcggttctctggctaataccctgtttttgagtttattttgtttctgtctatgtcacagtgttcctctacgacccgacctctctatgtaagcacacatgcgcacacacacttgcattcatgaatctgatataaagtgccagtaatccgccaagagggggtgcgaagggggcatgtcacgacagctccgccaccccccattgcccacccgcactttcccgagcaccgcgccccgtgggctgtgggtgagccgcgctccctgcactgagcgggtttaggggctcgcccacatgcatgcaggccaagacagcaaatgccagccgggcacgacgcccgtgtgcccaggcctcgggggtctcagagccgcctctcacccccgaccctccacccaggggtctccccatcgggagtggaggtgttggtcctggaagctgactcatcggagagggaaataccaaataaacatccgaggttgcatttatttatttatttatttacccggaagcatgtgcgctcccgggaggggtgctgggtcctcagggtggggggtcatagccacaggggagggcagttcccaggaaggtaaccagatgtctcttttgtgttttggccacctggggccgcccccaacctccccaccccaagaggggtctgagtgggacctcaaagcatggccagtgcaattctgaggctaggggaataggagaagcccaccagctgcccctgccacccacgggggctcctccctgccggggtccagctcagaaccacgggggtctgtgccggcagcaccggtgccatcttggcttccacaaattccagaagtttcttggctgcctcccgctctcagatggcacagggcctatcagtggcaggatttaatctggggagcaaattccagctctgaaatggagttctcacaccgtatctagggacagaggcatctggatgcaaacgcggggtttgttaggggcggaatcccgagggtggtgtgggggagctccgtccgggcagttggctgctggtcctgtctgattatgttttgccatattgagtctgaagtttgtgtggaagtgagctcgcccgagttgtccggtcggagttgtagccagtctttcaggggaccccgggacgctgatgaggcccagggtgcactccttgtcagtcttgcccgttgtccctgtgcattttgctttccgctgtcaaatctcactgtctcgttttcacaccgcatcagtccccatcatcactactcctccccagagacatacagattgccctccccggcatgaagaagtcacaattctgacccgccacctctccaggggcggtgcctgggatggccacccatcaggacagccagagccagggtcccggcgtcctgagagtccagggcacctccccccattagctgtaaggtttcctgtcaggtgtgactgtcagtttgctggtcttccaataccgaagaaagggtggttgtgacaatacctcttgcttctaaagaatgtattataaaacaccgcagatttttttttttccttaaaaaacactacctgatgctttccttgttcgtggggattgtggtcacatgaagctctttctgcatcagtattaaggtgtatatttgaatgtcctcccctcccctttcccctccaggctgtgtagctttgaggggctgggcgtttgctcacgaccttgctgtctcgctcagaacatgctccgcaaagttctccgcacacacttcttccccatcaagcccatttccttccccaaccacaaaggtgtttgtgattcctcaccccgggaaaccaaggagctgcaaagtggagtctggttcagccccgtgcagactcacccagagcttaacgttgtctttcaaacaccctgagccttcctaaacagccagtgcagacgttctctctgggccacgaagcccctcgggtcctccccgtcccctgctccgatgcatacctcagtgcagaaccacagaatctctgcagcggaaacgccgtgcatctcttgtctgttggcagcgagcacatcgtgctggagacacgagtttctaagcagctggcacgagggctgctgacggcatgggtcgtgcttcagggtggcaatacctcttaggaacttagggcaggaagcaatacttcagcattgaatgtgtgtaaatagttgctttgagttgcaattgctattttcttctcagtcccagctcagatcgaattatatatccatatatatatatatatatatatatatatatatatatatatatatatggtaaacaagcacacacaattttatccaatgcaaacaaatgtagagcatcagttacaaaaccctcgaatagcttgagagccccacaggctctgccacacccgtgacttcatccacactgacgtcacccgcgggggctccccctgcacatttgcacacgatccggagagccgaaggccgcgtgcttcctgtcacatgggctgtaatcatttgtagtttccaaagacacgtctgcatttgaatttctagattttcgaggtaaggagttttttttaattggttgtttggaaaatcacatcatgcctagaatctgaaattgaattagcaagaaccgactgtttgcattttccatatatccttttatctgctctttttaaattgttaattctaataatttcaaaatgcattcactgaagaaatggacattaaaatattctaaaatttaaataaaaaaaa

SEQ ID NO: 1029 - DNA, 3995 bp, HOMO SAPIENS
ggcgggcgcggccgggaagacggcgcgcgcgcgccctgacagctcggccctgctcgctcactcgctcgtccccggcttccgagcacagcatggcggtcaaggtgcagacaactaagcgaggggatcctcatgagttaagaaacatatttctacagtatgccagtactgaggttgatggagagcgttatatgaccccagaagactttgttcagcgctatcttggactgtataatgatccaaatagtaacccaaagatcgtgcagctcttggcaggagtagctgatcaaaccaaggatgggttgatctcctatcaagagtttttggcatttgaatctgttttatgtgctccagattccatgttcatagtggctttccagttgtttgacaagagtggaaatggagaggtgacatttgaaaatgtcaaagaaatttttggacagactattattcatcatcatatcccttttaactgggattgtgaatttatccgactgcattttgggcataaccggaagaagcatcttaactacacagaattcacgcagtttctccaggagctgcaattggaacatgcaagacaagcctttgcactcaaagacaaaagcaaaagtggcatgatttctggtctggatttcagtgacatcatggttaccattagatctcacatgcttactccttttgtggaggagaacttagtttcagcagctggaggaagtatctcacaccaggttagcttctcctacttcaatgcatttaactcgttactgaataacatggagcttgttcgtaagatatatagcactctagctggcacaaggaaagatgttgaagtcacaaaggaggaatttgcccagagtgccatacgctatggacaagtcacaccactagaaattgatattctatatcagcttgcagacttatataatgcttcagggcgcttgactttggcagatattgagagaatagccccattggctgagggggccttaccttacaacctggcagaacttcagagacagcagtctcctgggttaggcaggcctatctggctccagattgccgagtctgcttacagattcactctgggctcagttgctggagctgtgggagccactgcagtgtatcctatagatctggtgaagacccgaatgcaaaaccagcgtggctctggctctgttgttggggagctaatgtacaaaaacagctttgactgttttaagaaagtcttgcgttatgagggcttctttggactctacaggggtctgataccacaacttataggggttgctccagaaaaggccattaaactgactgttaatgattttgttcgggacaaatttaccagaagagatggctctgttccacttccagcagaagttcttgctggaggctgtgctggaggctctcaggtcatttttaccaacccattggagatagtgaagattcgtctgcaagtagctggagagatcaccacgggacccagagtcagcgccctgaatgtgctccgggacttgggaatttttggtctgtataagggtgccaaagcgtgtttcctccgagacattcccttctctgcaatctattttcctgtttatgctcattgcaaactacttctggctgatgaaaatggacacgtgggaggtttaaatcttcttgcagctggagccatggcaggtgtcccagctgcatctctggtgacccctgctgatgtcatcaagacaagactgcaggtggctgcccgcgctggccagacgacatacagtggtgtcatcgactgtttcaggaagattctccgggaagaagggccctcagcattttggaaagggactgcagctcgagtgtttcgatcctctccccagtttggtgttaccttggtcacttatgaacttctccagcggtggttttacattgattttggaggcctcaaacccgctggttcagaaccaacacctaagtcacgcattgcagaccttcctcctgccaaccctgatcacatcggtggatacagactcgccacagccacgtttgcaggcatcgaaaacaaatttggcctttatctcccgaaatttaagtctcctagtgttgctgtggttcagccaaaggcagcagtggcagccactcagtgatgagacaactgttgagtgtggcaaaatggcgccttgaagaaagaggcctaggagagcagccctgtaatgtatccagtcagctgcatggtactgactgagctgaggagtcaaactcttctttctgtatgacatatacatatacttgtttataaaataatcatttgcccagggaaaaaaccacaacgctgtttcaagctttagtcttatgtgttgaaatgtttttgtaagccttggcatgaattagtgttctagactctgctttgcacagcttgcacttacagtgattgtacatattgtacatctttgtacagagacatcttggcacctcatcccaacaaatcacatttgtagaaatgtaatgcggttctgagtggcttgaaatgtacagaatgttttgaaagtgttttattaagaatcacacaaaaataaatgtattaaaattaaattcattctcttattggtgacttatggaaataaagcatcaatattggatgtatttaattcctagtttgttttccattctggaataaaaaggtatttgctgataaaaggcataacgagacatagtgctgctaccactgaataagtgatactttggaaagatgcatgccagtggatgccagaggaccaggctaatgacttgtgtgtgctgatgtgtttccatttgtatttaatgtgtgtagaccctcctctgttcatcaatcaaaaagcatttcctaggcagctcctcgcctgtcagtgtgcatatggaaacagggacatctccatcattactggcttagttttgctttcctttgacacagtaaggcaaaggccaagctttcaaaagagtaaaggatactttcacaatttcccttcatatggatatgattccagtcaaaaataaaatgcacaccaaaatgtatacatgtagttggatttttctttgtaaatatactgataatactttttgttctgattgactactgattgcaaataactcatgatcgggttcgccctttcttccacctttatagaaaacagaaaaattagttttagaaagggctagcgcagagtgaagggagggaagaagaaagagaagaaaagctctatatggtgatttagtggggtctaggttcttactttggaatccaaatgcaaactgttctaaaagtcactcatcaagggcgtgattactaatttggatctaaacatagatcttgacagccacatctacactttgatatggatgtgatttgatgtgcagtatcagaatttatttaccttaccaaagtgctctgggaagacattattgctactgccagtaagctgggatatgagaatgtatgcaaatattttcaagaggcgagcctggagacagaccaagttacttagtatcctgcacagtgctcctcgattgatggctgacagccctgtgactgcaactgtaggctccctggaggccctccaggaacaaaagaattagctttgaaagcaagttattttcaaatgtattagattggtctcatgggagtggaacaaataataatacagttgttttgctactaccacttgttagaaatatataagtagtccatggatatgtgattacaaaagaatcctatgtatgtatctagagtgagatgggaaagtgtcccgcttaccctccttctacctccaccacttcctggcccagaggtaatcactgctaacaggttacagcatgaatatgtagtctgtttttcataactctatagaaatatatgtacatatttatattttagaaacaggattatgttatgtgtgtgttattctgtgtcttgcttttgttcacttaatgtgttttggatatctttccatgtcagtttataaagttttatttttaatggc

SEQ ID NO: 1030 - DNA, 2058 bp, HOMO SAPIENS; identical to SEQ ID NO: 844

SEQ ID NO: 1031 - DNA, 4918 bp, HOMO SAPIENS
cttcttcccggcagccttagcgccaggcccggcgctcctcaagatggctgccgacagtgagcccgaatccgaggtatttgagatcacggacttcaccactgcctcggaatgggaaaggtttatttccaaagttgaagaagtcttgaatgactggaaactgattggaaactctttgggaaagccactcgaaaagggtatatttacttctggcacatgggaagagaaatcagatgaaatttcctttgctgacttcaagttctcagtcactcatcattatcttgtacaagagtccactgataaagaaggaaaggatgagttattagaggatgttgttccacaatctatgcaagatttgctgggtatgaataatgactttcctccaagagcacattgcctggtaagatggtatgggctacgtgagttcgtggtgattgcccctgctgcacacagtgacgctgttctcagcgaatctaagtgcaaccttcttctgagttctgtttctattgccttgggaaacactggctgtcaggtgccactctttgtgcaaattcaccacaaatggcgaagaatgtatgtaggagaatgtcaaggtcctggtgtacgaactgatttcgaaatggttcatcttagaaaagtgccaaatcagtacactcacttatcaggtctgctggatatcttcaaatcaaagattggatgtcctttaactccattgcctccagttagtattgctattcgatttacctatgtacttcaagattggcagcagtatttttggcctcagcaacctccagacatagatgcccttgtaggaggagaagttggaggcttggagtttggcaagttaccatttggtgcctgcgaagatcctattagtgaactccatttagctactacatggcctcatctgaccgaagggatcattgtggataatgatgtttattctgatttggatcctattcaagctccacattggtctgttagagttcgaaaagctgagaatcctcagtgtttgctaggtgattttgtcactgaattttttaaaatttgccgtcgaaaggagtcaactgatgagattcttggacgatctgcatttgaggaagaaggcaaagaaactgctgatataactcatgctttgtcaaaattgacagagccggcatcagttccaattcataaattatcagtttcaaatatggtacacactgcaaagaagaaaatccgaaaacacagaggtgtagaggagtcaccgctaaataatgatgttcttaatactattctcctgttcttattccctgatgctgtttctgagaaaccattagatggaactacttcaacagataataataatcctccatcagagagtgaagactataatctctacaatcagttcaagtctgcaccatctgacagtttaacatacaaactggctttgtgtctctgtatgatcaatttttaccatggagggttgaaaggagtggcacacctctggcaggaatttgttcttgaaatgcgtttccgatgggaaaacaactttctgattccaggattagcaagtggacccccagatctgaggtgttgtttactgcatcagaaactacagatgttaaattgttgtattgaaagaaagaaggcacgtgatgaggggaaaaagacaagtgcttcagatgtcactaatatatatccaggggatgctggaaaagcaggagaccagttggtgccagataatctaaaagaaacagataaggaaaagggagaggtaggaaaatcttgggattcctggagtgacagcgaagaagaattttttgaatgcctaagtgatactgaagaacttaaaggaaatggacaagagagtggcaagaaaggaggacctaaggagatggcaaatttaaggccggaaggacggctctatcagcatgggaaacttacactgctgcataatggagaacctctctacattccagtaacccaggaaccagcacctatgacagaagatctgctagaagagcagtctgaagttttagctaaattaggtacatcggcagagggggctcaccttcgagcacgcatgcagagtgcctgtctgctctcagatatggagtcttttaaggcagctaatccaggttgctccctggaagattttgtgaggtggtattcaccccgggattatattgaagaggaggtgattgatgaaaagggcaatgtggtgctgaaaggagaactgagtgcccggatgaagattccaagcaatatgtgggtagaagcctgggaaacagctaagccaattcctgctagaaggcaaaggagactctttgatgatacacgggaagcagaaaaggtgctgcactatctggcaatccagaaacctgcagaccttgctcggcacctgttaccttgtgtgattcatgcagctgtactcaaggtaaaggaagaagaaagtctcgaaaacatttcttcagttaagaagatcataaagcagataatatcccattccagtaaagttttgcacttccccaatccagaagacaagaaattggaagaaatcattcaccagattactaatgtggaagctctcattgccagagctcggtcactaaaagccaagtttggaactgagaaatgtgaacaggaggaggaaaaggaagatcttgaaaggtttgtgagttgcctgctggagcagcctgaagtgttagtcaccggtgcaggaagaggacatgctggcaggatcattcacaagctgtttgtgaatgcccagagggctgcagctatgactccaccagaggaggaattgaagagaatgggctccccagaggaaagaaggcagaactccgtgtcagacttcccaccccctgctggccgggaattcattttgcgcaccactgtgccgcgccctgctccctactccaaagctctgcctcagcggatgtacagtgttctcaccaaagaggactttagacttgcaggtgccttttcatcagatacttccttcttctgattcttctagcattactcgttggtggcttcagagacagtgctgcctcctcctgagggagggaaggtaccagggagaacctgggaggtcctggagagggccctgtccagttgggtgatcaggaatcaaaccagcatcggaaagacttcccagcaccaagcttgagctgtgtcgtttcgtggagggggcagcgaggatgggcttgagctgttgagagatttctgccctagagatggcctttgtatatgggggggtggtggggggacacaaacacatcagacactccgtcctcacactggcaggacggtgttcatcgcattctcttctgtgaccagcctctaggctagcggctgcattcgtggtctgtgcaaacacttcgtggttctatatatcagcagcaagtgtgcaaaataaaggacctgttaactcagatttctggatattttggtggtagcttctagtcccagaatctgtgtttttaaaatactacatgacattctgtctattcaatcacctggtggtcatctttcttgtactaattaactgttgatgagcattttggatattctaggagaaagcctataatttcacatagtttctctttttcatgtaactgtaacctaaatgtattacttctgataaaactatatatcaaatgtcactgcaaattagttttatatctgtcatgtgagatttgtcttacttatttttcttttggttgccatggaagttatggccctgaaaatcgtctccctccccttctcttgctgtacagcatgcgttctctttttgtggttgctggctgggtactgtatttaatgaagtagagaatagcacttgcaaaaatacagtcttggtacctagagactgtcatgcagatagtataatttggtatatgtgctaatgcattgagtagaggattattttaacacactattttgcttttgtattttagttaaaataatcgatggggatgtgtagcccccccgtgtgaggatgacatcaccacatttctagtttcatggagctcaagatgtcttgtgtctgtgtggctagatggcctctgcttggtaatcttatttttaggcctaaaattcccacttaaatccaaagtaaaaatggttatactgaagcataaaccttgcctgtgtaattttaaaaaattaatagagctgtgcaaaccctgttatttttgtaaaaaaaaaaaaaaatacatatctatatataatatgtgtgtgtgtgtgacatatgcacacgtctctgtgtatgtgaagtaggggaggccctgggggatgacctcccagcctttatgatgcttttctctatgctgctggacttcattcttactggtccacgcagatgcaggcggcctgaggccagtgctgtaccaagtagaagacggttcctaaggacagagtttgtctgttttctaacaaagaaaaattctacaaaggagaggttgggcgttacaaaggcattgtgaatctaataaaaggaaagtgtcgctttctgtggcgttttctttcattttctcccgctgaggcatttcagtctaatttcatgtggttttgtgctgtctcagctctaatgtttgcagcctgctgagcctaacaaggcagtggtctcaagaacattctttgtgcctttttaaagtactccattttatttttatgatagttatgtatttatttcacagatatatttaagtacccactttgtgtcaggtacagtacaagcaatgaagataaaacagaaaccaaaacacactcccttacagggaaaactgacaccacgttgccacaaaatgttgagtatagtcaactctgctgtgtggatcggagggcctgcatttatcctacaaataattgaatgtaatcctacattcatgtattcattggcagtacggagtaataaatgcagcaatgtcataaa

SEQ ID NO: 1032 - DNA, 6099 bp, HOMO SAPIENS
cgtagctatttcaaggcgcgcgcctcgtggtggactcaccgctagcccgcagcgctcggcttcctggtaattcttcacctcttttctcagctccctgcagcatgggtgctgggccctccttgctgctcgccgccctcctgctgcttctctccggcgacggcgccgtgcgctgcgacacacctgccaactgcacctatcttgacctgctgggcacctgggtcttccaggtgggctccagcggttcccagcgcgatgtcaactgctcggttatgggaccacaagaaaaaaaagtagtggtgtaccttcagaagctggatacagcatatgatgaccttggcaattctggccatttcaccatcatttacaaccaaggctttgagattgtgttgaatgactacaagtggtttgccttttttaaggatgtcactgattttatcagtcatttgttcatgcagctgggaactgtggggatatatgatttgccacatctgaggaacaaactggccatgaacagacgttggggctaagagacagagcagcctgcgacagtgtggacctacctgtagcagctagcaaaggcctctagcagctacagtcccttctggagtctttatttgcatgcaaaatgcaaaggagtcctggtgacctacctccaaggcagctgccctcctgaacactcccttggaaaacagtaaacatcattttggaatgtgaacaaccagagactacacaggagaaaggaaaaaaaaattctgaagatgcaaaatcttgggtggcttcaccgttcagttttttaataaaaggaacaatatacaacacgttgttctttttctcttttgaaatcccttctattacagtgatttttttctaagattgtcaggatttgaagtgtatgttttgttttattcacagcgtaaattttattcacagtttaactgtctgcctgagtgtctttcctttctctaattaccttgaggaacccaagagcctgttgtaaggagaaaataaggcccttggatctcttgagattcacagatataagttattgaagggaagatggtcctatggaggacatatttaaagaagggaaaaaagaggctttctcagatatgtcagactgctatagtatacttctacagattatagacctccagtacctctggccagaaagatggtatcgtaaacaccctattttttttcttttcttttttcattaggtacaagctttgtgctaagaagttgacatactataagctacaaaagttctgtaaagtagatataactagtttcattttatagatagagaaaattaatctcttacagtgctaagctcacagagtttctaactgtaaaatgctagaacttgtctttcaagcctaaagacttccttggggctaaatagtgaaaaaagccatttcacaaataagtaaatggtatttagaggcatatttggatttcctggtaaattccagtctgtgagcatcatgaatattagtttaatgttgcatgggctcatgttgaagttttaagagaagaactgccttgaagcttaggtttccttagctattaggctactgactttcttgcctaaaccagggttttttcattgaagaccaaaacttaccttctccttcagtttgtagtttggaaattggtagaagagctttgtaaacttcaaattaagtacaaactaagtgtcatagtcaaatttactaatcttaattacagtattgttcaactgattgctatcttctagctctttcctgccgaataatggtcttgtttcctgctctgttggtttagagctgacttctttcagctttggtaagcctgaaattatggggttatgtttaattcatattgtctgggtggactttcctctcttgcatttctgcttgaatagaagaatttttctctagagagtagtttgtcatccttactctgttgattcagatgactctttgtatgatctgagaggtatactgttctgctattctgagaagaagtatttcagaaagatgaattaagagtacagtggactgctcccacctggaaacttttatctatctcacctctggacctgataaattctttatcactcaggaccttgatgacgctgctctctgaaaccctccccagctctctctattaccgtgagaaacatcagaactttggttcccattgcatatcgcaggtacctctgctttcatgccatgctgtaatggagtgattgggtagcatgttttcatctctttccagattgaaaatctgtatttctccctgtatatcttcaacacctaatgcacatagaactttgtaggtacctggaaaatgcaccacagttttcttttctttttgcagacttttcacaagtattaccaacttacaaagaattaattttgtaggattctagaaagacaaatcaggaatggtgccatatacatcttttttgattccctgctctaaagaatattatcaggttaccttcctgcagagttttaaaagaattgcatatttcaagctgactttcaggatgtaaatataaccaaagcaactgatatgtaaaaaatatattcaatggcattcctagattttcttctagggtgttttattgttttgggttttacatttaagtctttaatccatcttgagttaatttttgtataggtataagaaaggggtccagttttaattttctgcgtatggctagccagttctcccagcaccatttattaaatagggaatcctttccctattgtttgtttttgtacggtttgtcaaagattagatggttgtagatgtgtggtcttatttctgagatcttcattctcttccactggtctatgtgtctgtttttgtaccatgcttttttggttactgtagccttgtagtatagtatgaaagatagcatgatgcctccaggtttgttctttttgcttaggattgtcttggctatacgagcttttttttggttctatatgaattttaaaatagtttcttctaattgtgtgaagaatgttaatggtagtttaatgggaatagcattgaatctgtgaattgctttgggcagtatggccattttcatgatattgattcttcctatccatgagcatgtaacgtttttcccttcgtttgtgtcctctctcatttccttgagtagtggtttgtagttctccttgaagagatccttcacttcttctgtattcctagatattttattctctctgtagctattgggaatgggagttcattcatgattttgctctctgcttgccttttgttggtgtatagggatcctggtgacttctgcacattgattttgtatcctgagactttaccgaagttgcttatcagcttaagaagcttttgggctgagatgatggggttttctagatataggatcatgttatcttcaaacaaagacaatttgacttcctctcttcctatttgagtacgctttatttctttctcttgcctgattgccctggccagaactcccaatactatattgaataagaatggtgagagagggcatccttgtcttgtgccagttttcacggggaatgcttccagcttttgcccattcagtatgatattatctgtgggtttctcataaaaagctcttattatttgagatacgttccttcaatacctagtttattgagagtttttaacatgaagcgatgttgaattgtatcgaaggccttttctgtgtctattgagataatcatgtggtttttgtctttagttctgtttatgtgatgaatgacgtttattgatttgcatatgttgaaccggccttgcatcctggggatgaagccaacttgactgtggtagataagcttttggatgtgctgctggatttggtttatcagtatttcattgagattttttgcgtcgaagttcatcagggatattggactgaagttttctttttgttgtcgtatctctgccaggttttggtatcaggatgatgctggcctcataaaatgagttagggaggagtccctccttttcaattgtttggaatagtttcagaagaaagggtatcagctcctctttgtacctctggtagaattcaactgtaaatccatctggtcctggactttttttcattagtaggctatttattactgcctcactttcataacttgttattgatctattcagggatccaacttcttcctgattcagtcttgggagtgtgtatgcatccaggaatttatccatttcttctagattttctagtttctttgcatagaggtgtttgtagtatttgctgttggttgtttgtacttctgtgagatcagtggtggtatcctgtttatcattttttattgtgtctgtttgattcttctcttatttttgacaaagctgacaaaaagaagcaatagggaaaggactctctattcaattaatcctactgtatatctggctagccatatgcagaaaattgaaactgttcctgtttcttaatccatatacgaaaatcaacttacgatggattaaagacttaaatgtaaaacccaaaattataaaaccctggaatagaatataggcaatatcattctggacataggaatgggcaaagattttatgagaaagacaccaaaagcaattacaacaaaagcaaaaattggcaaatgagatctaattaaactaaagagctctgcacagcaaaagaaactactgtcagagtgaacaggcaaccaacagaatgggagaaaattttttcaatctatccatatgacaaaggtctaacatccagaatctacaaggaacttaacaaatttacaagaaaaaaggagccccattaaaaagttggcaaagaacatgaacagacacttcccagaagatattcatgtggccaataaacatgaagaaaagctcaacatcactgaccattagagacgtgcatatcaaaatcacaatgagataccatctcatgtcacaatggtgattattaaaaagtcaaacaacatgctagtgaggttgtagagaaataagaacgcttttacactgttggtgggaatgtcaactaattcaaccactgtggaagacagtgtggtgattcctcaaggatttagaaccagaaatatcattactgcatatagacccaaaggaatagaaatcattctattacaaagatacatgcacatgtatgtttattacagcactattcacaatagcaaagacatggaatcaacccaaatgctcatcagtgatagactggaaaaagagaatgtggaacataaacaccatggaatactatgcagcaataaaaaggaatgagatcctgtccttttcagggacatggatggagttggaagctgttatcctcagcaaactaatgcaggaacagaaaaccaaccaccacatgttctcacttataagtgggagctgaacaatagaacacatgggcacagggaggggaataacacacactggggccagtcagggggtggggggtcaagctgagggagagcattagaaaaaatagctaatgcattctgggcttaacccatttatgcctagtgttccatttctggaatgctaagcatgtggaagttctttatatcctgctcaaggtcattgccaaggtctgatttttcacattcaacaaattgcaacctctggcataaatgggttaatacctaggtgatgagttgataggtgcaggaaaccaccatggcacatgtttatctatgtaagaaacctgcacatcctacacatgtaccctggaacttaaaaaatttaaaatatatatgtatatatatttaatatggaattttaaaaattactaatgagttcttttatctgagtaattttgcatcaacatgcttttattatggaagagaagattcagtgagtacaaaattgcagatacatgtgtcagaagatccctgaatataataaggcttagtattctgtgtcataattgcctgtttgtattcctctctggtctttaaacttcattagggcaaggatcaactccatcttactaaccatttgattccctatgtattacacgatatatgaccaataataagccttcaataaatacttgtaaaataaagaatgttatgtaataaaaaaaaa

SEQ ID NO: 1033 - DNA, 1430 bp, HOMO SAPIENS
ggggcactgaggagcggcgcccgcggggcagcgaggagcccgatgcagggttctgcgcgtcatttccggtcccgcgggcgccccgtgaagcccacctggatccgccagcgctgtgccactccccagtgccgagctccgagctgtctccgcggcctcgcgcccggcccctccaccgcgcacctcttaggccccgcccgccagcgtccctttgttgtgaaggcgccggggcctagcgctatgcctgcggcggagactgcatcaggctctcgcgtctgcttctacgctttgcctgggagaggccctggtggcctcgttcctggcgcccggagtccctgctgcggccccacccccgggcggtcacggtgacccatgctgcccagcctggaggtaaaatcgttcgtggctgtggcttcagcatgtcgtcctcggtgaaaaccccagcactggaagagctggttcctggctccgaagagaagccgaaaggcaggtcgcctctcagctggggctctctgtttggtcaccgaagtgagaagattgtttttgccaagagcgacggcggcacagatgagaacgtactgaccgtcaccatcacggagaccacggtcatcgagtcagacttgggtgtgtggagctcgcgggcgctgctctacctcacgctgtggttcttcttcagcttctgcacgctcttcctcaacaagtacatcctgtccctgctgggaggcgagcccagcatgctaggtgcggtgcagatgctgtccaccacggttatcgggtgtgtgaaaaccctcgttccttgctgtttatatcagcacaaggcccggctttcctacccacccaacttccttatgacgatgctgtttgtgggtctgatgaggtttgcaactgtggttttgggtttggtcagcctgaaaaatgtggcggtttcgtttgctgagacggtgaagagctccgcccccatcttcacggtgatcatgtctcggatgattctgggggagtacacaggacgtcccagtgatcgggaggagcgggaagagcttcagctacaaccaggacgtggtgctgctgcttctgacagacggagtcctgttccaccttcagagcgtcacggcgtacgccctcatggggaaaatctccccggtgactttcaggtcccgcaggccctgcaccgagtcgccttgtccatggcgctgccctgccccatgcttcctgcgtcctgagtaggaggtatctccgagacaggaaaagtggccgctctctctcactttttctggaactcatggtggtctcctgggcttggtcactgtctctcaccagcatgtttctttgtgcggtcaggaattatttccaaatgctcctgaagcctagtgttttagtgaacattagtgattgttagcagtggttcaaaaaaaaaaaacttttttttttttttt

SEQ ID NO: 1034 - DNA, 967 bp, HOMO SAPIENS
tgggggagcagagggcagcacttcctccagctccaaaagagtgcacccaccccaacgttaccaatacactcgtgcaggcggaaagctccgacgccggtgtgcgtctacgctgggggcgtggcctgactgcgcggccagacgccagcgccatggaggagtacgctcgggagccctgcccatggcgaattgtggatgattgcggtggagccttcactatgggtgtcatcggtggcggagtcttccaggccatcaagggtttccgcaatgcccctgttggaattcggcaccggttgagaggtagtgccaatgctgtgaggatccgagccccccagattggaggtagcttcgcagtgtgggggggcctgttctccaccattgactgtggcctggtgcggcttcggggcaaggaggatccctggaactctatcaccagtggagcattgaccggggctgtgctggctgcccgcagtggcccactggccatggtgggctcagcaatgatggggggcatcctgttggccctcattgagggcgttggcatcctcctcactcgctacacagcccagcagttccgaaatgcgcccccattcctggaggaccccagccagctgccccctaaggatggcaccccggccccaggctaccccagctatcagcagtaccactgaggaagccactgccaccatgggagctacttctcggttccctccccgatggtctacctcgaagggagggctggctcccagttagccctgggaccctccagagagggtttctactctgctccctagtcccagggtgggggtggggcaccccagctgccctgacagatgggtcccctttttctctctcagggcaccccagccccacactcacatgtacgaagttctcaccccagctcctttgtgtggcaccctgatgagtatttaaagcccgttttgaaatgcctaaaaaaaaaaaaaaaaaa

SEQ ID NO: 1035 - DNA, 464 bp, HOMO SAPIENS
  misc_feature (26)..(26): n is a, c, g, or t
ggcaaaagggtgcaactttatttctncagttattgagtagtttatacaaggcatgggatggggaaaggggcatttttttaacttaaagataaagcagatctttaaaaattatgtggattaatgaatcactttttgcctttttcttgctgtgtacagtcatccctttgtatcagtggataccacagatgttcaaattccttatgtaaaatattgtagtatttgcatataacctaaccacatcctctcatatacttgtatgtgtagattatttataatacctaatacaatgcctgcacgtcacttcattcacataaattgaacatagtactcagcacgtggcaaattcaagttttactcttcaggactttgtggaatttttttttttcctcaaatatgtttgatctgtggttggttgggttcagggacgcagaacccatgtatgcacaggaccgactacacttttg

SEQ ID NO: 1036 - DNA, 8412 bp, HOMO SAPIENS
agccgcgtcaacggcccttcgcagcgggcgcgctgtcagacctcagtctggcggctgcattgctgggcgcgccgctctcgtctgatccctgctggggacggttgcccgggcaggatcctttacgatcccttctcggtttctccgtcgtcacagggaataaatctcgctcgaaactcactggaccgctcctagaaaggcgaaaagatattcaggagcccttccattttccttccagtaggcaccgaacccagcattttcggcaaccgctgctggcagttttgccaggtgtttgttaccttgaaaaatggctactggacaggatcgagtggttgctctcgtggacatggactgtttttttgttcaagtggagcagcggcaaaatcctcatttgaggaataaaccttgtgcagttgtacagtacaaatcatggaagggtggtggaataattgcagtgagttatgaagctcgtgcatttggagtcactagaagtatgtgggcagatgatgctaagaagttatgtccagatcttctactggcacaagttcgtgagtcccgtgggaaagctaacctcaccaagtaccgggaagccagtgttgaagtgatggagataatgtctcgttttgctgtgattgaacgtgccagcattgatgaggcttacgtagatctgaccagtgctgtacaagagagactacaaaagctacaaggtcagcctatctcggcagacttgttgccaagcacttacattgaagggttgccccaaggccctacaacggcagaagagactgttcagaaagaggggatgcgaaaacaaggcttatttcaatggctcgattctcttcagattgataacctcacctctccagacctgcagctcaccgtgggagcagtgattgtggaggaaatgagagcagccatagagagggagactggttttcagtgttcagctggaatttcacacaataaggtcctggcaaaactggcctgtggactaaacaagcccaaccgccaaaccctggtttcacatgggtcagtcccacagctcttcagccaaatgcccattcgcaaaatccgtagtcttggaggaaagctaggggcctctgtcattgagatcctagggatagaatacatgggtgaactgacccagttcactgaatcccagctccagagtcattttggggagaagaatgggtcttggctatatgccatgtgccgagggattgaacatgatccagttaaacccaggcaactacccaaaaccattggctgtagtaagaacttcccaggaaaaacagctcttgctactcgggaacaggtacaatggtggctgttgcaattagcccaggaactagaggagagactgactaaagaccgaaatgataatgacagggtagccacccagctggttgtgagcattcgtgtacaaggagacaaacgcctcagcagcctgcgccgctgctgtgcccttacccgctatgatgctcacaagatgagccatgatgcatttactgtcatcaagaactgtaatacttctggaatccagacagaatggtctcctcctctcacaatgcttttcctctgtgctacaaaattttctgcctctgccccttcatcttctacagacatcaccagcttcttgagcagtgacccaagttctctgccaaaggtgccagttaccagctcagaagctaagacccagggaagtggcccagcggtgacagccactaagaaagcaaccacgtctctggaatcattcttccaaaaagctgcagaaaggcagaaagttaaagaagcttcgctttcatctcttactgctcccactcaggctcccatgagcaattcaccatccaagccctcattaccttttcaaaccagtcaaagtacaggaactgagcccttctttaagcagaaaagtctgcttctaaagcagaaacagcttaataattcttcagtttcttccccccaacaaaacccatggtccaactgtaaagcattaccaaactctttaccaacagagtatccagggtgtgtccctgtttgtgaaggggtgtcgaagctagaagaatcctctaaagcaactcctgcagagatggatttggcccacaacagccaaagcatgcacgcctcttcagcttccaaatctgtgctggaggtgactcagaaagcaaccccaaatccaagtcttctagctgctgaggaccaagtgccctgtgagaagtgtggctccctggtaccggtatgggatatgccagaacacatggactatcattttgcattggagttgcagaaatcctttttgcagccccactcttcaaacccccaggttgtttctgccgtatctcatcaaggcaaaagaaatcccaagagccctttggcctgcactaataaacgccccaggcctgagggcatgcaaacattggaatcattttttaagccattaacacattagtgctgccctcaggcttgcctgtaggatttaatattttttatctttacagatctttatctttaatattttatctttacagatttccctgagaaagggaattatgaaatttttaatacaaaaaataatccatttaggtgctgagttacggtcccatctcttcacaggcatggattctaatcccactgctgacagagatgtaaaaattcatcctaccagagtttttaatctttagcatttagggaggcagtgtcataaagtaaaaagtgtgtgggccttggagtctaagagacgtggttgcaaacttagctctggttattgcaatgagggccttgaacaagtcattttcttcacattctcatctgtaaaatggagataataccttacagattattgcagattaataacaatgtattcaaattatgtaactcggccgggtacaatggctcacgcctgtaatcctaacactttgggaggccgaggcagacagatcacctgaggtcaggagtttgagaccagcctggccaacatggcaaaaccatctctactaaaaatagaaaaattagccaggcacgttccaggcacctgtgatcccagctacttagaggctgaggcagaagaattgctttaaccttggaggcggaggttgcattgagctgagatcatgctagtgcgctccagcctgggcaacagagcgagacttcatctcagaaaataaaaaataggggccaggcacagtggctcatacctgtaatgccagcactttgggaggccaaggcgggcagatcacgaggtcaggagtttcagaccaatatggtgaaaccccatctctactaaaattacaaaaaaaattatccaggcgtggtggtgcacgcctgtaatcccagctactcaggaggctaaggcaggagaatcacttgaacccaggaggcagaggttggagtgagctgagatcgcgccaccgcactccagcctgggcaacagagcgagactccatctcaaacaaaaacaagaacaaaaacaaacataaagttggcacagaaaagggaccaagtttaaaaaagggttttaaatgtaatgagacttgcatagttaaaaaaaaaaaagggattatttttatttttattttttatttttgagacggagtctccctctgtcgtcaggctagaatgcagtggtgcgttctcagctcaccgcaacctccgtctcctgggttcaagcaattctcctgcctcagcctcccaagtagctgggactacaggcacgtgctaccacactcagctaatttttgtatttttaatagagatgaggtttcaccatgttggccaggatggtctcgattgcttgacctcatgatccgcctgcctcgacctcccaaagttgctgggattacagatgttagccaccgatcctggcccccccaaaaaaaggattttaagaaaaacttctcttggccgggcgcagtggctcacgcctgcaatcccagcactttgggaggccgaggcgggcggatcacaaggtcaggagatcgagaccacggtgaaaccccgtctctactaaaaaatacaaaaaaaaattagccgggtgcggtggcaggcgcctgtagtcccagctactcgggaggctgaggcaggagaatggtgtgaacccgggaggcggagcttgcagtgagccgagagcgcgccactgcactccagcctgggtgacagagcgagactccgtctcaaaaaaaaaaaaaaaagaaaaacttctctttaggctgggtgcggttcctcatgcctataatcccagcatttagggaggctgaggtgagtggattgcaggagctcaggagttcgagaccagcctgggcaaggtggcaaaaccccgtctctactaaaaaaaattagctgggcttggtggcaggcgcctgtaatcccaggtactcgggagactgaggcaggagaattgcttgaacctggaaggtggaggttgcagtgagttgagatcacaccaatgcactccagccagggtgagagtgagagactgtctcaaaaaaaaaaaaaacaaaagaaaaacttctctctagctctgtgacgggcagttcagataataccttcaccagatttacctgttttcagctgaagaatgtgagatgaagccttgaaaccctaaaagtgatatggtaactagggcaggtctttctgtacataaaagtgacttaataaacagtgaatttcatacaggtaaaccctattataccctcagttctaaccattggcctatctcttgcgttttgttctaatgtagaattagattgctacttgactagttcaggaactctgtttagatctgataagtcataatcaaatcttgccaggcgtggtggtttatgcctgttatcccagcactttgggaggccaaggcaggtggaccacgtgaagtcaggagttcaagacaagcatggccaacatggcgaaaccctgtatctactaaaaatacaaaaattagccgggcatggtggtgggtgcgtgtaatcccagctagttgggaggctgaggcaggagaatcacttgaacctgggaggcagaggttgcagtgagccgagatttccactgcattccagcctgggcgatagagtaactctgtctcaaaaaaacccactagatcatctctagaacattgctactcccaagtatgatttgaggaacagcagcctcagtatcaccagggaacttattagaaatagtctcagcctcaccactattcccacttaattgtaatctgatattaacaagatttcccaatgtgggtcaggtgtggtggctcatgcctgtaatcccacactttgggaggccaaggtgggcggatcacttgaggctgggagtttgagaccaggctggccaacatggggaaaacccatctctacaaaaaataacaaaaattaggtgtgtgtggtgacgcatgcgtgtaatcccagctacttaggaggctgaggcaggagaatcacttgaatctgggaggcagaggttgtagtgagctgagattgtgccactgcactccagtctgggcaacagagtgacactgtttaaaaaaaaaaaaattcccaatgtgggccgggtgcagtggctcatgcctgtaatcccagcactttgggaggctgaggtgggtgtatcacgaggtcaagagatcaaggccatcctggccaacatggtgaaaccccgtctctactgaaaatacaactgggcgtggtggtgcacgcctgtagtcccagctacttgggaggctgaggcagaagaattgcttgacctgggaggcggagcttgcagtgagcccagatcgtgccactgcactgcaccctggcgacacagcaagactgtctcaaaaaaaaaaaaattcccaatgtgtatcttaaagtttgagaaatgctgatctaaaagatactaatgaccaggtgtgtagaggacattttcttaagcccttaagtacaaatttaagaggtaagtgcttcagccattagggttactggcttgttcatctttcccactgagtgtaaatatttagcttagggtttaaaatttgttatgtagctttttgcacttgtccatgtttatactactgtattattattatttttttttgagatggagtctcgctgtgtagccaggctggagtgcagtggtgcaatcttggctcactgcaacctccgtctctcgggttcaagcaattctcctgcctcagcttcccgaatagctgagactacaagcgtgcaccaccatgcccagctaatttttgtatttttagtagagacaggttttcaccatgttggccaggctggtctctatctagacctcgtgatccatccgcctcggcctcccaaagtgctgggattataggcatgagccaccacgcccagcctatagtactgtattcttattctccactcttgtgtgtgaaaagtcagctcttttggcttttctgttatggggaaacttgaattacacagggaacccaactgaagaaaatgaactgaagtaggtggcgctgggtgaagtgggcccagagaatggtgtacacatccctcccatacatatacccaaacttctatttttttatgtgacggagtttctctcatcgccccggctggaatgcaatggcacgatctcggctcactgcaacctccgcctcccgggttcaagcgattctcctgcatcagcctcctgagtagctgggattataggcatgcaccatcacgcctggctaatttttgtatttttagtagagatggggtttcgccacgttggccaggctggtcttgaactcttgatctcaagtgatccacccgccctggcctcccaaagtgctgggattacaggcctgagccaccaggccagccccaacttctactttttattttatttataaattggggggggggttctatatttagtttgaagaggtggggaagatttgaaaaccactagatttaccaggaaatttttttcttcaaaaatattttctgcttttatgatacttgaatatctaataaaagacaatatttagccagtcacggtggctgatgcttgtaatcctaacactttgggaggctgaggtgggtggactactggagccctggagttcaaaaccggcctaagccacatggcaaaacagtctttacaaaaaatacaaagatggtggcttatgcctgtagtcgtacctactcaggaggctgaggttgggaggatcacctgaatctgggagtttggggctgcaataagccatgattgtgccgctgcactccagcctgggtgacagtctgagaccctgtctcaaaaaaaaaaaaaaaaaaaaaaaaaaaaaagactacattcactgtatacgtggccttttccccctaactagctatgtagcttcttaaaggcaaagattcttcatagtgctttgcacatgataggtgctgatactcattggatgaatgtatatagtgaagaattttagatctgattaccacaattgggatcataaacatgtataaactccttgggagtctgccttatatactttttatccccctaaatgttccattaatgttgcagagaggctcactagttcctggagatgtcttattaagtactgaaatgtgattttccaaaattttctttacaatacaggcaaaagataagtaaattgtggacaaagctttcatctctatcagcagctatagagaggaagtaaacagcttagcccctaatacaggaggaagttgttcaactacaggcttgttagtagcaagttaaaccagttacattttataaaacagcctgagtggtagggaagctatcactttaatactctagaggcagaatgccacataggactttgggtcacatatttcttttccagggtctcctcaaaatgcagtttctatttacagttgactttggcccctatttacccataaaatgtcaaaatcaagtagtatgaacatggaaacaggagcagggactaaggtttggtcaagtggccctcattgttccaagagtaatttaggctatgtaaacttgaaaaatatgggaccagattaccttttgtctctaaattctactcttctttaagtagctggcactgtatctctgccagggcacagaagtgggctccttactattctgaccactagcaagtggccaactcttcaaatacagggtagctacctatttcacgtgaaaggcctcagtattctgctcacttgaactacggaaaataggccacaatacttggttacaatactggaactctgaacctatgtggaggagagaaaaacaatggtgaacgagataccagctgggctctttccacattcagggctcagcagtgttggggtttcacttgtctctaatcctgaagaggtatctagccctggaaggaagctgagcctgtagctaacgcataagcacagtgtattcaataaaacatttttattctgtacaata

SEQ ID NO: 1037 - DNA, 175 bp, HOMO SAPIENS
aacacacaattcatggaagagtcatgcactgggattagcccagctctacagctgatggtcttaggcaagtgcatctctcttggagtaaatcattctaacccataaaatgggtgtaacagtttgtcttgcctgcttcttttggtaattggaaggattgaatgagacaaggtcctgt

SEQ ID NO: 1038 - DNA, 3425 bp, HOMO SAPIENS
aaaacccggccgggatttcggtcagctacattcgtgggttgtggtagggagggtaatcccgtggggatggagtgaccggctctctctccgcctgaaacgcttcccgcgggagttttagccgtgttattgttggggaagggaatgtcaaattctgctcctgccttcccccaggggctggagactggaatctttattccagttcattgcgggtcgacgtggtctccagaatccccgagtgtagaggcggaggacagtggagctggggactcgggcgcctgggtcctggtccctgagcgtccagcgctcccctagtccgcggccctggctcctgtcctcacttccttccccttttggctcctgctctcggagcgggcggacgcgggggggagcggaaagggcgggagggcccaggagcccggcgggggggttcaagggggtacggaaaagccggggaggggactcggtccggggccggagaccgacggcaacagcggctcaggacccacgctgcccccacccctcccgagcaggcgcccccatggcccgaccccgctgattccttcactcggccatgctcccgcggcccctgcggctgcttttggacacgagcccccccgggggagtcgtactgagcagcttccgaagccgggaccccgaagagggtgggggcccaggtggcctggtcgtgggcggggggcaggaggaagaggaggaggaagaagaagaggcccctgtgtccgtctgggatgaggaggaggatggtgccgtgtttaccgtcacaagccgccaatatcgacctcttgatcccttggtccctatgcctcccccacgttcctcccgacggctccgagctggcactctggaggccctggtcagacacctactggatacccggacatcagggactgatgtgagcttcatgtcagccttcctggctacccaccgggccttcacctccacgcctgccttgctagggcttatggctgacaggctggaagcccttgaatctcatcctaccgacgaactagagaggacaacagaggtagccatctctgtactgtcaacctggctggcctctcaccctgaggattttggctctgaggccaagggtcagcttgaccggcttgagagcttcttacttcagacagggtatgcagcagggaagggtgttggggggggcagcgctgacctcatccgcaatctccggtcccgggtggacccccaggcccccgaccttcctaagcccctggccctccccggcgatccccctgctgaccccacggatgtcctggtgttcctcgctgaccacttggccgaacagctgaccctgctagatgcggaactttttctcaatttgatcccctctcagtgcctgggaggcctgtggggtcacagagaccggccaggacattctcacctctgcccatctgtccgagctactgtcacacagtttaacaaggtggcaggggcagtggttagttctgtcctgggggctacttccactggagagggacctggggaggtgaccatacggccactccgtcccccacagagggcccggctcctggagaagtggatccgcgtggcagaggagtgccggctgctccgaaacttctcttcagtttatgccgtggtgtcagccctgcagtccagccccatccacaggcttcgggcagcctggggggaagcaaccagggacagcctcagagtcttttccagcctctgccagattttctccgaggaggataattattcccagagtcgggagctgctcgtgcaggaggtgaagctgcagtctcctctggagccacactccaagaaggccccgaggtctggctcccggggtgggggtgtggtcccataccttggcaccttcctgaaggaccttgtgatgctggatgcagcctccaaggatgagttggagaatggatacatcaattttgacaagcggaggaaggagtttgcagtcctttctgagttgcgacggctccagaatgaatgtcgtggctataacctccaacctgaccatgatatccagaggtggctacaggggctccggccactgacagaggctcagagccatcgtgtatcctgtgaggtggagccacctggttccagtgaccctcctgccccacgggtgcttcggccaacattggtcatctcgcagtggacagaggttttgggctctgttggggtccctaccccgcttgtgtcctgtgaccggcccagtactgggggagatgaggcgcctacaactcctgctcctctgctgactcggctggcccagcacatgaagtggccatctgtctcgtcactagactctgccttggaaagcagtccatccctgcacagtccagctgaccccagccacctctccccaccagcctcctcccctaggccttctcgaggtcaccgccgctcagcctcctgtggctccccgctgagtgggggtgcagaagaggcctccggggggactggatatgggggagagggatctgggccaggggcctctgattgccgtatcatccgagtccagatggagttgggggaagatggcagtgtctataagagcattttggtgacaagccaggacaaggctccaagtgtcatcagtcgtgtccttaagaaaaacaatcgtgactctgcagtggcttcagagtatgagctggtacagctgctaccaggggagcgagagctgactatcccagcctcggctaatgtattctacgccatggatggagcttcacacgatttcctcctgcggcagcggcgaaggtcctctactgctacacctggcgtcaccagtggcccgtctgcctcaggaactcctccgagtgagggaggagggggctcctttcccaggatcaaggccacagggaggaagattgcacgggcactgttctgaggaggaagccccgttggcttacagaagtcatggtgttcataccagatgtgggtagccatcctgaatggtggcaattatatcacattgagacagaaattcagaaagggagccagccaccctggggcagtgaagtgccactggtttaccagacagctgagaaatccagccctgtgggaactggtgtcttataaccaagttggatacctgtgtatagcttcccaccttccatgagtgcagcacacaggtagtgctggaaaaacgcatcagtttctgattcttggccatatcctaacatgcaagggccaagcaaaggcttcaaggctctgagccccagggcagaggggaatggcaaaatgtaggtcctcgcaggagctcttcttcccactctgggggtttctatcactgtgacaacactaagataataaaccaaaacactacctgaattctaaaaaaaaaaaaaaaaaaaaaaaaaaaaaaaaaaaaaaaaaaaaaaaaaaaaaaaaaaaaaaaaaaaaaaaaa

SEQ ID NO: 1039 - DNA, 4494 bp, HOMO SAPIENS; identical to SEQ ID NO: 645

SEQ ID NO: 1040 - DNA, 2262 bp, HOMO SAPIENS; identical to SEQ ID NO: 512

SEQ ID NO: 1041 - DNA, 1027 bp, HOMO SAPIENS
tttgtctcttcctgagaaacgagcaaacctgaaagctactctctcagcttcagagggaaaaaatggttgtagatttctggacttgggagcagacatttcaagaactaatccaagaggcaaaaccccgggccacatggacgctgaagttggatggcaaccttcagctagactgcctggctcaagggtggaagcaataccaacagagagcatttggctggttccggtgttcctcctgccagcgaagttgggcttccgcccaagtgcagattctgtgccacacgtactgggagcactggacatcccagggtcaggtgcgtatgaggctctttggccaaaggtgccagaagtgctcctggtcccaatatgagatgcctgagttctcctcggatagcaccatgaggattctgagcaacctggtgcagcatatactgaagaaatactatggaaatggcacgaggaagtctccagaaatgccagtaatcctggaagtgtccctggaaggatcccatgacacagccaattgtgaggcatgcactttgggcatctgtggacagggcttaaaaagctgcatgacaaagccgtccaaatccctactcccccacctaaagactgggaattcctcacctggaattggtgctgtgtacctcgcaaaccaagccaagaaccagtcagctgaggcaaaagaggctaaggggagtgggtatgagaaattagggcccagtcgagacccagatccactgaacatctgtgtctttattttgctgcttgtatttattgtagtcaaatgctttacatcagaatgatgaaaataggcttgccactttctcttattttaattccatggtagtcaatgaactggctgccactttaatataactgaaaattcattttgagaccaagcaggatcaagtttgtagaataaacactggtttcctagccatcctctgaaaacagtatgaaacatgaccaagtacataatggatttagtaataaatattgtcgaattgctaaaaaaaaaaaaaaaaaa

SEQ ID NO: 1042 - DNA, 4223 bp, HOMO SAPIENS
agatgatgctcccgccagctgggcagagcaagggtgttccccgcggaggtggcagccctgggccgcggcgttccggaacccccgcacccacggcgcggtgccccacggtgcccgcgagcgccgcccccgctggctagccgcgcctcgctccgccctggacgccgccggtcccggcgcggaggtgcggcggggagtgggagccggcccggctcagtctgatttacggctctgctgaaaaccgcttcgctcccgcagcatcagcaccggaggcggcggctgcagcagcagcagcaacaagtcgggacttttagagtaatgcaacagaaggcttttgaggaaagcagatatccctggcaggagtcctttgagaatgttgctgtgtgcctgccattacgctgcccgaggtgtggagaccataccagatttagaagcttgtcatccttgagggcccatctggagttcagtcacagctacgaagaaagaaccctcttgacaaaatgcagtctctttccatccctcaaagacacagacctagtcacttcctcagaactcctgaaaccgggaaaattgcagagcagtggcaacgtggtaaagcagaaaccgagctatgttaacttgtacagcatttcacatgaacattccaaggacaggaagccatttgaggtggtggcagagaggcctgtgtcctatgtgcagacctacactgccatggacctccatgcagactcgctggatgggacacggtcgggtcctggactgcccacctcagacaccaaagcttctttcgaggcacatgtcagagaaaaattcaatcgaatggttgaggctgtggataggaccattgagaagagaattgataaactcaccaaagagttggcccagaaaactgcggaactgttggaagttcgggcagcttttgtgcagctgactcagaaaaagcaggaagttcagagacgagagcgggccttaaacagacaggtggacgtggccgtggaaatgatagctgtactgaggcaacgcctgacggaatctgaggaggagcttcttaggaaagaagaagaagttgtcacattcaaccatttcctggaagcggcagctgagaaggaggttcaagggaaagcccggctccaggactttattgagaatctgttacagcgggtagaactggcggagaagcagcttgagtactatcagagccagcaggcctctggctttgtccgtgatctcagcgggcacgtgcttacagacatctcctcaaataggaagcccaaatgcctaagccgagggcacccgcattcggtatgtaaccaccctgatctcaaggcccatttccacccaaagggaaggaaccacctgaaaaaggccaaggatgacagagccagcatgcagcctgccaaggccattcacgaacaggctgagtcctcaagagacctctgcagacctccaaagaaaggggagctcctggggtttggccgcaaaggcaacatcaggcccaaaatggctaaaaaaaagccaacagccattgtgaacatcatctaaaagggtgggtggtgctggaccaatcatcgctgggctttggggaacgttgttccaggagccaacagtaatgtctttctggaaacattccatagtaagacacattggaaaagccaagggcataacacaggcaagcacctcaattaaccagagcttagcaaatgggaatcttagtgaaccagaattttattataacccccttttagaagcttgcaaattacagaaagaataaaaaaattaaatcaatcttaaagctctaacttctaaagtaactggcccagtctccagtaatcttggcatctgggcttctatgcagtggtcactaattttcaggaccaaggccacacaaaatgtcaggcctagggagaaaattcatctgtgcccactgctctccaaagtgcgaggcaaggaatggcagtgtaaagttctgttaatagcagtaaaatgaaaatatttgtgtttgtgtataaccttcccctcagctaatttgaaagcctccaaaataaggattcccattccccgagtattctggttaatcaagatttcaatttctgggttgctcaagggactcgttcagtcagacttcagttctcattccgacagggtgtctttcagttcgtttgtttgattgaggttttttggtggcctagatgcatgtttattcagattttggtacacctctgccgtcttctttggctgagtattctgcacccacagaccatgctgccagcctctatcttaatagctgcttctgtggatatggctggggagcgaagtaaaatcctcttttgattagcacccagcatgggctgggtggctaggtggttggaatgacagtggactgcacgcttggtgcatcgtgcatcgtgaccatcctggaagcactgcgggtgtcgccaagccctttcctaagacctgcttcccggccagtgtcagtggccctctctctctctgctatgggcatgactttctcttcgctggcttaacttttccactgggtggttcactttgcctcctgctgcttctgtgccctgttaagggcttcaggtatctttcaaccaagtatctggagtgttcactctatgttgcattctaaagtaatttctgaaataaacaatgcatgtaggagccagaatctgacactgtcttcccctccttccctccctaaaatggctttagtttccacaaagagctgttaagaatttcctgctgtatgattttcctcaagaatgaatttccatgttattttttccttaaatttagcaatatcatcaggtctcttgcagagtttacaagtgctgacattcttctgaaaacaggaataattttgtccacaaatatatacatatatacatatatataacacatacaaaatatatatgttaagtatattaataatttatttttaaatactcatggagaaagtgtgtgtttgtggtgggtggtttttaaactatatatgtttgttcatgtaaactgaattctcttatttaaaaaatcaaaactgtaacgtaattaacattggcagaattatgattgttactgcaataagcatcaaattagcagcgcattaaaaataggaaataaagcagttgcttaaaatgccagtcaattgaaaagtgtaacttatcattatacaaacattctgaacctaccataatgaaaatgttcttgaatcttcactttgactttcagtttatggggggggtagatcattcatgtgatatataagcagctatcaagtgggcaaaaacattgctgtgaatagcactgtttaggctaacattgtaaaaattgtaatgttataattattatttatttggagaattaacttccccctctaaagttatttattattgatgcttataccatgattgcaccttagccttttacatactaaaaacatgacttgttagttgtattgcatgctctttgtcctgtaatgtgtgtgcaatgacaacttgtttctgttttatttaaagtaactgacattttggattttcatctaacatagagggcatggcaactctctttgacagtggtaccccatgatcttcagaaagtaccataatgtcatcctactctacatttcacaagacgaattattttgagatttgtttattatattaaaatgtttttttacgttcccactaaattttgaccccatataaagaaatgtgttatgtatgttgtgcctccttagagacataaatttagtgtcaaaacatgggagatggcttactcagaagcatactccacttaacataccatggcctgagctaagtaccatgtcctgtttgtgtcttatttttaaatattttctttgtccacatgggccgttgaccttagagttaaggcggttgcttttttgaagaaatcaccaaagtttctgggaaactatgttcaaggttgaaatggagagtagatttaattttatttgtcttgtagggaagaaatcttcctttgaaccgcttttcttgctttttccctttttcccaaactaggttacaggttcttatctgcaaggttcaagttgcttagacattgttttccagtattctgcagggccagtcagttgtacagaagttggaatattctgttccagaattaaagaagtttttagattatgaaatattatgataataaagctatatttctgactaatgtgttgaaaaaaaaaaaaaaaa

SEQ ID NO: 1043 - DNA, 2451 bp, HOMO SAPIENS
gtcgccgacgcccgagcgccggagccccggccccgccccgcgagcgccgagacttgttggccgcggagactgcgaccctcttctctcagtctgccttactaccatgccgctctacgagggcctggggagcggcggggagaagacggcggtcgtgatcgacctgggagaggcctttaccaagtgtggatttgctggagaaactggtccaagatgtataattcctagtgtgataaaaagagctgggatgcctaagcctgtcagagttgttcagtataatatcaatacagaagaattatattcctacctaaaggaattcatccacatactatatttcaggcatctattggtgaatcccagagaccgccgagttgtgattatcgaatcggtattatgtccttctcacttcagagagacactcactcgtgttcttttcaaatattttgaggttccatctgtcttgcttgctccaagtcatctaatggctcttctgacgcttggaattaattctgccatggtcctagattgtggatatagggaaagcctggtgttacccatatatgaaggaatcccagttctaaattgttggggagcactacccctaggaggaaaagctcttcacaaagagttggaaactcaactattggaacaatgtactgttgacacaagtgttgctaaagaacagagccttccctcagtgatgggttcagttccggaaggtgtcttagaggacattaaagcgcgtacttgctttgtaagtgatctgaagcgaggactaaaaatccaagcagcaaaatttaatattgatgggaataatgagcgtccctccccacccccaaatgttgactatccattagatggagagaagattttacatatccttggatcaatcagagattcagttgtggaaattctttttgaacaagataatgaagagcaatcagttgccactttaatattggattcccttatacagtgtccgatagacaccaggaagcaactagcagagaatttggtagtcataggtggcacttctatgttgccaggatttctccacagattgcttgcagaaataaggtatttggtagaaaaaccaaaatataaaaaagcacttggcactaagacatttcgaattcatactccacctgcaaaagctaattgtgtggcctggttgggaggggctatttttggagcattacaagatatacttgggagccgttctgtttcaaaggaatattataatcagacgggccgtatacctgattggtgttctctcaataacccacctttggaaatgatgtttgatgtcgggaaaactcaaccacctctgatgaagagagcattttccactgagaaatagaagtttgattaaaaatcaaccttgcttcatatcaaatatttaaccaattataagcaaattgtacaaagtatgtaggatgttttgttatagaggactatagtggaagtgaaagcattctgtgtttactctttgcattaatatataattcttttgactttgtttctcttgtgtagtggtaaaatggtagctggtgcttattgagatttgctgtatttatatcaataaagtatagtaaagcagtttgattttggaagtttgttatgtggctttttttttttttttttttttgagacggagtctcgctctgtcacttaggctggagtgcagtggcacaatctctactcattgcaagctccgcctcccgggtttacgccattctgtctcagcctcctgagtagctgggactataggcatacgccaccccgcccggctaattttttgtatatttagtagagacggggtttcaccatgttagccaggatggtctcaatttcctgacctcgtgatccaccctcctcggcctcccaaagtgttgggattacaggcgtgaaccactgtaccagcctatgttgcttgtctttcaaaaagaacagtatttctccacagttcacataacctgttctgggctcattaattgtgtttccagcagttactccatttaaagcataaatagtgttaaccattaccagttatttcaaatactaacatgggtccatttaaaaaaaatatttattttggtacttgggtgtccatattataataatgttgtttttccagaaatatatttgatctttggactgagaatgtttggtaacatagtcaagcatttgttaagccaagtgtggaaatgttcactttttaactttacagtttttttaatgagcaattctacatttctaagaaaaaagatacttcatttttatataaggttacaactgctttataaaaatgtattcacaatgtcattaatctttgcgtttgtgctttatatcttctcagggcagaggttcttgaaatatgtactcaatcatttaacttttattttattttttcatttgtttttaatgaactacctcttgttgaaaaaaaaaaaa

SEQ ID NO: 1044 - DNA, 2499 bp, HOMO SAPIENS
ggaagtggcgggggcggtgccatggcaaaagaactcccggataatccgaattcgtggtcctcagaattggtttagggttgtttcgcggttcttcccgtattctgcctccgaggcccagtggggctggctgtgggccccctgtgctgtttgaggcgtgaaactcacctcaggaaatgtatctgatccattagcgtggattcatattatttggtgatggagaatcttcagctgtgttaagtgttaccgtcagtttcagagatggcttctttgcaaaggaaagggctgcaggcaaggattctcacctctgaagaagaggagaaactgaaaagagaccaaactttggtgtctgattttaaacagcagaaattggaacaagaggctcagaaaaattgggatcttttttacaaaagaaatagcactaatttcttcaaagacagacactggaccaccagagagtttgaggagctaagatcatgtagagagtttgaagatcaaaagttaacaatgcttgaagctggctgtggggttggaaactgtttattcccacttttagaagaagatccgaatatctttgcctatgcctgtgatttttctccaagagccattgaatatgttaagcaaaatcctttatatgatacagaaagatgcaaggtattccagtgtgatctgactaaagatgatcttctggatcatgtaccgccagagtctgtggatgttgttatgttgatatttgtgctgtcagctgttcatcctgataagatgcaccttgtcttacaaaacatttacaaggtattaaaaccaggcaaaagtgtcttgtttcgtgactacggactgtatgatcatgccatgcttaggtttaaagccagcagcaaacttggagaaaacttttatgttagacaagatgggaccagatcatatttttttactgatgacttcctggctcagctctttatggacacaggttatgaagaagtggtaaacgagtatgtgtttcgagagacggtgaataaaaaagaaggcctgtgtgtgccaagagttttccttcagagcaaatttctaaagcctcctaagaacccatctcctgtggtcctgggcctggatcctaagtcctgacctttcatgaggttggcatttataccttcccttgaagaggaaaatttaaaatcactctttcgtctgggtgcggtggctcatgcctgtaatcccagcacttcgggaggccgaggttgggggatcatctgaggtcaggagtttgagaccagcctggccaacatggtgagaccccatctctactaaaaatacaaaaaaattagctgggcatagtggcgagtgcctgtaatcccagctactcaggaggctgaggcaagagaatcgcttgaacccaagaggcggagactgcagtgagccaagatcatgccattgcactccagcctgggcgacagagtgagaccctgtttcataaataaataaaatcactctttttactttatatattttttgagacaggatcttgtggtacgcaggctggagtgcagtggtgtgtgatcacagctcattgtagcctcgacctcccctgggctcaagcagtcttcctgcctcagcctcctgagtagctaggactacaggtgtaagccaccatgcctggcccttaattttttttaatgagcatgtacagtagtcccgctttatccatggtttcacttaccacaatttcaattacctgttttcaactgcagtcagttacttttcttaagatattttgagggttataggctcatgcctataaccccagcactttgagaggccaaggccagcagatcccttgagcccaggagttcaagaccagtgtgggcaacatggtgaaactctgtctctacagaaaatacaaaaattagccaaatgtggtggcatgtgcctgtagtcccagctggggtgggaggttagcttgagcctggaaggtggaggttgcagtaagtcgagatcacgctactgcactccagcctgggcgacagagcaaaagtctgtctcaaaaaaaacaaaaaaaatttgaaagatcacattcacataacttttattacggtatattgttaaagttgttcttttttttttagagtttggtaccatcttggtttcaggcaaccactgggggtcttgaaacataccacccgcagatacggggggctactatgtactttttgtattaaaaaataggaagtgtatgtgtgtgtgttagagacatgtaaataaaatttcaaggcctgaaaagtagtcaaagttttatagaataacataatttagccatattgttcactgtaaaattccacaaagaaaagcctaaggaccctgtagcacgtaaagagattcttgtcattactcatgtgactgtaagtgttcccccaggcaacatgtcagacaaccatggggaaaaatgaggccaagtagactaaaataagacactcatatatatttctagcctaaaggagtgttctgttttcttct

SEQ ID NO: 1045 - DNA, 4145 bp, HOMO SAPIENS
gggtggcctggtgtgtgggcgcggcagggcgcaggcgcaggcgcagtgtgcgtccgcgtctgaggggagggatgtgggggaagcgacggcccccggtttgtttgggctgtgggcggtgcgcagcggagagcccgggaaaagcgggaaatggcggcgccgagcgcggggtcttggtccaccttccagcacaaggagctgatggccgctgacaggggacgcaggatattgggagtgtgtggcatgcatcctcatcatcaggaaactctaaaaaagaaccgagtggtgctagccaaacagctgttgttgagcgaattgttagaacatcttctggagaaggacatcatcaccttggaaatgagggagctcatccaggccaaagtgggcagtttcagccagaatgtggaactcctcaacttgctgcctaagaggggtccccaagcttttgatgccttctgtgaagcactgagggagaccaagcaaggccacctggaggatatgttgctcaccaccctttctgggcttcagcatgtactcccaccgttgagctgtgactacgacttgagtctcccttttccggtgtgtgagtcctgtcccctttacaagaagctccgcctgtcgacagatactgtggaacactccctagacaataaagatggtcctgtctgccttcaggtgaagccttgcactcctgaattttatcaaacacacttccagctggcatataggttgcagtctcggcctcgtggcctagcactggtgttgagcaatgtgcacttcactggagagaaagaactggaatttcgctctggaggggatgtggaccacagtactctagtcaccctcttcaagcttttgggctatgacgtccatgttctatgtgaccagactgcacaggaaatgcaagagaaactgcagaattttgcacagttacctgcacaccgagtcacggactcctgcatcgtggcactcctctcgcatggtgtggagggcgccatctatggtgtggatgggaaactgctccagctccaagaggtttttcagctctttgacaacgccaactgcccaagcctacagaacaaaccaaaaatgttcttcatccaggcctgccgtggagatgagactgatcgtggggttgaccaacaagatggaaagaaccacgcaggatcccctgggtgcgaggagagtgatgccggtaaagaaaagttgccgaagatgagactgcccacgcgctcagacatgatatgcggctatgcctgcctcaaagggactgccgccatgcggaacaccaaacgaggttcctggtacatcgaggctcttgctcaagtgttttctgagcgggcttgtgatatgcacgtggccgacatgctggttaaggtgaacgcacttatcaaggatcgggaaggttatgctcctggcacagaattccaccggtgcaaggagatgtctgaatactgcagcactctgtgccgccacctctacctgttcccaggacaccctcccacatgatgtcacctccccatcatccacgccaagtggaagccactggaccacaggaggtgtgatagagcctttgatcttcaggatgcacggtttctgttctgccccctcagggatgtgggaatctcccagacttgtttcctgtgcccatcatctctgcctttgagtgtgggactccaggccagctccttttctgtgaagccctttgcctgtagagccagccttggttggacctattgccaggaatgtttcagctgcagttgaagagcctgacaagtgaagttgtaaacacagtgtggttatggggagagggcatataaattccccatatttgtgttcagttccagcttttgtagatggcactttagtgattgcttttattacattagttaagatgtctgagagaccatctcctatcttttatttcattcatatcctccgccctttttgtcctagagtgagagtttggaaggtgtccaaatttaatgtagacattatcttttggctctgaagaagcaaacatgactagagacgcaccttgctgcagtgtccagaagcggcctgtgcgttcccttcagtactgcagcgccacccagtggaaggacactcttggctcgtttgggctcaaggcaccgcagcctgtcagccaacattgccttgcatttgtaccttattgatctttgcccatggaagtctcaaagatctttcgttggttgtttctctgagctttgttactgaaatgagcctcgtggggagcatcagagaaggccaggaagaatggtgtgtttccctagactctgtaaccacctctctgtctttttccttcctgagaaacgtccatctctctcccttactattcccactttcattcaatcaacctgcacttcatatctagatttctagaaaagcttcctagcttatctccctgcttcatatctctcccttctttaccttcatttcatcctgttggctgctgccaccaaatctgtctagaatcctgctttacaggatcatgtaaatgctcaaagatgtaatgtagttctttgttcctgctttctctttcagtattaaactctcctttgatattatgtggcttttatttcagtgccatacatgttattgttttcaacctagaaacctttatccctgcttatctgaaacttcccaacttccctgttctttaagactttttttttttttttttttttttttgagacagagtctcgctctgtcgcccaggctggagggcagtggcacgatctcagctcactgcaagctccaactcccgggttcacgccattctcctgcctcagccttccaagtagctgggactacaggtgcccgccaccgtgcccggctaatttttttgtatttttagtagagacagggtttcaccatgttagccgggatggtcttgatctcctgacctcatgatccacccacctcagcctcccaaagtgttgggattacaggcgtgagccactgcgcccgggcaagacctttttttaaaaaaaaaaaaaaaaaaacttccattctttcttcctccagtctgttctcacataacagagtagttttggtttttaattttttttggttgtttgctgttttttgttttttaaggtgagttctcactatgtttctcagactggtctcgaactcctggcctcaagccatcttcccgcctcagcctctcaaatagctgggcttacaggcatgagccaccacacctggccaggatttggttgtttaaatataaatctgatcacccccctgcttagaacccttctgctttctattacccctcatttaaaatgtaaactcttcaccttggtttatgagaactggttcttgccttccccttgaacctcattaaatggtgatttcttgctaagctccagcccgagtggtctcctctcagcttctaattttgtgctctttcctgcccttttcctgggccttctcagctctccacccccaccactcttgactcaggtggtgtccttcttcctcaagtcttgacaattcccgggcccttcagtccctgagcagtctacttctgtgtctgtcaccacatcttgtcttttcccctcattgcatttattgcagtttatatatatgctacttttacttgttcatttctgtctcccctaccaggctgtaaatgagggcagaaaccttgtttgttttattcaccatcatgtaccaagtgcttggcacatagtgggccttcattaaatgtttgttgaataaaagagggaagaaggcaagccaaccttagctacaatcctaccttttgataaaatgttccttttgacaatatacacggattattatttgtactttgtttttccatgtgttttgcttttatccactggcatttttagctccttgaagacatatcatgtgtgagataacttccttcacatctcccatggtccctagcaaaatgctaggcctgtagtagtcaaggtgctcaataaatatttgtttgggtggtttgtgagccttgctgccaagtcctgcctttgggtcgacatagtatggaagtatttgagagagagaacctttccactcccactgccaggattttgtattgccatcgggtgccaaataaatgctcatatttattaaaaaaaaaaaaaaaaaaa

SEQ ID NO: 1046 - DNA, 10092 bp, HOMO SAPIENS
cggcggagccccggcggggcgtttggtttcggtttggccctgactgggattagtgttgacgatcgaaatgggagtccccaagttttacagatggatctcagagcggtatccctgtctcagcgaagtggtgaaagagcatcagattcctgaatttgacaacttgtacctggatatgaatggaattatacatcagtgctcccatcctaatgatgatgatgttcactttagaatttcagatgataaaatctttactgatatttttcactacctggaggtgttgtttcgcattattaaacccaggaaagtgttctttatggctgtagatggtgtggctcctcgagcaaaaatgaaccagcagcgtgggaggcgttttaggtcagcaaaggaggcagaagacaaaattaaaaaggcaatagagaagggagaaactcttcctacagaggccagatttgattccaactgtatcacaccaggaactgaatttatggccaggttacatgaacatctgaagtattttgtaaatatgaaaatttccacagacaagtcatggcaaggagttaccatctacttctcaggccatgagactcctggagaaggagagcataaaatcatggaatttatcagatccgagaaagcaaagccagatcatgatccaaacaccagacactgtctttatggtttagatgctgacttgattatgcttggattaacaagtcatgaggcacatttttctctcttaagagaagaagttcgatttggtggcaaaaaaacacaacgggtatgtgctccagaagaaactacatttcaccttctacacttgtctttaatgagagagtatattgactatgagttttcagtattaaaagaaaagatcacatttaaatatgatattgaaaggataatagatgattggattttgatggggtttcttgttggtaatgattttatccctcatctacctcatttacatattaatcatgatgcactgcctcttctttatggaacatatgttaccatcctgccagaacttgggggttatattaatgaaagtgggcacctcaacttacctcgatttgagaaataccttgtgaaactatcagattttgatcgggagcacttcagtgaagtttttgtggacctaaaatggtttgaaagcaaagttggtaacaagtacctcaatgaagcagcaggtgtcgcagcagaagaagccaggaactacaaggaaaagaaaaagttaaagggccaggaaaattctctgtgttggactgctttagacaaaaatgaaggcgaaatgataacttctaaggataatttagaagatgagactgaagatgatgacctatttgaaactgagtttagacaatataaaagaacatattacatgacgaagatgggggttgacgtagtatctgatgactttctggctgatcaagctgcatgttatgttcaggcaatacagtggattttgcactattactatcatggagttcagtcctggagctggtattatccttatcattatgcacctttcctgtctgatatacacaacatcagtacactcaaaatccattttgaactaggaaaaccttttaagccatttgaacagcttcttgctgtacttccagcagccagcaaaaatttacttcctgcatgctaccagcatttgatgaccaatgaagactcaccaattatagaatattacccacctgattttaaaactgacctaaatgggaaacaacaggaatgggaagctgtggtgttaatcccttttattgatgagaagcgattattggaagccatggagacatgtaaccactccctcaaaaaggaagagaggaaaagaaaccaacatagtgagtgcctaatgtgctggtatgatagagacacagagtttatctatccttctccatggccagaaaagttccctgccatagaacgatgttgtacaaggtataaaataatatccttagatgcttggcgtgtagacataaacaaaaacaaaataaccagaattgaccagaaagcattatatttctgtggatttcctactctgaaacacatcagacacaaattttttttgaagaaaagtggtgttcaagtattccagcaaagcagtcgtggagaaaacatgatgttggaaatcttagtggatgcagaatcagatgaacttaccgtagaaaatgtagcttcatcagtgcttggaaaatctgtctttgttaattggcctcaccttgaggaagctagagtcgtggctgtatcagatggagaaactaagttttacttggaagaacctccaggaacacagaagctttattcaggaagaactgccccaccatctaaagtggttcatcttggagataaagaacaatctaactgggcaaaagaagtacaaggaatttcagaacactacctgagaagaaaaggaataataataaatgaaacatctgcagttgtgtatgctcagttactcacaggtcgtaaatatcaaataaatcaaaatggtgaagttcgtctagagaaacagtggtcaaaacaagttgttccttttgtttatcaaactattgtcaaggacatccgagctttcgactcccgtttctccaatatcaaaacattggatgatttgtttcctctgagaagtatggtctttatgctgggaactccctattatggctgcactggagaagttcaggattcaggtgatgtgattacagaaggtaggattcgtgtgattttcagcattccatgtgaacccaatcttgatgctttaatacagaaccagcataaatattctataaagtacaacccaggatatgtgttggccagtcgccttggagtgagtggataccttgtttcaaggtttacaggaagtatttttattggaagaggatctaggagaaaccctcatggagaccataaagcaaatgtgggtttaaatctcaaattcaacaagaaaaatgaggaggtacctggatatactaagaaagttggaagtgaatggatgtattcatctgcagcagaacaacttctggcagagtacttagagagagctccagaactatttagttatatagccaaaaatagccaagaggatgtgttctatgaagatgacatttggcctggagaaaatgagaatggtgctgaaaaagttcaagaaattattacttggctaaaaggacatcctgtcagtactttatctcgttcttcttgtgatttacaaattctggatgcagctattgttgagaaaattgaggaagaagtcgaaaagtgcaagcaaagaaagaataataagaaggtgcgagtaacagtgaaaccccatttgctatacagacctttagaacagcaacatggagtcattcctgatcgggatgcagaattttgtctttttgaccgtgttgtaaatgtgagagaaaacttctcagttccagttggccttcgaggcaccatcataggaataaaaggagctaatagagaagccgatgtactatttgaagtattatttgatgaagaatttcctggagggttaacaataagatgctcacctggtagaggttatcgactgccaacaagtgccttggtgaacctttctcatgggagtcgctctgaaactggaaatcagaagttgacagccatcgtaaaaccacaaccagctgtacatcaacatagctcaagttcatcagtttcctctgggcatttgggagccctcaaccattcccctcaatcactttttgttcctactcaagtacctactaaagatgatgatgaattctgcaacatttggcagtccttacagggatctggaaagatgcaatactttcagccaactatacaagagaagggtgcagttctacctcaagaaataagccaagtaaatcaacatcataaatctggctttaatgacaacagtgttaaatatcagcaaagaaaacatgaccctcacagaaaatttaaagaagagtgtaagagtcctaaagctgagtgttggtcccaaaaaatgtccaataagcagcctaactctggaattgagaactttttagcatctttgaatatctccaaagaaaatgaagtacagtcatctcatcatggggagcctccaagtgaagagcatttgtcaccacagtcatttgccatgggaacacggatgcttaaagaaattctaaaaattgatggctctaacactgtggaccataagaatgaaatcaaacagattgctaatgaaatccctgtttcctctaacagaagagatgaatatggattaccctctcagcctaaacaaaataagaaattagcatcttatatgaacaagcctcacagtgctaatgagtaccataatgttcagtctatggacaatatgtgttggcctgcccccagccagatccctcctgtatccacaccagtaactgaactttctcgaatttgttcccttgttggaatgccacaacctgatttctcctttcttaggatgccacagacaatgaccgtttgccaagtaaaattatctaatggcttactggtacatgggccacagtgccactctgaaaatgaagccaaagagaaagctgcactttttgctttacaacagttgggctccttaggcatgaatttccctttgccttcacaagtatttgcaaattatccttcagctgtaccacctggaaccattcctccagcctttcccccacctactggctgggatcactatggaagcaactatgcattgggggcagctaatataatgccttcgtcgtctcatctctttggctcaatgccatggggaccatcggtgccagttcctgggaagcccttccatcatactttatattctgggaccatgcccatggctgggggaataccagggggtgtgcacaatcagtttatacctctgcaggttactaaaaaaagggttgcaaacaaaaagaactttgagaataaggaagcccagagttctcaagccactccagttcagactagccagccagattcttccaacattgtcaaagtaagtccacgggagagctcatcagcttctttgaagtcctctccgattgctcaacctgcatcttcttttcaagttgaaactgcctctcaaggccatagtatatctcaccataagtcaacaccaatctcttcttcaagaagaaaatcaagaaaactggctgttaattttggtgtttctaaaccttctgagtaaatttggctcttagaattaagttaatttcttctctttccatctacctttttataaatacatatctatgtctcataaaaattagaatgtactattttaaaataatatgtgtaaattgaaatttttttcatttttaagttatcaggcacttttcatgctgtttaaaagactgtgtatcaaattgtgcactttaagtatgtgcagtttgttgtatgtcaattatacctcaataaatctgtaataaaaaactaaattaaaccttgcattaaaataatatcacagtatcagtggactaaacattaaaatgtaccactctaatcattggcctcatgattgaagcatcctgaactatgaattagacatcagttagcaataataagcattttttacactatcattgaggaataattacatggagcatgaaatttgggcctccagtataacttactgaatgtggattttatttctctttttaatgatgtaagaaaattgtcaggagaatggctcttatttatgtgtgttttaacttatgctttgttgcctctgagggtctttagacctgctgtgaaaggatcacatttgttgtggtgctgccagttttgctttattctaaattttgtaccaaagcaactttagaataatcagaatatttcatctaactgcttagaactataaatagcattctaaatttgagtaaatacaattttttaggttactcaagaaccagcattagtaatttctagtaaaattgtttcaaaatctacagggtacaatgattacaaattaatcttctaacaaaataaaatatgaaatattagtcatgttaattaataaactgtattattttgtatagctttttatttgcttacctgacattttatgagagcttcatagttggtcggtatgtagtgcttcttgggactgaagaaattctaattgttgtttaagttccaaggtgtgctacaatataggaggcacagtcatcagtttgtgacatacattatttactgcctatttcattctgattctatatttttagctttatgctgaactgttcaatgatgctgggattctctctttgcatgtcatatgtgaatgtgtggttcaagctgtaactgttgaaattattttagaatttatgacgatttctcagcagggcctatgtttatatatatatatatatttattctttagtttttgtgatatgcttatatttttaaggaagtaagttatagcatacttttttaaaagtaggaaccacaatctttatatggagcagcttgttatatctgattttcatgtaactcattggaaactctgccatgactcttaaagtagtcttacttgttttttaaaatgctggtattaaactaaatggactcctttcactaactgctgatttcagagtttaaatgttagcaggatatttgtgtattagcagtgccttcagtataagagagaaatattcattatctgtcatttatcatagtcgtataagtttccatgattttattttctgttattttcataagttcagatgtttatcagttcccaacattgtttctttatctgtagtgggatcttgagtaatgaggctcaagtaaatcctcaatgtgtataattattgcctcataaactctctctttgtttttaaaggaaacatctattatggtaatacaaagaaaagttaaattgtgacagtaatgttatattaacctcttcctactttaaagtgtgaaatgtttcacctcagctgtacaaactccagcattgagaatttgcctcactcattactcctgtgtgacagttatataaatagcatgcagctcacatctgttttagagcatagaagaagcggcacctgccatcttctgaaaactccaaagggaaatttcagtagacatagtgcactaaacccataaggatacttgaccaatatttgagcacagcaagctgacagttctatacagataggcagtgaaagagttttattttccagccaggcgcagtggctcaaatcccagcacttcgggaggctaaggcaggcggatcacttgaggtccggagttccagacaagcctggccaacatgatgaagccctgtctctactaaaaatacaaaaattagccgggcgtgatggcacatgcctttagtcccagctactcgggaggctgaggcatgagaatcatttgaacccgcgaggcagagtctgcagtgagccgagattgcaccactgcactccagcctggagagcagagcaagactctgtctcaaaaaaaagaaaaaagttttattatccttactttttttttaacattattattctaaaggtcaaaactgagaagagattaagataggagagagctccataatggctggatagtggtcaggcattctctattcttttccccctgtagacccattctaaatgtgggcctgaggtcaatgggagatgtgccctccctatggaggatgtaagaagcagaggccatttctgccccatgttgaggaaacaatctgttgatagacctggaatttagagtatatctgaaaagcagttggacttcaagaaatttaaaattctctctttgagatggggtggactaagaccacccccaaagtttaaaaatatgctcattcaacttgaatcttctgaggactttttgtgaaaatggtggactgtttagggcataggacagattccccaaattgctttatgcttccacataactagagcacttcaatctatttaagcctttgtctcctaactgaaacattatttctaaatatttctattcaataagttttttcttttttgagcaacttaagtgaattttgaagattgctccttccagtctcgttccttttcacattttcctgcattacctaataattacctcagcgttagaatttgaatgtattaattgatttaaacatcatgtagactaaagtcttaaacatctaagactcagttgtagttgcagaaaaaaattaaagtcacctctactgaaccttggtttcaatttaagatttttcttgcttttcaaaggggtaactaataaagattgaagggtttttttcccgattggtggaggaatgaagaactattgatgcaagtttttttattgtttctttctatgatcaggtacctgctttcattttagactgctacttccaaactaagctagattcttggttttaatgagaggaggcagagagagggaggcagatggaagaagaaaaacagttaaataagacatacccagtcactgcatttttggactataccgtatctttctagcacaaggaaatagataaactgtaaggtcttttttactcactttttatttatgtgttctatttgtgttagtcataactgtttatagtggttgtctaatttttacttttattatatgagatagagctgtgcagatcttcactcaagttagttctgtcacgcttcttcccattatttagagcacagttttttaaagcaactgtacaatttctcagccttatgagcttgctgtatttcttggtatcatgttgcttccaaattttgtttttactgtagaagacaattaatttattgtagagaagtggctgtgaaagtcgttctctgtctttaaaaatcaattgcagaagttcatttgtcatttttctagagataaattatagtactcaaactggcagtgctcagtatatacattttgtaagctttgtcagtgaaaccatcagttttgcaggagcttcctttcctagtcaagataaagcttaaaattccagaaattaatgtcgttcggactgactttattcatatttccatcaaacttctccaatacagtaagagatagtgttgaaccagcatcaagtctccagaaacatggcagagcagacaggccgttaagtttcacagacatcatagatccttttcttaaagaagaaaaacatgtataaaatagttttagtagtccaaaatgtcaactatctgtagctgcttttgtgtgtgtgtcagtgaacaaataataatgccttgctcaatcaatgcattcagccatctcaagtgcaatttgtgaaggagactatggtttccaaaagatacatttttttacaaagttaaacctgtaaaaagtctttttttttttccctccagccgtacaccaactgcacttggttgtttcagcagttggtatactattaaattgtccaggccaaataggtttctgtagctgttttagtaatttgaagccaaattctcatgctgtttctcattaaaaagaatgagaatttggtccatagttagctttaagttctctcttcctttctttcccttacagttaagggtttggtgggggatggggaggttgttttcgttttttggatttttttgtcttttggctttaagtatcatattttcttttgcctgtatccaactgcttctttgagtattttcatctagtttaatgtgagtaatagatgctgtgctgtcattgaagtgttcaacattttgttcatttaaacaaaagtgtaattcatacatatatagatacatatcttaattgatttctcaactattttataagtaactggaatttttcattagatcttatacagagaagtattttattaaaaattcaaaagggaagacttttatgtgctcattttgtaatttttgattttaaatatctttacattgtctgccaattaaagtgttttaaacttgcattggaatggactccgaatgtatttttgtggtgttacgttatccgtagatttctagcatgaagttagcctcacgatgctgtgcaaaggattttaaaatatgagagtcactgaaagagtttaaacatctgttcatgttaaatgctctatggattttaattaaagacttgagaatgattttataa

SEQ ID NO: 1047 - DNA, 354 bp, HOMO SAPIENS
  misc_feature (163)..(163): n is a, c, g, or t
  misc_feature (174)..(174): n is a, c, g, or t
  misc_feature (225)..(225): n is a, c, g, or t
gtaggttctcgtcatcaggagcatgacgtacagatttggtgtgagtgcagtcctgctaacctgctgcgggatccgagtacccgctttataggagctttctccaagtacccactttataggagtgggaagcagtgtaggaagtaagtacgaaaagcacttttanaatgctgttanagggctagagacagaactaaccacaatcagggcagtccctgctgtagctcnggcctggcctccccattcttgcctgactcaagacactaacttagttcctggttcggtgccctgttggtgctcctctgtccagtagcttagctcccacggtgggggaggaatcgaaggggctctgcagcc

SEQ ID NO: 1048 - DNA, 249 bp, HOMO SAPIENS
gagccagcgggcagatttcatatactcacacaagcactgatagcctctctctgtccttctttccacccttgttactctcgcacatgtgcatggacgacacgtaggagagtgttacagcattgtaacagcagattattgaaaacacctgcatctgtcataggagactggattaattgtggcacgtttatgcagcagttaactgtcagtggattaaagctacatgtatttacatgaataagtctcccaaac

SEQ ID NO: 1049 - DNA, 1669 bp, HOMO SAPIENS
ctccctcagcaaggacagcagaggaccagctaagagggagagaagcaactacagaccccccctgaaaacaaccctcagacgccacatcccctgacaagctgccaggcaggttctcttcctctcacatactgacccacggctccaccctctctcccctggaaaggacaccatgagcactgaaagcatgatccgggacgtggagctggccgaggaggcgctccccaagaagacaggggggccccagggctccaggcggtgcttgttcctcagcctcttctccttcctgatcgtggcaggcgccaccacgctcttctgcctgctgcactttggagtgatcggcccccagagggaagagttccccagggacctctctctaatcagccctctggcccaggcagtcagatcatcttctcgaaccccgagtgacaagcctgtagcccatgttgtagcaaaccctcaagctgaggggcagctccagtggctgaaccgccgggccaatgccctcctggccaatggcgtggagctgagagataaccagctggtggtgccatcagagggcctgtacctcatctactcccaggtcctcttcaagggccaaggctgcccctccacccatgtgctcctcacccacaccatcagccgcatcgccgtctcctaccagaccaaggtcaacctcctctctgccatcaagagcccctgccagagggagaccccagagggggctgaggccaagccctggtatgagcccatctatctgggaggggtcttccagctggagaagggtgaccgactcagcgctgagatcaatcggcccgactatctcgactttgccgagtctgggcaggtctactttgggatcattgccctgtgaggaggacgaacatccaaccttcccaaacgcctcccctgccccaatccctttattaccccctccttcagacaccctcaacctcttctggctcaaaaagagaattgggggcttagggtcggaacccaagcttagaactttaagcaacaagaccaccacttcgaaacctgggattcaggaatgtgtggcctgcacagtgaagtgctggcaaccactaagaattcaaactggggcctccagaactcactggggcctacagctttgatccctgacatctggaatctggagaccagggagcctttggttctggccagaatgctgcaggacttgagaagacctcacctagaaattgacacaagtggaccttaggccttcctctctccagatgtttccagacttccttgagacacggagcccagccctccccatggagccagctccctctatttatgtttgcacttgtgattatttattatttatttattatttatttatttacagatgaatgtatttatttgggagaccggggtatcctgggggacccaatgtaggagctgccttggctcagacatgttttccgtgaaaacggagctgaacaataggctgttcccatgtagccccctggcctctgtgccttcttttgattatgttttttaaaatatttatctgattaagttgtctaaacaatgctgatttggtgaccaactgtcactcattgctgagcctctgctccccaggggagttgtgtctgtaatcgccctactattcagtggcgagaaataaagtttgcttagaaaagaa

SEQ ID NO: 1050 - DNA, 324 bp, HOMO SAPIENS
ctgggaacagggtccatggatgctgatgttacccagaccccaaggaataggatcacaaagacaggaaagaggattatgctggaatgttctcagactaagggtcatgatagaatgtactggtatcgacaagacccaggactgggcctacggttgatctattactcctttgatgtcaaagatataaacaaaggagagatctctgatggatacagtgtctctcgacaggcacaggctaaattctccctgtccctagagtctgccatccccaaccagacagctctttacttctgtgccaccagtgacccaggacagagcaatcagccc

SEQ ID NO: 1051 - DNA, 5012 bp, HOMO SAPIENS
cgcgcagcatgcccgccagcgccccgccgcgccgcccgcggccgccgccgccgtcgctgtcgctgctgctggtgctgctgggcctgggcggccgccgcctgcgtgcggagccgggcgacggcgcgcagacctgggcccgtttctcgcggcctcctgcccccgaggccgcgggcctcttccagggcaccttccccgacggcttcctctgggccgtgggcagcgccgcctaccagaccgagggcggctggcagcagcacggcaagggtgcgtccatctgggatacgttcacccaccaccccctggcacccccgggagactcccggaacgccagtctgccgttgggcgccccgtcgccgctgcagcccgccaccggggacgtagccagcgacagctacaacaacgtcttccgcgacacggaggcgctgcgcgagctcggggtcactcactaccgcttctccatctcgtgggcgcgagtgctccccaatggcagcgcgggcgtccccaaccgcgaggggctgcgctactaccggcgcctgctggagcggctgcgggagctgggcgtgcagcccgtggtcaccctgtaccactgggacctgccccagcgcctgcaggacgcctacggcggctgggccaaccgcgccctggccgaccacttcagggattacgcggagctctgcttccgccacttcggcggtcaggtcaagtactggatcaccatcgacaacccctacgtggtggcctggcacggctacgccaccgggcgcctggcccccggcatccggggcagcccgcggctcgggtacctggtggcgcacaacctcctcctggctcatgccaaagtctggcatctctacaatacttctttccgtcccactcagggaggtcaggtgtccattgccctaagctctcactggatcaatcctcgaagaatgaccgaccacagcatcaaagaatgtcaaaaatctctggactttgtactaggttggtttgccaaacccgtatttattgatggtgactatcccgagagcatgaagaataacctttcatctattctgcctgattttactgaatctgagaaaaagttcatcaaaggaactgctgacttttttgctctttgctttggacccaccttgagttttcaacttttggaccctcacatgaagttccgccaattggaatctcccaacctgaggcaactgctttcctggattgaccttgaatttaaccatcctcaaatatttattgtggaaaatggctggtttgtctcagggaccaccaagagagatgatgccaaatatatgtattacctcaaaaagttcatcatggaaaccttaaaagccatcaagctggatggggtggatgtcatcgggtataccgcatggtccctcatggatggtttcgagtggcacagaggttacagcatcaggcgtggactcttctatgttgactttctaagccaggacaagatgttgttgccaaagtcttcagccttgttctaccaaaagctgatagagaaaaatggcttccctcctttacctgaaaatcagcccctagaagggacatttccctgtgactttgcttggggagttgttgacaactacattcaagtagataccactctgtctcagtttaccgacctgaatgtttacctgtgggatgtccaccacagtaaaaggcttattaaagtggatggggttgtgaccaagaagaggaaatcctactgtgttgactttgctgccatccagccccagatcgctttactccaggaaatgcacgttacacattttcgcttctccctggactgggccctgattctccctctgggtaaccagtcccaggtgaaccacaccatcctgcagtactatcgctgcatggccagcgagcttgtccgtgtcaacatcaccccagtggtggccctgtggcagcctatggccccgaaccaaggactgccgcgcctcctggccaggcagggcgcctgggagaacccctacactgccctggcctttgcagagtatgcccgactgtgctttcaagagctcggccatcacgtcaagctttggataacgatgaatgagccgtatacaaggaatatgacatacagtgctggccacaaccttctgaaggcccatgccctggcttggcatgtgtacaatgaaaagtttaggcatgctcagaatgggaaaatatccatagccttgcaggctgattggatagaacctgcctgccctttctcccaaaaggacaaagaggtggctgagagagttttggaatttgacattggctggctggctgagcccattttcggctctggagattatccatgggtgatgagggactggctgaaccaaagaaacaattttcttcttccttatttcactgaagatgaaaaaaagctaatccagggtacctttgactttttggctttaagccattataccaccatccttgtagactcagaaaaagaagatccaataaaatacaatgattacctagaagtgcaagaaatgaccgacatcacgtggctcaactcccccagtcaggtggcggtagtgccctgggggttgcgcaaagtgctgaactggctgaagttcaagtacggagacctccccatgtacataatatccaatggaatcgatgacgggctgcatgctgaggacgaccagctgagggtgtattatatgcagaattacataaacgaagctctcaaagcccacatactggatggtatcaatctttgcggatactttgcttattcgtttaacgaccgcacagctccgaggtttggcctctatcgttatgctgcagatcagtttgagcccaaggcatccatgaaacattacaggaaaattattgacagcaatggtttcccgggcccagaaactctggaaagattttgtccagaagaattcaccgtgtgtactgagtgcagtttttttcacacccgaaagtctttactggctttcatagcttttctattttttgcttctattatttctctctcccttatattttactactcgaagaaaggcagaagaagttacaaatagttctgaacatttttctattcattcattttgaaataattatgcagacacatcagctgttaaccatttgcacctctaagtgttgtgaaactgtaaatttcatacatttgacttctagaaaacatttttgtggcttatgacagaggttttgaaatgggcataggtgatcgtaaaatattgaataatgcgaatagtgcctgaatttgttctctttttgggtgattaaaaaactgacaggcactataatttctgtaacacactaacaaaagcatgaaaaataggaaccacaccaatgcaacatttgtgcagaaatttgaatgacaagattaggaatattttcttctgcacccacttctaaatttaatgtttttctggaagtagtaattgcaagagttcgaatagaaagttatgtaccaagtaaccatttctcagctgccataataatgcctagtggcttcccctctgtcaaatctagtttcctatggaaaagaagatggcagatacaggagagacgacagagggtcctaggctggaatgttcctttcgaaagcaatgcttctatcaaatactagtattaatttatgtatctggttaatgacatacttggagagcaaattatggaaatgtgtattttatatgatttttgaggtcctgtctaaaccctgtgtccctgagggatctgtctcactggcatcttgttgagggccttgcacataggaaacttttgataagtatctgcggaaaaacaaacatgaatcctgtgatattgggctcttcaggaagcataaagcaattgtgaaatacagtataccgcagtggctctaggtggaggaaaggaggaaaaagtgcttattatgtgcaacattatgattaatctgattatacaccatttttgagcagatcttggaatgaatgacatgacctttccctagagaataaggatgaaataatcactcattctatgaacagtgacactactttctattctttagctgtactgtaatttctttgagttgatagttttacaaattcttaataggttcaaaagcaatctggtctgaataacactggatttgtttctgtgatctctgaggtctattttatgtttttgctgctacttctgtggaagtagctttgaactagttttactttgaactttcacgctgaaacatgctagtgatatctagaaagggctaattaggtctcatcctttaatgccccttaaataagtcttgctgattttcagacagggaagtctctctattacactggagctgttttatagataagtcaatattgtatcaggcaagataaaccaatgtcataacaggcattgccaacctcactgacacagggtcatagtgtataataatatactgtactatataatatatcatctttagaggtatgattttttcatgaaagataagcttttggtaatattcattttaaagtggacttattaaaattggatgctagagaatcaagtttattttatgtatatatttttctgattataagagtaatatatgttcattgtaaaaatttttaaaacacagaaactatatgcaaagaaaaaataaaaattatctataatctcagaacccagaaatagccactattaacatttcctacgtattttattttacatagatcatattgtatatagttagtatctttattaatttttattatgaaactttcctttgtcattattagtcttcaaaagcatgatttttaatagttgttgagtattccaccacaggaatgtatcacaacttaaccgttcccgtttgttagactagtttcttattaatgttgatgaatgttgtttaaaaataattttgttgctacatttactttaatttccttgactgtaaagagaagtaattttgctccttgataaagtattatattaataataaatctgcctgcaactttttgccttctttcataatcataaaaaaa

SEQ ID NO: 1052 - DNA, 4953 bp, HOMO SAPIENS
ggtttccggagctgcggcggcgcagactgggagggggagccgggggttccgacgtcgcagccgagggaacaagccccaaccggatcctggacaggcaccccggcttggcgctgtctctccccctcggctcggagaggcccttcggcctgagggagcctcgccgcccgtccccggcacacgcgcagccccggcctctcggcctctgccggagaaacaggatggcccaatggaatcagctacagcagcttgacacacggtacctggagcagctccatcagctctacagtgacagcttcccaatggagctgcggcagtttctggccccttggattgagagtcaagattgggcatatgcggccagcaaagaatcacatgccactttggtgtttcataatctcctgggagagattgaccagcagtatagccgcttcctgcaagagtcgaatgttctctatcagcacaatctacgaagaatcaagcagtttcttcagagcaggtatcttgagaagccaatggagattgcccggattgtggcccggtgcctgtgggaagaatcacgccttctacagactgcagccactgcggcccagcaagggggccaggccaaccaccccacagcagccgtggtgacggagaagcagcagatgctggagcagcaccttcaggatgtccggaagagagtgcaggatctagaacagaaaatgaaagtggtagagaatctccaggatgactttgatttcaactataaaaccctcaagagtcaaggagacatgcaagatctgaatggaaacaaccagtcagtgaccaggcagaagatgcagcagctggaacagatgctcactgcgctggaccagatgcggagaagcatcgtgagtgagctggcggggcttttgtcagcgatggagtacgtgcagaaaactctcacggacgaggagctggctgactggaagaggcggcaacagattgcctgcattggaggcccgcccaacatctgcctagatcggctagaaaactggataacgtcattagcagaatctcaacttcagacccgtcaacaaattaagaaactggaggagttgcagcaaaaagtttcctacaaaggggaccccattgtacagcaccggccgatgctggaggagagaatcgtggagctgtttagaaacttaatgaaaagtgcctttgtggtggagcggcagccctgcatgcccatgcatcctgaccggcccctcgtcatcaagaccggcgtccagttcactactaaagtcaggttgctggtcaaattccctgagttgaattatcagcttaaaattaaagtgtgcattgacaaagactctggggacgttgcagctctcagaggatcccggaaatttaacattctgggcacaaacacaaaagtgatgaacatggaagaatccaacaacggcagcctctctgcagaattcaaacacttgaccctgagggagcagagatgtgggaatgggggccgagccaattgtgatgcttccctgattgtgactgaggagctgcacctgatcacctttgagaccgaggtgtatcaccaaggcctcaagattgacctagagacccactccttgccagttgtggtgatctccaacatctgtcagatgccaaatgcctgggcgtccatcctgtggtacaacatgctgaccaacaatcccaagaatgtaaacttttttaccaagcccccaattggaacctgggatcaagtggccgaggtcctgagctggcagttctcctccaccaccaagcgaggactgagcatcgagcagctgactacactggcagagaaactcttgggacctggtgtgaattattcagggtgtcagatcacatgggctaaattttgcaaagaaaacatggctggcaagggcttctccttctgggtctggctggacaatatcattgaccttgtgaaaaagtacatcctggccctttggaacgaagggtacatcatgggctttatcagtaaggagcgggagcgggccatcttgagcactaagcctccaggcaccttcctgctaagattcagtgaaagcagcaaagaaggaggcgtcactttcacttgggtggagaaggacatcagcggtaagacccagatccagtccgtggaaccatacacaaagcagcagctgaacaacatgtcatttgctgaaatcatcatgggctataagatcatggatgctaccaatatcctggtgtctccactggtctatctctatcctgacattcccaaggaggaggcattcggaaagtattgtcggccagagagccaggagcatcctgaagctgacccaggcgctgccccatacctgaagaccaagtttatctgtgtgacaccaacgacctgcagcaataccattgacctgccgatgtccccccgcactttagattcattgatgcagtttggaaataatggtgaaggtgctgaaccctcagcaggagggcagtttgagtccctcacctttgacatggagttgacctcggagtgcgctacctcccccatgtgaggagctgagaacggaagctgcagaaagatacgactgaggcgcctacctgcattctgccacccctcacacagccaaaccccagatcatctgaaactactaactttgtggttccagattttttttaatctcctacttctgctatctttgagcaatctgggcacttttaaaaatagagaaatgagtgaatgtgggtgatctgcttttatctaaatgcaaataaggatgtgttctctgagacccatgatcaggggatgtggcggggggtggctagagggagaaaaaggaaatgtcttgtgttgttttgttcccctgccctcctttctcagcagctttttgttattgttgttgttgttcttagacaagtgcctcctggtgcctgcggcatccttctgcctgtttctgtaagcaaatgccacaggccacctatagctacatactcctggcattgcactttttaaccttgctgacatccaaatagaagataggactatctaagccctaggtttctttttaaattaagaaataataacaattaaagggcaaaaaacactgtatcagcatagcctttctgtatttaagaaacttaagcagccgggcatggtggctcacgcctgtaatcccagcactttgggaggccgaggcggatcataaggtcaggagatcaagaccatcctggctaacacggtgaaaccccgtctctactaaaagtacaaaaaattagctgggtgtggtggtgggcgcctgtagtcccagctactcgggaggctgaggcaggagaatcgcttgaacctgagaggcggaggttgcagtgagccaaaattgcaccactgcacactgcactccatcctgggcgacagtctgagactctgtctcaaaaaaaaaaaaaaaaaaaagaaacttcagttaacagcctccttggtgctttaagcattcagcttccttcaggctggtaatttatataatccctgaaacgggcttcaggtcaaacccttaagacatctgaagctgcaacctggcctttggtgttgaaataggaaggtttaaggagaatctaagcattttagacttttttttataaatagacttattttcctttgtaatgtattggccttttagtgagtaaggctgggcagagggtgcttacaaccttgactccctttctccctggacttgatctgctgtttcagaggctaggttgtttctgtgggtgccttatcagggctgggatacttctgattctggcttccttcctgccccaccctcccgaccccagtccccctgatcctgctagaggcatgtctccttgcgtgtctaaaggtccctcatcctgtttgttttaggaatcctggtctcaggacctcatggaagaagagggggagagagttacaggttggacatgatgcacactatggggccccagcgacgtgtctggttgagctcagggaatatggttcttagccagtttcttggtgatatccagtggcacttgtaatggcgtcttcattcagttcatgcagggcaaaggcttactgataaacttgagtctgccctcgtatgagggtgtatacctggcctccctctgaggctggtgactcctccctgctggggccccacaggtgaggcagaacagctagagggcctccccgcctgcccgccttggctggctagctcgcctctcctgtgcgtatgggaacacctagcacgtgctggatgggctgcctctgactcagaggcatggccggatttggcaactcaaaaccaccttgcctcagctgatcagagtttctgtggaattctgtttgttaaatcaaattagctggtctctgaattaagggggagacgaccttctctaagatgaacagggttcgccccagtcctcctgcctggagacagttgatgtgtcatgcagagctcttacttctccagcaacactcttcagtacataataagcttaactgataaacagaatatttagaaaggtgagacttgggcttaccattgggtttaaatcatagggacctagggcgagggttcagggcttctctggagcagatattgtcaagttcatggccttaggtagcatgtatctggtcttaactctgattgtagcaaaagttctgagaggagctgagccctgttgtggcccattaaagaacagggtcctcaggccctgcccgcttcctgtccactgccccctccccatccccagcccagccgagggaatcccgtgggttgcttacctacctataaggtggtttataagctgctgtcctggccactgcattcaaattccaatgtgtacttcatagtgtaaaaatttatattattgtgaggttttttgtcttttttttttttttttttttttggtatattgctgtatctactttaacttccagaaataaacgttatataggaaccgtaaaaa

SEQ ID NO: 1053 - DNA, 275 bp, HOMO SAPIENS
  misc_feature (43)..(43): n is a, c, g, or t
gactaggaaagagcaaagggtttggaatcaaaagtcccaactnccccaccttcttaatagtgtgtgaatctgagtgccttattaaccttccctggtcccagtttcgtatctgtaaagttagaatagcaatcctgtttaatttgcttctctcaccagggatcagaaggccaaatgagatgatgtatgtaaaattgtaaagtcctccacagatggcacttgccacattacagagaacttgagaccccccccccaccaataacgttccaaatcttcca

SEQ ID NO: 1054 - DNA, 1038 bp, HOMO SAPIENS
atgacgcgcggccgcgcctgggggatgcggcgggcggcggcgggggcgggcggagcgcgggcggcggggccaactgggggcgcctctcgcctgcaccccaatgcgggacgcaggagcggtgcgcgggccggggctcaggggtgcggcgggcccagggtgggctcggcggactcgcgggccctccccgcgcagcccctggcctgtgcccgcggccggagccagcggctcgtctgtgacccgaaggccgcgagtgccttgcccgacttggcccctgacgtcttcgtcctgcgggtgcggctggaggagacgggggagatgttccgagtggcaaactgccgcggcgacatgaccgtgcgggagctcaaagaggagctggacctgatggtcggcatccccttcaacctccagcggctccagtacctcgacgaaggagttttgatggatgacactaccctgaagttccatgatgttgttcctggagggattatttcattatgtatctggcatcatgacggatggacagaacttgttttggcggctgtggaaggggatcccagcaagctatcttgtctcgggcttactgaagattccttctaccgaaccgcaaattcagaacattttgagggtgagaagtggaagcactggacgtctcagagggcgtttgtggcgttgtatgtggcctcacacagaggccactttgatgctgtgcagtaccttctagaacacggagccagctgcctcagcagatcccccctgggcaggacacccctgcatgtggctgcagctatgggccggtcagactgtataatcctcctgctccagcacggggcctccatccacgacagagatgccaagggggagacccccatctccattgcacaccgcctgaaccacacactgagcgagaggcagatggtcctcctccaccggatagcaaagtcggggataagggatctgaatgacttggtcatgaagaatgctttgcagagggtcaagtctgggtttaggtctgagaagatgacgatgacccctcattag

SEQ ID NO: 1055 - DNA, 753 bp, HOMO SAPIENS
ctctttctcagtgaccgggtggtttgcttaggcgcagacggggaagcggagccaacatgccagtggcccggagctgggtttgtcgcaaaacttatgtgaccccgcggagacccttcgagaaatctcgtctcgaccaagagctgaagctgatcggcgagtatgggctccggaacaaacgtgaggtctggagggtcaaatttaccctggccaagatccgcaaggccgcccgggaactgctgacgcttgatgagaaggacccacggcgtctgttcgaaggcaacgccctgctgcggcggctggtccgcattggggtgctggatgagggcaagatgaagctggattacatcctgggcctgaagatagaggatttcttagagagacgcctgcagacccaggtcttcaagctgggcttggccaagtccatccaccacgctcgcgtgctgatccgccagcgccatatcagggtccgcaagcaggtggtgaacatcccgtccttcattgtccgcctggattcccagaagcacatcgacttctctctgcgctctccctacgggggtggccgcccgggccgcgtgaagaggaagaatgccaagaagggccagggtggggctggggctggagacgacgaggaggaggattaagtccacctgtccctcctgggctgctggattgtctcgttttcctgccaaataaacaggatcagcgctttacaaaaaaaaaaaaaaaaaaaaaaaaaaaaaaaaaaaaaaaaaa

SEQ ID NO: 1056 - DNA, 1713 bp, HOMO SAPIENS
cagcagtccggacccaggcgcgcccctcccgccccagcccaccccggcctgccgcccgggaggggaacatgccgcgctccttcctggtgaaaacgcactccagccacagggtccccaactaccggcggctggagacgcagagagaaatcaatggtgcctgctctgcctgtggggggctggtggtgcccctcctcccccgagacaaggaggccccttctgtgcccggtgaccttccccagccctgggaccgctcctcggccgtcgcctgcatctccctgcccctcctgccacggatcgaggaagctctgggggcctctgggctggacgccttggaagtcagcgaggtcgaccctcgggccagccgggccgccattgtacccctcaaagacagcctgaaccacctcaacctgcccccactgctggtgctgcccacacggtggtccccgaccttgggcccagaccggcacggggctccggaaaaactgcttggggctgagcggatgccccgagccccgggcggctttgagtgcttccactgccacaaaccctaccacacgctggccgggctggccaggcaccggcagctgcactgccacctgcaggtggggcgtgtcttcacctgcaagtactgcgacaaggagtacaccagcctgggtgccctcaagatgcacatccgcactcacacgctgccctgcacctgcaagatctgtggcaaggccttctccaggccctggttactgcagggccatgtccgcacccacacaggggagaagccctatgcctgctcgcactgcagcagggcctttgccgaccgctccaaccttcgggcccatctgcaaacgcactcagacgccaagaagtaccggtgccggcgctgcaccaagaccttctcccgcatgtccctcctggcgcggcatgaggagtctggctgctgcccgggcccctgagaggcacgtggtcggcgcaggtaggagggatggtcctcaccgggagagctggcgtccctcctgcccccagaggagccaggagtctgggagggcggggcctggcctcacacttggtgcgtcctccacatctgcgtccaatcagaaccaaagaagtccagcgggggccactgggccggaggacactcccccaggcatcccaccgcgcggagcccactcagaggagactcctctcccggggaaggctttcatcagaacaagagccatggttccatttcgacacggccaggtctccggggctacccttccaagagtcagagcctcggggaggtggccgccagcatgggccggcactgccgccggatggctggcaaggctgcctagttccattgcagcagaaatgaacagttctgacttatagtgagcaccgccctgtggcccttcctcagtaggcacaactacctctcagccagcccccgccagcctttggtttggggtctgggacgagctgccccatgtcacacgtctatgtgcatgtgcacacacactcaaacatgtacacacacgtgccctccccacctcactagactctccgggagatggggcaggactgggagagcccacgattggtgatttgggtgtgttgggatgaggcggagtgcctgtgggatttgtcccggtcagagcctcagggggctggggtctcagggcactcagcttcccaggcaataacagccgtggggtaataaatggtctctgcacacctgca

SEQ ID NO: 1057 - DNA, 6846 bp, HOMO SAPIENS
ctcgcgccaggcgagtctccgcgtctccctcgcgaactcggtgaaaggaattggcgccgttcgacaccaggcggatccgctctgcagcacgaacccatctccagccgcagccgcagccgccgcccgggccgaggagcagccgcagcagccgccaccagtggccgagtgagcggagccgagtttgaggcagcgcctagcggtgaatcggggccctcaccatgagttcctcgcctgttaatgtaaaaaagctgaaggtgtcggagctgaaagaggagctcaagaagcgacgcctttctgacaagggtctcaaggccgagctcatggagcgactccaggctgcgctggacgacgaggaggccgggggccgccccgccatggagcccgggaacggcagcctagacctgggcggggattccgctgggcgctcgggagcaggcctcgagcaggaggccgcggccggcggcgatgaagaggaggaggaagaggaagaggaggaggaaggaatctccgctctggacggcgaccagatggagctaggagaggagaacggggccgcgggggcggccgactcgggcccgatggaggaggaggaggccgcctcggaagacgagaacggcgacgatcagggtttccaggaaggggaagatgagctcggggacgaagaggaaggcgcgggcgacgagaacgggcacggggagcagcagcctcaaccgccggcgacgcagcagcaacagccccaacagcagcgcggggccgccaaggaggccgcggggaagagcagcggccccacctcgctgttcgcggtgacggtggcgccgcccggggcgaggcagggccagcagcaggcgggaggtaagaagaaggcggaaggcggcggaggcggcggtcgccccggggctccggcggcgggggacggcaaaacagaacagaaaggcggagataaaaagaggggtgttaaaagaccacgagaagatcatggccgtggatattttgagtacattgaagagaacaagtatagcagagccaaatctcctcagccacctgttgaagaagaagatgaacacttcgatgacacagtggtttgtcttgatacttataattgtgatctacattttaaaatatcaagagatcgtctcagtgcttcttcccttacaatggagagttttgcttttctttgggctggaggaagagcatcctatggtgtgtcaaaaggcaaagtgtgttttgagatgaaggttacagagaagatcccagtaaggcatttatatacaaaagatattgacatacatgaagttcgtattggctggtcactaactacaagtggaatgttacttggtgaagaagaattttcttatgggtattctctaaaaggaataaaaacatgcaactgtgagactgaagattatggagaaaagtttgatgaaaatgatgtgattacatgttttgctaactttgaaagtgatgaagtagaactctcgtatgctaagaatggacaagatcttggcgttgccttcaaaatcagtaaggaagttcttgctggacggccactgttcccgcatgttctctgccacaactgtgcagttgaatttaattttggtcagaaggaaaagccatattttccaatacctgaagagtatactttcatccagaacgtccccttagaggatcgagttagaggaccaaaggggcctgaagagaagaaagattgtgaagttgtgatgatgattggcttgccaggagctggaaaaactacctgggttactaaacatgcagcagaaaatccagggaaatataacattcttggcacaaatactattatggataagatgatggtggcaggttttaagaagcaaatggcagatactggaaaactgaacacactgttgcagagagccccccagtgtcttgggaaatttattgagattgctgcccgaaagaagcgaaattttattctggatcagacaaatgtgtctgctgctgcccagaggagaaaaatgtgcctgtttgcaggcttccagcgaaaagctgttgtagtttgcccaaaagatgaagactataagcaaagaacacagaagaaagcagaagtagaggggaaagacctaccagaacatgcggtcctcaaaatgaaaggaaactttaccctcccagaggtagctgagtgctttgatgaaataacctatgttgaacttcagaaggaagaagcccaaaaactcttggagcaatataaggaagaaagcaaaaaggctcttccaccagaaaagaaacagaacactggctcaaagaaaagcaataaaaataagagtggcaagaaccagtttaacagaggtggtggccatagaggacgtggaggattcaatatgcgtggtggaaatttcagaggaggagcccctgggaatcgtggcggatataataggaggggcaacatgccacagagaggtggtggcggtggaggaagtggtggaatcggctatccataccctcgtgcccctgtttttcctggccgtggtagttactcaaacagagggaactacaacagaggtggaatgcccaacagagggaactacaaccagaacttcagaggacgaggaaacaatcgtggctacaaaaatcaatctcagggctacaaccagtggcagcagggtcaattctggggtcagaagccatggagtcagcattatcaccaaggatattattgaatacccaaataaaacgaactgatacatatttctccaaaaccttcacaagaagtcgactgttttctttagtaggctaactttttaaacattccacaagaggaagtgcctgcgggttccttttttagaagctttgtgggttgattttttttcttttcttttttgtacatttttaattgcagtttaaaagtgaatcgtaagagaacctcagcattgtgcacgataagagaatgtgtcagtatttcagggttctacattttatctgtaaaatgtgacttttttttttttttatcacaacagaagtaaaatgttgctttgtacctggtgtcttttattaagaatttactccccccatttctcacagagaataacagtcgggagtcattgtcacaatataatagaaatgttagcaaccagattcatgtaaggactaagtggtcctcatgaattgcattaagactctgtactgctcatattacactccatcctctctgtagtttgctgggtagtggagggggtaagctaaatcatagtttctgacaataactgggaaggttttttcttaaaataacaatggaattggtataattgggattgaaaactaaaacttggaactaagatagagaagatggagtgtatgtagaagggctgttaaaaatgtaaaacttggttgcattatttgtggaggctcaaacttgtgaaggttaataccataatttttccatttgttctgcattttgattctgaaaagaaagctggctttgcccatttcttattaaaaaaacttgttgtaaatccagttgtctaatgggatctatatgaagttagccatgtctgtatgcccttctcccacaaaatactgtataactagtgtgcttgtagtagttaactccaccatctttgtaagctaatgaaattgtgagtcacccatttatatcttaatttttaatcatgtcagttcttgaatgggtatctccttagcctgctgatttctttttctttctaaagaaagtgggtggagaaattaatttagacgtttgtttgcaataaaaagaattcattttactcttgttttgggattctcgccatcaaggttcaaaatccctttatataactcccaagaggagaaatttattaagtgtgtgctttctggacagcttattctttactctgcatagaacatttaggttttaaaaacttaaatgtatactgacaattgatacataattatgaagtaaagttgaattcttcccttcccctcccccccagacaacttttaacatatttaatgaggggaaaaggtactggctgggagaagttaacactgagtttatcatctttacagaatgctaatgctgtcctcaactgattattttatatacatatatatgatacatgaaactctgggatcagatgcttttagaagccatcatgcaagccagtcattgatgtcactgctacacaacactgctaacttgactgtagctatgtaataacattagatcccctaattgtaattatattgggtttgcacagaacactttaatcttcccctcaccaatgtgaagtgaggaatcaggagtcaaactgtagaactaaaatttgacttcagtctagcgtttccttggtgtttttaggttgctttggtaagtttaggtttgctatatttctgattgcttagaattttgttttagccctttaaaatcagatcataaatatgaattcatacttctaaggaattttcttgctataagctggagtttaggtgatgtataggttcagttgagacatttttggaacaggcaaatccttagttaacataagatatttaacagttgaagatagtgtcatggatttttatcttttttagcaagtaatgctaagaaccactggcctgagctactactcttcagtatacattattaggattgcatagacttactagaggaacagtttcaggttttgatgctaatcagtgttgtgtcctaaagttgtcctttgtgcctttaaaaagttttggatatatcttctagtttaaaattgcttattaaggaattcattttataattgcagtgggaaagtaatggtcaagtaacactaggtagactatcatgcctgtttagcccagagaatttggggggagagagaatagataaaaatggcacccagaaaaatgttaaaatctttagtcaagactagaattaatacaattgtctacacttgtatggcagaaataaccttataaagtgtttaaggaattcagagaagggaatgtaccaaataagcaacagggagaaaattaggtaagaagtaagatacgaacgagaaacctgatttattgctcatccttcccttgcctccctaatggcaagcaaaactctgaacatctgaaaaggatgtagttctggacaaatcctgactacccagaggaaactcactgtgagattgctgttgatttgaagggtgctttcactaaggttatattttaaagtagaataacacatgctgagtgtaaactggctttggattggtcagctgcagtagtacaaaaacagcatagaatttgagaaaactaaaactgctatgagatagctatgagaaaactaaaactgctatgagatagaaatgatgtaaaattatgtggaaagttttccctcatatactcacatacagcctttgaagggctctggctctgaccggttgatggccttgagcgagatgaaatcatgaaattgagtcaaatcaatttgacattgaaatgacaagaggaaactcttaaatacataaaaacaagctctcatttgcctaggatagatactgtcttaaaaataaagactgaacctagatgttctgagcactagcaacaaggtattttaacaagtttaaaggaattctctgaaaaagttataaaattattctaggaaacataaccataatagtgttttaagggactttcacctggggattttatattcatgaacagagtgtattctgtatttaaaatgtctcatttgtgggaattggatgacatgttttttgataaatttattcacaatataaattgactttttattctaggaccatgtgaataatgggttccattgcacaaatacaaatattttaatagcttcttaggcagtggtgtagacatcttggatataaataattgtagatcttgtatatttgatttttaaaaaactagaataaacagagaggcataaacatatcttagagtccaagtggtagtgtttagcattggatataataaatggatgttttacaaagtgtttccataattctcttcctatacataaatgtcttgttttcaaaagtggatggaacttggctgggtgtggtggctcacgcctgtaatcctagcactttgggaggccaaggcgggaggatcacttgagctcaggagtttgagaccatcctgggcaacatagtgagacctggtctcttgaaaaaaaaaaagtggatggaacttgtagcagagaattttatctacttctcaacctgcttcagaatacccatttgagatgttcccctggaaagatgaacacaatactgcatctgaagccatttcttcccacctaacattcttaaaatgattagagtctaaactttgtcattcattcctaattctggagctctgaggttgaggtgttcagagtttggtgaataattgggtttaagttttaacattttagtaataataaaagcaaacacatacatgttaaggcctgacaataggttgcaatacccatgcattgggactcatacccagcataaatggtgagggactgaacattagtgctttgagcaagaattggttaactacctgagatctctaaaacagtaatttgaattactaatacataaaccacaagtctcttcgaattgttaattgcctaaatttaccctaaaacttagttaacgctgcagtgcctttattaaagcttttttttgggggggggtgtgggcacagctactccataactttaaattttaaagcatgaaggtgatctagctagtgttagtgcttgagttggtagttacataggctgctcttgaatcgtcctgttttctttgcctagtattagcaccacaggtacatatttgtaaaataagcattaaaagtactttgtccagc

SEQ ID NO: 1058 - DNA, 794 bp, HOMO SAPIENS
ctctgtcgtggcgcggcttcccgcggtcttctctgcaaatgggctccgtggcctagcgcccccgtccccgccacccgtgatcgtgcgccgaggcccgcgaggggtcgccgcccagatcccaccagccagcaagctaaagcatggcggccatcccctccagcggctcgctcgtggccacccacgactactaccggcgccgcctgggttccacttccagcaacagctcctgcagcagtaccgagtgccccggggaagccattccccaccccccaggtctccccaaggctgacccgggtcattggtgggccagcttctttttcgggaagtccaccctcccgttcatggccacggtgttggagtccgcagagcactcggaacctccccaggcctccagcagcatgaccgcctgtggcctggctcgggacgccccgaggaagcagcccggcggtcagtccagcacagccagcgctgggcccccgtcctgacctgagcggttaccaccagccccaggcctgcggaggcgctagtccaccagagcccctccccgcccctctccccactccgcatccctcgcccccctccccacctcccaccccccaccctgtaaactaggcggctgcagcaagcagaccttcgcatcaacacagcagacaccaaaaaccagtgagagccccgctctctaccgcccggccccagcactcgctagctttcctgacacctggaactgtgcacctggcaccaagcggaaaataaactccaagcagccagtagccccgaaaaaaaaaaaaaaaaaa

SEQ ID NO: 1059 - DNA, 532 bp, HOMO SAPIENS
agcatttttaatatagaaggtcagttgagttgctgcctaggatgcaacctgatcttaatttacaaagtaattaaattattataaaataagtttgcattcatagattaaaaagtacacatttattttattattattataattttttgagatggagtttcgctcttgttgcccaggctggagtgcaatggtgcaatcttggctcactgccacttccacctcctgggttcaagtgattctcctgcctcagcctcccgagtaactgggattagaggcatgcgccaccatgcctggctaattttgtatttttaggagagatggagtttctccatgttggtcaggctggtctcgaactcccgacctcaggtgatctgcccacctcagaatcccaaagtgctaggattacaggtgtgaaccaccacgtcctgctaaaaagtacacatttaaaatctaagttccattttcccgtcatgtttattaatttgtcccattgcaagatatgtttctgttgtctgcatgggtagagataatttta

SEQ ID NO: 1060 - DNA, 2421 bp, HOMO SAPIENS
aacgtccgcgggcgcggggtgtgtcgggtgtcgacggcggcgctttgcggccggtcgtgcgggtcgggcgcgggcgggcgcggcggcagtggcgcgcacaggtgattgactggccagctgcctgaaggagcgccaggtcctccttgctggcaggtggcgaagcccattggggcggcggtgcagaccgcggcggcggctgcggcggtctggctcgggaggcgttcctggggccaaggccatggccccgcggctgcagctggagaaggcggcctggcgctgggcggagacggtgcggcccgaggaggtgtcgcaggagcacatcgagaccgcttaccgcatctggctggagccctgcattcgcggcgtgtgcagacgaaactgcaaaggaaatccgaattgcttggttggtattggtgagcatatttggttaggagaaatagatgaaaatagttttcataacatcgatgatcccaactgtgagaggagaaaaaagaactcatttgtgggcctgactaaccttggagccacttgttatgtcaacacatttcttcaagtgtggtttctcaacttggagcttcggcaggcactctacttatgtccaagcacttgtagtgactacatgctgggagacggcatccaagaagaaaaagattatgagcctcaaacaatttgtgagcatctccagtacttgtttgccttgttgcaaaacagtaataggcgatacattgatccatcaggatttgttaaagccttgggcctggacactggacaacagcaggatgctcaagaattttcaaagctctttatgtctctattggaagatactttgtctaaacaaaagaatccagatgtgcgcaatattgttcaacagcagttctgtggagaatatgcctatgtaactgtttgcaaccagtgtggcagagagtctaagcttttgtcaaaattttatgagctggagttaaatatccaaggccacaaacagttaacagattgtatctcggaatttttgaaggaagaaaaattagaaggagacaatcgctatttttgcgagaactgtcaaagcaaacagaatgcaacaagaaagattcgacttcttagccttccttgcactctgaacttgcagctaatgcgttttgtctttgacaggcaaactggacataagaaaaagctgaatacctacattggcttctcagaaattttggatatggagccttatgtggaacataaaggtgggtcctacgtgtatgaactcagcgcagtcctcatacacagaggagtgagtgcttattctggccactacatcgcccacgtgaaagatccacagtctggtgaatggtataagtttaatgatgaagacatagaaaagatggaggggaagaaattacaactagggattgaggaagatctagcagaaccttctaagtctcagacacgtaaacccaagtgtggcaaaggaactcattgctctcgaaatgcatatatgttggtttatagactgcaaactcaagaaaagcccaacactactgttcaagttccagcctttcttcaagagctggtagatcgggataattccaaatttgaggagtggtgtattgaaatggctgagatgcgtaagcaaagtgtggataaaggaaaagcaaaacacgaagaggttaaggagctgtaccaaaggttacctgctggagctggtctgtaagatattctgggacagcactgttgccattaagtgccttgtttttttatgttcacaaatgtatatgaagaaactttctcaaacttactctttctaataacccactaaagccagcttaaacactctaaaagtactttgtaaaccaacaataacttgatgtgtagcattccatattatttcattacgttgtactcctaaaaatgggaagctgttaataaattataacatttaggtcagcactctgcatccatgagtattgtagatatttatattttgtgagatattaacttgtttaagaaaaatccgattggattactatggaaaaagcaacttgcctgttctgtttctttgcatactttgtgacctaacagttttaacagacattctattatatgaatacagtttttttgatactattagattaacttgaagtttaataccaaatattatgctaagagtagaaaagctttctgctgacccctgatttcttagaaatatcccacataatccagcttatcccttttctgtatatgtttattcaggtttacctgatgtctcaaaatgaaaccaaattaagcctttttaaaggctgatgtgccatttgtattaagttatctttgtcattttaaagacatgaattccccaagcctaattcctacttaaggaagagagacaatttagtccttactttagaaaataaatacttaagcataattgtaaaaaaaaaa

SEQ ID NO: 1061 - DNA, 528 bp, HOMO SAPIENS
  misc_feature (51)..(51): n is a, c, g, or t
  misc_feature (54)..(54): n is a, c, g, or t
  misc_feature (68)..(68): n is a, c, g, or t
  misc_feature (81)..(81): n is a, c, g, or t
  misc_feature (90)..(90): n is a, c, g, or t
  misc_feature (97)..(97): n is a, c, g, or t
  misc_feature (99)..(99): n is a, c, g, or t
  misc_feature (104)..(104): n is a, c, g, or t
  misc_feature (247)..(251): n is a, c, g, or t
  misc_feature (253)..(253): n is a, c, g, or t
  misc_feature (283)..(283): n is a, c, g, or t
  misc_feature (316)..(316): n is a, c, g, or t
  misc_feature (346)..(346): n is a, c, g, or t
  misc_feature (348)..(348): n is a, c, g, or t
  misc_feature (359)..(359): n is a, c, g, or t
  misc_feature (376)..(377): n is a, c, g, or t
  misc_feature (383)..(383): n is a, c, g, or t
  misc_feature (385)..(385): n is a, c, g, or t
  misc_feature (422)..(422): n is a, c, g, or t
gcccccagatgagcaccataattttaatgtcacaataaattagaaaaaaantgnagaaattccaggtngcaaagccagatntgatacaanttttgcntnatgcntttatcattaccttacacttccacctagcctatgtgcctcaacaggatagacatgtgacatttttctttggaaatttgacttagtcttttcaatggtgtccctagtttaacacaacatggaggcaaaatgttttctagaaggnnnnnancttacccagggatgcatttctcttttgctnctctgtttgtttgtgtatgcatgacataatgancctttttagaaaatagatgtttattataanantagcatctggntatcctctaacattttnnattgcntnaaagataaattagtttaattttatataatatattttnacttcttcccaatggtgatggccttcttcaatatttaataaggtaaaattagcatagtattacaataacaattgcgaataatcaaatatgccctaagcagtgtttt

SEQ ID NO: 1062 - DNA, 6405 bp, HOMO SAPIENS; identical to SEQ ID NO: 123

SEQ ID NO: 1063 - DNA, 2001 bp, HOMO SAPIENS
acgcggcggcgtgccagcctagccactctagcgacggcggggaagagtgtgtacgtggtgggggcttcctcggtggcgggcatggaggcttcgcgctgccggctcagtcccagcggcgacagtgtcttccatgaagaaatgatgaagatgcgacaggctaagctggattatcagaggctactacttgagaagaggcaaaggaaaaagcgccttgagccatttatggtgcagcccaatccagaagccaggctacgtcgggcaaagccaagggccagtgatgagcagactcccttggtgaactgtcatactccccacagcaatgtcatcttacatggtattgatggtccagctgctgtcctgaaaccagacgaagttcatgctccatcagtaagctcctctgttgtggaagaagatgctgaaaacaccgtggatactgcttccaagccaggacttcaggagcgtctccaaaagcatgatatctctgaaagtgtgaacttcgatgaggagactgatggaatatcccagtcagcatgtttagaaagacccaattctgcatcaagccagaattcaaccgatacaggcacttccggttctgctactgccgcccaaccagctgataacctcctgggagacatagacgacctggaggactttgtgtatagtcctgcccctcaaggtgtcacagtaagatgtcggataatccgggataaaaggggaatggatcggggtctcttccccacctactatatgtacttggaaaaagaagaaaatcagaagatatttcttcttgcagctagaaagcggaaaaagagcaaaacagccaactaccttatctccattgatccagttgatttatctcgtgaaggagaaagttatgtcggcaagcttagatccaacctcatggggaccaagtttacagtttatgaccgtggcatctgccccatgaagggccggggtttggtaggagcggcccacacccggcaggagctggctgccatctcctatgaaacaaacgtacttggatttaaaggtcctaggaaaatgtctgtgatcattcctggaatgacactgaatcataagcagatcccctatcagccacaaaacaaccatgacagtttgctctcaaggtggcagaacagaactatggaaaatctggttgagctgcacaacaaggcccccgtctggaacagtgacactcagtcctatgtcctcaacttccgtggccgggtcactcaggcgtctgtgaagaacttccagatagtccacaaaaatgaccctgattatatagtcatgcagtttggacgtgtggcagatgacgtgttcacactggattacaactacccactttgtgcagtacaggcctttggcatcggtctttctagctttgacaaatgtatccaaaccttgagaatgcaggagctctgtgagctccaccgtcagcaccattcagctgcatcccttgtgcacagaactgtttgccagcgttgggtgggacacccgtggcggctgctccctcagacctcccttctgtggactgacctctcacctccgcctgttgttcctgcaccacatcagataagcatgtgaaggagggccaactggcagctgcgggacccttggcttgtcccccaccgacaagtcccacctgctgggtgaggacgagactgtttccatctcaggcatgtatcccaccaagtgcctccctcacagccatgcccagaagcctcacacctcgtcaccaccaccaccccccaccccatcctgaggcactgcctggcagataaccctggttggccacagaagctattaatacacgacagcatgtggggaaggacttatggtgggccaggtggacctcatcctgcttcttcctccctctggtttaaagagatatataaactaatttcacataatttgtgtgtgcaggtgattggtttttacataagtcctatttataccttttatatgttacagaaataaaagttaatttatataaaaatg

SEQ ID NO: 1064 - DNA, 7115 bp, HOMO SAPIENS
gcggccgcgggatttggagcggccggggaggcgggggtggccggggccggcttggaggcctggcgccacccttcggggcctgcaaggacccagttgggggggcaggagggggccggaggatggttggttgtgggatttctactttgccttttcctccttatgccgccttagtgaggggcgggagctctggcggcagccccggggtggggagacgagctccggagtcggaagagctgggttttcttccgggcctagccaccagttggcggagtgaccttaggcgagtcactctgtaatttgtctgcgcctcagtttcctcctctgcctatcaatgtgtgtggggttgaaatcgctttgtaaactataaagcgtgggtgtacgtaaaggatggttattgtttataattttttttgagttgtaagaaaacttagcagttccccaatccttgggttttgaacctgggaaccttggattggagttggggatccccaaacttcctgaaattgtgggaatgtgcggtttgggggaatgatgggaatttgtgggaatgtgcgttttaggggaatgatgatccatcgctagcaagttttccaagggggctgtgacccagaagagttaagaatcacaatttcttcatgctacagagaggaaactgaggcctagatgtcatttgggacccttcacaaccattttgaagccctgtttgagtccctgggatatgtgagctgtttctatgcataatggatattcggggttaacaacagtcccctgcttggcttctattctgaatccttttctttcaccatggggtgcctgaagggtggctgatgcatatggtacaatggcacccagtgtaaagcagctacaattaggagtggatgtgttctgtagcatcctatttaaataagcctattttatcctttggcccgtcaactctgttatctgctgcttgtactggtgcctgtacttttctgactctcattgaccatattccacgaccatggttgtcatccattacttgatcctactttacatgtctagtctgtgtggttggtggtgaataggcttctttttacatggtgctgccagcccagctaattaatggtgcacgtggacttttagcaagcgggctcactggaagagactgaacctggcatggaattcctgaagatgtttggggtttttttctttcttaatcgaaagttaacattgtctgaaaagttttgttagaactactgcggaacctcaaaatcagtagatttggaagtgattcaaagctaaactttttccttggccctccttgtgttctaattgcttgcaagtgtaatactaggatgtccaagatgccagtttttgcttctttgttagttgtcagctgcttttatcaaatttcaggccattatccaacaaacactataaaaatgtttgaacaattggatttcaaacattttcgttttgtggagtggtgctcaccaagtggtacagccctaagcaagtgaacacaaacacatttaagtgtattttgtctgattagatgttagccagttatgctatttcattcaaatgtctgaaaaaatcaattgactattcccttttcctaaagggcagagacagataatctcacttccagagaaatgacttggagaaaaaaaagtgttggtctttttgctcttttgtaattaaatccggatgtacctcaaaagacttaagactgtggtgataagatgctttcctcagcagaaaggagggaaaaaaaacaactggaactcaaagcttgaaattctgtggcaaaacatgagatgtccaggattggaggttgaaaagatttcactacagtgttctgcaatagttggagcagataactttcagtgtagccacagccatggactccagatttccagattttcaagacctggacctggaacccgaaagagcttgtcacgatgcggcaggaacactggaggtagatttttttttatttttgaattttgggactgttgaccttgctgtgagaaaagagacaacgactgagcaagcactaccaccagcactgttactgggaattagaagacctgagtttctgtccagaccctcagtgcaaactgaggatgctccatccaaagtgaattatgtcctgtgcctcctgattgctgagtgttcacctggaccttctgactaccttccctgtgctattccatcagcctacagacctggtacctggatttttgcccgagatgattcctaccaccttactactgacgaagacacccattccagtggaccactgtgacccaggaggcattcagccatcatgatgtggcctttacctccactcctgtcttgttctacccagattcagcacagccctttatagtgaagtcagagtcctcaagccaaatagctaaagctgttttatcacaacaaaggcctagtttgttccatgagtgtgcatttcatttcttcagttaaagccttcagagacacacaataaatttggaccaggggattttttagttattaatgctctctgaagaaaggcaacatctttttgagagcagcattggaccacaccccacaatctcaaatgattgaaattcatgaacatctaggatcccgtgaaggtcactggaccctgttttttctacttcaaatcctgtagtagcctactgaatgagaaaacatattctgacccattgggatcaaatcaaaggcacagtgaactcctcatagcatcttctttggaattactcaggaaccagaactttttacacaaatgtaagaaattctaccaaggagtccccttacctaacagcatctcacaaggctgcaccagattccagaaaaggcttctcttgatacatcaaggtagaacctctatgcattttgtgaccgacttattcttagatcattggttttccaaaggctttgtggccatgaagccctttgagtgaaaactgtgcagaagcccagagtaaaagtgaagctgctctggatgaagtagtgaagcaagagtaggggcctgaatcctgctacaactatcttcctttaccaccgtggtgacacctaaggggacttccttacaacaccttgaactcttccgaacacagtttgaaaaccactgccccagacagcaatatgtttgacctgaatggcattccaatcttttctgtacctccactcagcacagttcatgttcagtagatgctgaacattcttagaaatactgtgtgtgaacttagaaaagtgcaagaagacaggcatgtctttgaccccaggaatgatcatttgctgaagatggtgtcaagtgaacctagattaacagccctccactccagatggatatccagtgattcctagaatgggatatagccagagaacaattctatgcaccctacactgacagactcccttaagcaacaccagatgctctactggtacttgaagtacatgactttgaagtcttgaccctccatgaatacctgaattatcagcaagcgggttttgaagctggtgcctcattgaggccatattagagcaacttgtacatttgacctcttgttatcagccatggtactctacttcgtgtgcaagagataactatgaaagccaaattcaaatactggcaacatttcctaaaggggctcaatatctatcattcgtcttcttttccaaactacacatcactgtatgactcaaccagtagcagttatattgccccttggtttttattcagtttaactactgtttccaagataaatgagctaataagctttaaaaaaaaaaaaaaaaaaggctgaattcttttttcttcatcactggcatatctgcctattctccagaattattatgactattcagctcactttaacagttgaacttcaagcgacaatctttgaacaccccttctcatgtgatttaaaatgaaaccatttggaaaagtttcttctagccagtaatagattttttttttaattgctctgccttgtgccgagagatgttcttttaagatgaatcttttgatgtctgataccaccaaatataggtggtagggagagttggaggctggccctttgagcaggccattagcttacttgctgggcatttccgatagcttattgcctacctttttgctggaaacaaactgatttgaaaaacaaaatctatgaagactgcagctaaggattttatcggtagacttaagagcttttgtccttgtggatattttagtggaaccacatcagtctcaatactgtcattttacactgactcagagcagctgacttcattccttgccatgatatatatttaaggcaggcattgtaacagacataaagacaacttatctgtttcagcaggaaggattcagtttatgaactctcagaccagatcatgttgaacaaggagactttgatgtgtgtcatgagaaaactcattctttacttcccagtcaatttaaaggccagctatcctgagctactcgaatgaatgcactggttaaacattggaaatagtttgtttatatccttgtctctctctaggccaattgtgattacatgactcgactctacatctcgtcaaacaaggcctaggtctggttgctgtagactgctcgccctcaacaaataaaatctggttgactagcctccttgtatatacaactattatttgttaagaagaaattatcgtcaattttctactaccttccaattgtcagctctttttttcctctctggtttttcctatactttacagaaaaagacattgatctatactgccattccctctaatcctgccatactcagtcaaaaggaatgacttaagatgaagatgatcatctgctcgagtctaaaatatacattgtatataagaattggtgattagaaaagcaaaaaacctaaaacttaaatctaggagtctgtatactgtctccatgtctccatgcctcagatctcatctaaatctttgaacagcaccattcaaccaatctgaggccttgacttgcttgtaagatgattctcagagatcggctgagttaaaaaagatgacgacttgattaccaaagaaagtagggccaactttgacaaatctggctctgctgaccctgtcactcccagatgtagcatagactcctaaacagaacctcaagtctgattgaggataaggccttctcctgagctgaaagttctttggcagatgagcaagaaactgaaagctgatgtacctgactggctctgtaagatcagaaaactgtatccagaataagccctatggattaacccctgagtacccagagtaaaaactaatttacagaacttccttattgatctgctggttcttccagatcatattctggctattggtatggctggcctttctgaaggtaccctgcttgtctattttcctgactcagctcttgcctgcctttttcacatgttgctgcaattagactcaccgtgaggactacagtcaatttcagtctatcttgtgcccaatacaacaaggatttttaatagtaacaacccacacctcacccactaggactcaatgttcacaacaggaaggaccattgctgcatactccttgaccagcaacttttttgaagatatttttaagtgcagagtaggcctctattcctgtatgtaattgttcattttcagcacctggaacctcatctatcgggtctggaaggaatacagcagttcgaaagccgcgtccatttctctccttcagtagtgcagaaatgagtccgattcaccagtacacacagaactgtaccagttcaacctagcaaaagaagaaaagtttccactgtacttaaaatttacagctgactcaaattgcctcacagaattatttgatgtagaaggctagttgtcttacttcagatcagcaggacagttgggctctcagactcatgaccactgagtttgcttgtgttgaaactgtggtttcatccaacatatgctattggacatgattattattccattcaaatggattacagacttcttgaggacaggacaaacttatctctcatggtgtttttttagaatacttttataaccaaggaagaaaccatgccagctgttaccattcaacttcttaagcagagattaagctttttcatatctgttcttatcctggacatcagtagtttttaattgcccagcatccgttccatcttgtaacaactccctgatgtttcttaaaaccacctcttcctattttcagtctgtggtttggacagtctgacccaaccttgagctttgtgggtgaacatgtaattcagacctcatcaatcagcaaatccatctgaactgtggaggagaagctctctttactgagggtgctttagctttgtaggatgaaaacctcaaactaacagggcctaccatgtagagaatgaagccagtgcaggggaaagcagagccaaaatatggagagacttgaatcctgatgacagcgtttgtgcccctggatccaaccgtgcctgaagctagaatatcccctggacttttcagttatgtgaaccaataaatacccttttttgcttaagttactttgagttgggtttctgttacttgaaattgaatccacactaatatatctaccaacattgagacttgacagatccaagtatttattaagctagaggtcatggtcactgaaattactttccaaagtggaagacaaaatgaaacaggaactgagggaatatttaagatcccacagaagcgtaaaaatgacatggtagaaagtaatagaaaacctaaatgtctgtcattaaaggataggttaaggtgtggttcagccatataggaatatctcgtatctgttaaaatgaataaagtacattcattgtgtatggaaaaatggccatgatacattaggtgaaacaagttattaatagaaaagtgtacagtgtgaactcattttaaaatgtgtgtgcttatgtttataaatgcatagaaaggtctattcacagctttctttgaacagtgtagatcacatgaaactttcaactttatacatttctgtattaatattttacactacccacattatttttaaactttattttaaataaagaatttttaaaattaaaaaaaaaaaaa

SEQ ID NO: 1065 - DNA, 3660 bp, HOMO SAPIENS; identical to SEQ ID NO: 741

SEQ ID NO: 1066 - DNA, 3801 bp, HOMO SAPIENS
ctcctcttgccacgaggtcagacggcgagttcttagagaaaaaggctgcttagctgctgcttatcatgtaacctcaaaaggaaactgatcgtctttctcatgctgtcacgtacttgggttattatcgctgattacagctggaaacaattgatttgctcttacgtatttgtgtgacttgactcttcaaacacaaaggttaacaggaagatctcgagggccctggctgaacttcaccttttggctttcttggcctgatgctgaactctcgaggttgagccccatatgggggttggcaggcagcagagaggcccctttcaaggtgttcgggtaaagaactcagtgaaggaactcctgttgcacatccgaagtcataaacagaaggcttctggccaagctgtggatgattttaagacacaaggtgtgaacatagaacagttcagagaattgaagaacacagtatcatacagtgggaaaaggaaagggcccgattcgttgtctgatggacctgcttgcaaaaggccagctctgttgcattcccaatttttgacaccacctcaaacaccaacgcccggggagagcatggaagatgttcatctcaatgaacccaaacaggagagcagtgctgatctgcttcagaacattatcaacattaagaatgaatgcagccccgtttccctgaacacagttcaagttagctggctgaaccccgtggtggtccctcagagctcccccgcagagcagtgtcaggacttccatggagggcaggtcttttctccacctcagaaatgccaaccattccaagtcaggggctcccaacaaatgatagaccaggcttccctgtaccagtattctccacagaaccagcatgtagagcagcagccacactacacccacaaaccaactctggaatacagtccttttcccatacctccccagtcccccgcttatgaaccaaacctctttgatggtccagaatcacagttttgcccaaaccaaagcttagtttcccttcttggtgatcaaagggaatctgagaatattgctaatcccatgcagacttcctccagtgttcagcagcaaaatgatgctcacttgcacagcttcagcatgatgcccagcagcgcctgtgaggccatggtggggcacgagatggcctctgactcttcaaacacttcactgccattctcaaacatgggaaatccaatgaacaccacacagttagggaaatcactttttcagtggcaggtggagcaggaagaaagcaaattggcaaatatttcccaagaccagtttctttcaaaggatgcagatggtgacacgttccttcatattgctgttgcccaagggagaagggcactttcctatgttcttgcaagaaagatgaatgcacttcacatgctggatattaaagagcacaatggacagagtgcctttcaggtggcagtggctgccaatcagcatctcattgtgcaggatctggtgaacatcggggcacaggtgaacaccacagactgctggggaagaacacctctgcatgtgtgtgctgagaagggccactcccaggtgcttcaggcgattcagaagggagcagtgggaagtaatcagtttgtggatcttgaggcaactaactatgatggcctgactccccttcactgtgcagtcatagcccacaatgctgtggtccatgaactccagagaaatcaacagcctcattcacctgaagttcaggagcttttactgaagaataagagtctggttgataccattaagtgcctaattcaaatgggagcagcggtggaagcgaaggatcgcaaaagtggccgcacagccctgcatttggcagctgaagaagcaaatctggaactcattcgcctctttttggagctgcccagttgcctgtcttttgtgaatgcaaaggcttacaatggcaacactgccctccatgttgctgccagcttgcagtatcggttgacacaattagatgctgtccgcctgttgatgaggaagggagcagacccaagtactcggaacttggagaacgaacagccagtgcatttggttcccgatggccctgtgggagaacagatccgacgtatcctgaagggaaagtccattcagcagagagctccaccgtattagctccattagcttggagcctggctagcaacactcactgtcagttaggcagtcctgatgtatctgtacatagaccatttgccttatattggcaaatgtaagttgtttctatgaaacaaacatatttagttcactattatatagtgggttatattaaaagaaaagaagaaaaatatctaatttctcttggcagatttgcatatttcatacccaggtatctgggatctagacatctgaatttgatctcaatggtaacattgccttcaattaacagtagcttttgagtaggaaaggactttgatttgtggcacaaaacattattaatatagctattgacagtttcaaagcaggtaaattgtaaatgtttctttaagaaaaagcatgtgaaaggaaaaaggtaaatacagcattgaggcttcatttggccttagtccctgggagttactggcgttggacaggcttcagtcattggactagatgaaaggtgtccatggttagaatttgatctttgcaaactgtatataattgttatttttgtccttaaaaatattgtacatacttggttgttaacatggtcatatttgaaatgtataagtccataaaatagaaaagaacaagtgaattgttgctatttaaaaaaattttacaattcttactaaggagtttttattgtgtaatcactaagtctttgtagataaagcagatggggagttacggagttgttcctttactggctgaaagatatattcgaattgtaaagatgctttttctcatgcattgaaattatacattatttgtagggaattgcatgcttttttttttttttctcccgagacagggtcttgctctggcgcccaggctggagtacagtggcatgatcttggctcacttcagccttgacttgggctcaagtgatcctcctacctgagccttctgagtaactggaactacaggtgtgcactcctcgcctggctaattttttattttttgtacaggcaggatcttgccaccttgcccaggctggtcttgaactcctgagctcatgccatctgcctgccttagtctcccaaaatgctgggattacaggagtgagccaccatgcccggctggcagttgcatggaagagaacacctctttatggcttaccctctagaatttctaatttatgtgttctgttgaaatttttgtttttttacctttattgaaacaacaaaaagtcagtattgaaacatatcttcctgttttctgttgtcaaatgatgataatgtgccatgatgttttatatatatcattcagaaaaagttttattttttaataacattctattaacattattttgcttgccgctggcatgcctgaggaatgtatttggctttgattacacactaagtttttgtaataaatttgactcattaaaaaccttttttttttaaaaaaaaaaaaaaagaaaatctcattagtgaacttatctttgcagctgagtacttaaattctttttaaaaagataccctttggattgatcacattgtttgacccagtatgtcttgtagacacgttagttataatcaccttgtatctctaaatatggtgtgatatgaaccagtccattcacattggaaaaactgatggttttaaataaactaattcactaatattaaaaaaaaa

SEQ ID NO: 1067 - DNA, 404 bp, HOMO SAPIENS
  misc_feature (147)..(147): n is a, c, g, or t
agcccctgaaatctgacatgctcagggtcagagccatgaaccactgtcttgacaaaccccatgtacatggactaataaggaaggtgtgggcaccatggcgttagtgttcaactggagagtgggaaagagatttgcatgtgccaccanccctgatagagacagtgacagaacacactgattctcaacattgcagacacctgctgtctttgtccctatgtaggtttcccccaatatttaggggatcaggtcagataaaggccttcctctgaaatggaaattatttaaaatcgatgaggaagtcatccaggaatgacttcctctggggatctgtggatgatggtgctagggtttgtaccagaccaaatcaaggtaactagagcctccccaggtgattgtaacccatc

SEQ ID NO: 1068 - DNA, 1810 bp, HOMO SAPIENS
aggaagccgaggtctgaattgcgcgtggtggccatggcggccagcggggctgtggaaccagggcccccgggggctgccgtcgccccgtcgcccgccccggccccgccgcctgcccctgatcacctgttccggcccatcagcgccgaggacgaggagcagcagcccaccgagatcgagtcgctatgcatgaactgttactgcaatggcatgacgcgcctcctgctcaccaagattcccttcttcagagaaataatagtgagctccttttcctgcgagcactgtggctggaacaacacggagatccagtcggcaggcaggatccaggaccagggagtgcgctacactttgtctgtcagggctctggaggacatgaacagagaagtggtgaagactgactctgctgccacaaggattcctgagctagattttgaaattcctgcctttagccagaaaggagctctgaccactgttgaaggattgatcacccgtgctatctctggcctggagcaggaccagcctgcacgaagggcaaacaaagatgctacagctgaaagaattgatgagttcattgtcaaactgaaggagctaaagcaagtagcctcccctttcactctgatcattgatgatccctcagggaacagttttgtggaaaacccacatgctcctcagaaagatgatgccctggtgatcacacactacaaccggacccgacagcaggaagagatgctggggcttcaagaagaagcaccagcagagaagccagaagaggaagatctcagaaatgaagtgctccagttcagcacaaactgcccagaatgcaatgcccccgctcagaccaacatgaagctagtacaaatccctcactttaaggaggttatcatcatggctaccaactgcgagaactgtgggcatcggaccaatgaggtgaaatctggaggagcagtagaacccttgggcaccaggatcaccctccacatcacagatgcctcagatatgaccagagacctcctcaagtctgagacttgcagtgtggaaatcccagagctagaatttgaactgggaatggcagtcctcgggggcaagttcaccacactggaagggctgctgaaagacatccgggaactggtgaccaaaaatcctttcacactgggcgacagttccaatcctggacagacggagagactacaggagtttagccagaagatggaccagatcatcgaaggtaacatgaaggcccactttattatggatgatccagcaggaaacagttacttgcagaatgtgtatgcgcctgaagatgatcctgagatgaaggtggagcgttacaagcgcacctttgaccaaaatgaggagctagggctcaatgacatgaagacagagggctatgaggcaggcctggctccgcaacggtagcagtgggtggctcaagggccagcctccagcgctgctctttctgtaggttatttattagtattggatgaaggcgaaggctgggagtgtctttcccaccagcccttgcccatggtggggaggacatctggtctgagtcagagatctgtgcacactttctaaacagcttgtgatgcaagtgtgagcctattgtgttacttgaccttattttggaagttttgaattggcctaggaggaaacccagaaatgaaccaggggtatgtcatcacttttttcatatcaagtcctcaccctccttccacataatgctctatcctctaaggttggaactctgaagttggagaaggtggaataaagttacacctggaaaaaaaaaaaaaaaaaaaaaaaaaaaaaaaaa

SEQ ID NO: 1069 - DNA, 1272 bp, HOMO SAPIENS
ggcgcagcagcggcggcggcggctgtgggtaaaggcgcggcgcgcggcccccgagcgcgccaaccttgccctagccggagcccgctgcggcccagcgcacggccctcaccccgcatcgcgaccccgcgccccgccggccgagcatgggcgcgcgcgcctcaggcgggcccctggcccgggccgggctcctgctgctgctgctgctgctgctgctgctcgggctgctggccccgggcgcgcagggggcgcggggccgcggcggcgcggagaagaacagctaccgccgcacggtcaacaccttctcccagagcgtcagcagcctgttcggcgaggacaacgtgcgcgccgctcagaagttcttggccaggctgactgagagatttgtgctgggagtggatatgttcgtggagacactgtggaaagtctggaccgagctcttggatgttcttggacttgacgtctccaacctgtcccagtatttcagcccagcctcggtgtccagcagcccggcccgcgcgctcctgctggtcggcgtcgtcctcctggcctactggttcttgtccctgaccctgggcttcactttcagcgtcctgcacgtggtgttcggccgcttcttctggatcgtgcgggtcgtcctgttttccatgtcctgcgtgtacatcctgcacaagtacgagggcgagccggagaacgcggtgctgccgctgtgcttcgtggtggccgtctacttcatgaccgggcccatgggcttctactggcgaagcagtcccagcggccccagcaaccccagcaaccccagcgtggaggagaagctggagcacctggagaagcaggtcagactgctcaacatccgtctcaaccgggtgctcgagagcctggaccgctccaaggacaagtgaaggtcagccggccgggcgggtccacagttaccagcacgctgtctcagaaaacgaaaacggaggaaaaaaaccccaaaccccaaacaatcttaataaacacgactgagcaagaaagtggcgctgtgtagggctatttccacccacccggcagctcttaggacacattcccagaagagcggaaagatcattgacgtggaactacacacgaagtgtaattagtgggggaaaaaatattttttaaacaaaggatataaccatatttagttgtacagtaagagaaatttatctgtgcatagagcataaagttaattttttcaagcatttaaatacatcttttgtaaggttttttaataaaggcagattgagtcaagtt

SEQ ID NO: 1070 - DNA, 3553 bp, HOMO SAPIENS
gagccagcgcggtagggccagagtgggaaggccagagcgggcgtccccgccagtgaccccacgccgcccgtccgcgcccaacccggcctccgccgagtgtccaaaccaaaagcgaaaggaacccgaccccgcgtcccctccggcggctccgtagtcgcgtccgcttggagctcgccgggcgcctccgaccctgccgggccgctttgtgacttcactcgtttcgcaacaagcccgggcagcccgcgccccacccactctggcccggcagcctcgccgcccgcagcctcgctccgctcctcgcgcttcccctccctccggggctgggcctgccccggccgtcgcggagcctcccctcccaccgtccgtgagtgtacgcgcccggccgccgcctccaggcagcccggagcaacccggcgcccggccccgctgggcgcagcactccgtcggcggcggcggcggcgcgatgctgtgcttcctgaggggaatggctttcgtccccttcctcttggtgacctggtcgtcagccgccttcattatctcctacgtggtcgccgtgctctccgggcacgtcaaccccttcctcccgtatatcagtgatacgggaacaacacctccagagagtggtatttttggatttatgataaacttctctgcatttcttggtgcagccacgatgtatacaagatacaaaatagtacagaagcaaaatcaaacctgctatttcagcactcctgtttttaacttggtgtctttagtgcttggattggtgggatgtttcggaatgggcattgtcgccaattttcaggagttagctgtgccagtggttcatgacgggggcgctcttttggcctttgtctgtggtgtcgtgtacacgctcctacagtccatcatctcttacaaatcatgtccccagtggaacagtctctcgacatgccacatacggatggtcatctctgccgtttcttgcgcagctgtcatccccatgattgtctgtgcttcactaatttccataaccaagctggagtggaatccaagagaaaaggattatgtatatcacgtagtgagtgcgatctgtgaatggacagtggcctttggttttattttctacttcctaactttcatccaagatttccagagtgtcaccctaaggatatccacagaaatcaatggtgatatttgaagaaagaagaattcagtctcactcagtgaatgtcgcaggccatttctaaaagtgctacagaggacagacagggttttgaggccaccctgattattgggatgcatctgcagcacatccaggacttgaatttcattacgagttcctaatagttgtatttctaaagatgtgtttcctagagaatgtacagccttatgacactgtagtgatgtttttataattttctaagtagatttttttatattaacaaattcatatacagaaaaaataaggtgttacaaaaaatggagagctcttatttttgtacagattctgtcgtttttgttttatttgtgtgagatttatggaaatacactaaatgagtaattcaggttcagtacatttattacaaagtgaaatcaggggatattcatttgtaaattttattcttagtgaatgaactgtataattttttttatcaggagagcacttataaaattcaatttataaagatcatatacccaaatcataaagatttagttgatacattaacactaagatactctgatttttagccgaactaaacaaagtgcttctactgagaggcctttataccaccatgtacagtaactctaagtgaatacggaagaccttggttttgaaattctgccaccttgtttctccctgctcatgaggtcgcaccttttgctcttgctgctaattgcccattcgtagtgggtgtaatgccaggtggaatggtttcaacaagtcaggtgaaaaccatcctttattgttgctggcacaacttgatatatagtctgactcagaactgaagctcacatctcaaattcatttcatgccagtaaatgtggcaaagagaagaaaggcccaagagcgagacaagaagaatggagaagggggcagccaagaagaacttctgggttcagggtactgtttatttgctccttctcttcatgcctgtggctggatgtcccacaacactataagaaatataagtcaagccctttgtgttaagcaagaactacagactccatcttttcacccaaatcatgaatgaccaataaaaagcaagttattccagaggaagaagcagcccttgaaatgttaaggcttaggcttgaaaggtgaagagcaggaattctctctttcaaatcctagagcataaacccatgtgtggccaagtgagatcagccctcaagggcacatgccaagggcagagcagcccatgtagacagcttcggagggcatgggggtgtagggagttcggggtagctcctcattaactatttgttgggtgagtaaaggggtgaggctcagtggcaggtacctctgcaatgacaagctgcctcccctctatgtgtttagcatatgttattagaacatgtccgacacccctaccgctgccatttgggccctttaataaagccaagtagagaaatctggcaataaaaggcaaatgtaagcatgctttctttaagacgcatcataaatggttttctttaagtgaatggaagagtttgacagagatacacctttgtaagaaaacattaagaatgctggctggctgtggtggctcacacctgtattcccagcactttgggaggcctaggcaggaggattgcttgagcctgggacttcgagaccagactgggaaacatggcaaaatcccatctctacaacaaaaatacaaaaattagccaagtgcggtggtgtgcctgtagtcctagttacttgggaggctgaggtgggagaatcacctgagcccaggaggtggaggctgcagtgagccatgccaatgcactccagtctgggcaacagagtgagaccctgtctcaaaaataaataaataaataaatgaataaagagaatgctaatcatttctgggttcactgcgactcactgtagtgctggggatcccccttgtaacactggaactgaaagacagtgatgaaagctatgtcaagcattcattattctgaagaggaggagaaatgccacatacctttcccatgggacctgtggtggaatgaatccatacttctgcctcacttcgagcagacttttgttctcggcgctcctcacgatggagtttcatgcttcattttcacatctctctgcacaattagattgggagctccttgagggcagagtacgtgccttaatctttatctttgtaatgccacaatgaacagagtgcctcctggtacactgtaggagcttaagaaatactcactgaatgcatgaatgaatgaatgaacaaatgaaggaatgactaaggatgtttgtagtgctataatatagaatgggatttactctgctttaccagttagtttcataataaacaaatagtctgtatcgcctggtaaaaaaaaaaaa

SEQ ID NO: 1071 - DNA, 12907 bp, HOMO SAPIENS
gactgcttgcattaaaggacttcctcatcctttttttcatgaaactgagcttgcttaatcagagatggagcaaactgactgcaaaccctaccagcctctaccaaaagtcaagcatgaaatggatctagcttacaccagttcttctgatgagagtgaagatggaagaaaaccaagacagtcatacaactccagggagaccctgcacgagtataaccaggagctgaggatgaattacaatagccagagtagaaagaggaaagaagtagaaaaatctactcaagagatggaattctgtgaaacctctcacactctgtgctctggctaccaaacagacatgcacagcgtttctcggcatggctaccagctagagatgggatctgatgtggacacagagacagaaggtgctgcctcacctgaccatgcactaagaatgtggataaggggaatgaaatcagagcatagttcctgtttgtccagccgggccaactctgcattatccttgactgacactgaccatgaaaggaagtctgatggggaaaatggtttcaaattctctcctgtttgttgtgacatggaggctcaagctgggtctactcaagatgtgcagagcagcccacacaaccagttcaccttcagacccctcccaccgccacctccgcctcctcatgcctgcacctgtgccaggaagccaccccctgcagcggactctcttcagaggagatcaatgactacccgcagccagcccagcccagctgctccagctcccccaaccagcacgcaggattcagtccatctgcataacagctgggtcctgaacagcaacataccattggagaccaggcatttcctgttcaaacatggatctggttcctctgcgatcttcagtgcagccagtcagaactaccctctgacatccaataccgtgtactcgccccctcccaggcctcttcctcgaagcaccttttcccgacctgcctttacctttaacaaaccttacaggtgctgcaactggaagtgcacagcattgagcgccactgcaatcacagtgactttggccttgttactagcctatgtgattgcagtgcatttgttcggcctgacttggcagttgcaaccagttgaaggagagctgtatgcaaatggagttagcaaagggaacagggggaccgagtccatggacactacttactctccaattggaggaaaagtttctgataaatcagagaaaaaagtgtttcagaagggacgggcgatagacactggagaagttgacattggtgcacaggtcatgcagaccattccacctggtttattctggcgtttccagattactatccaccatccaatatatctgaagttcaatatttctttagccaaggactctctgctgggaatttatggcagaagaaacattccacctacacatactcagtttgattttgtaaaactaatggatggcaaacagctggtcaagcaggactccaagggctctgatgatacacagcactcccctcggaacctgatcttaacttcgcttcaggagacaggtttcatagagtatatggatcaaggaccttggtatctggcgttttacaatgatggaaaaaagatggagcaagtattcgtgttaactacagcaattgaaataatggatgactgttcaaccaattgcaatggaaatggagagtgtatctctggccattgtcattgtttcccaggattccttggacctgactgtgctagagattcctgccctgtgctgtgtggtgggaatggagaatacgagaaaggacactgtgtctgccggcatggctggaaggggccagagtgtgacgttccggaagaacaatgcattgatccaacatgctttggccacggcacctgcatcatgggagtctgcatctgtgtgccaggatacaaaggagaaatatgcgaggaagaggactgcctagacccaatgtgttccaaccatggcatctgtgtaaaaggagaatgtcactgttctactggctggggaggagttaactgtgaaacaccacttcctgtatgtcaagagcagtgctcaggacacggaacttttcttctggacgctggagtatgcagctgtgatcccaagtggacaggatctgactgctcaacagagctgtgtaccatggagtgtggtagccatggagtctgctcaagaggaatttgccagtgtgaagaaggctgggtaggaccaacatgtgaggaacgctcctgtcattctcattgtactgagcatggccaatgcaaagatggaaaatgtgagtgtagccctggatgggagggcgaccactgcacaattgctcactacttagatgctgtccgagatggctgcccagggctctgctttggaaatggacgatgtaccctggatcaaaatggttggcactgtgtgtgtcaggtgggttggagtgggacaggctgcaatgttgtcatggaaatgctttgtggagataacttggacaatgatggagatggtttaaccgactgtgtggatcctgactgttgtcaacaaagcaactgttatataagtcctctctgccagggctcaccagatcctcttgacctcattcagcaaagccaaactctcttctctcagcacacttcaagacttttttatgatcgaatcaaattcctcattggcaaggacagtactcatgtcattcctcctgaggtgtcatttgacagcaggcgtgcctgtgtgattcgaggccaagtggtggccatagatggaactcctctagtgggagtgaatgtcagtttcttgcaccacagtgattatgggtttaccatcagccggcaagatggaagctttgacctcgtggccatcggtggcatctctgtcatcttaatcttcgaccgatcccctttcctgcctgagaagagaacactctggttgccttggaatcagtttattgtggtagagaaagtcaccatgcagagagttgtatcagacccgccatcctgcgatatctccaactttatcagcccaaaccctattgtgcttccttcaccgctcacatcatttggagggtcctgtccagagaggggaactattgttcctgagctgcaggttgtacaggaggaaattcccattccctccagctttgtgaggctgagttacctgagcagccgcacccctgggtataaaaccctgctacggatccttctgacacattcaacgattcctgtaggcatgataaaagtacacctcacagtagctgtggaagggcgactcacacagaagtggtttcccgccgcaattaatcttgtctacacatttgcttggaacaagaccgacatctatggacagaaggtttggggcctggcagaggctttggtatctgtgggatatgaatatgaaacgtgccctgactttattctctgggagcaaaggacagtcgttttacaaggttttgagatggatgcttctaacctaggaggctggtctttgaataagcatcacattttgaatcctcaaagtggaatcatacataaagggaatggagaaaatatgttcatttcccagcagcccccagtcatatcaaccataatgggtaatggacaccaaaggagtgtagcctgcaccaactgcaatggcccagcccacaacaacaaactctttgctcctgtcgccttagcttctggccctgatggcagtgtgtatgttggcgacttcaattttgtaaggagaatatttccctcgggaaactccgttagtattttggaattaagaaacagagataccagacatagcacaagtcctgctcacaaatactatctggctatggaccctgtgtctgaatcactctatctatcagacaccaatactcgcaaagtctacaagttgaaatctcttgtggagacgaaagatctgtccaagaattttgaagtggtggcaggaactggtgatcagtgccttccctttgaccagagtcattgtggagatggtgggagagcatcggaagcttcactgaatagccctcgaggcatcacagttgataggcatggatttatttactttgtggatgggactatgattcgcaaaattgatgagaatgctgtgatcacaactgtaatcggctcaaatggtctgacttccacacaaccactgagctgtgactcaggaatggacatcactcaggtgcgattagagtggccaacagaccttgcagtaaatcctatggacaattcattgtatgtcttggataacaacattgtgctgcaaatttctgagaacaggcgtgttcggatcatcgcaggacgccccattcactgccaggtgccaggcatcgatcatttcctggtcagcaaggtagcaattcactccactctagagtcagcgagggccatcagtgtctcccacagcgggctgctcttcatagctgaaacagacgagaggaaagtaaaccgcattcagcaagtaaccaccaatggggagatctacatcatcgctggtgcccccactgactgtgactgcaaaattgatccaaactgtgactgtttttcaggtgatggtggctatgccaaagatgcaaagatgaaagccccttcctccttagcagtgtcgcctgatggaaccctctatgtggcagacctcggaaatgttcgaattcgtaccatcagcaggaaccaagcccacctgaatgacatgaacatttatgagattgcttcacccgctgatcaggaactgtaccagttcactgtaaatggaacccacctacacaccctgaacttgataacaagggactatgtttataacttcacctacaattctgaaggtgacttgggcgcgattaccagcagcaatggcaattcagtgcacattcgccgtgatgcaggcggaatgccgctatggcttgtggtgcctggcggacaagtatactggctgactataagcagcaatggagtcctgaaaagagtgtcagcccaaggctataatctggccttaatgacctatccaggaaacacagggcttctggctaccaaaagtaacgaaaatggatggacaaccgtttatgagtatgaccccgagggacacctgaccaatgcaacgtttcccactggagaggtcagcagcttccacagtgacctggagaagctgacaaaagtggagctagatacttccaaccgtgaaaatgtcctcatgtcaaccaacttgacggcaactagtaccatatatattttaaaacaagaaaatactcaaagtacctatcgggtgaatccagatggttccctgcgtgtcacttttgccagcgggatggagatcggcctcagctcagagccccacatcctggcaggggcagtcaaccctaccctgggcaaatgcaacatctcattgcccggagagcacaatgcaaacctcatcgagtggcggcagaggaaggagcaaaacaaaggcaatgtttcggcttttgaaaggaggctgagggcccacaacagaaacctactctccatagattttgatcatataacccgcacaggaaagatctatgatgaccatcgaaaattcacccttcgaattctttatgaccagactgggcgacccattctgtggtctcctgtaagcagatataatgaagtgaacatcacatattcaccttcgggattggtgacgtttattcaaagaggaacgtggaatgaaaaaatggaatatgaccagagtgggaaaattatttcaagaacttgggctgatgggaaaatttggagctatacctacttagaaaaatctgtgatgcttctcctacacagccagcggcgttacatctttgagtatgaccaaccagattgtctgctctcagtcaccatgcctagcatggtgcgtcacagcttacaaaccatgctttcagtgggctactaccggaacatctacaccccaccggacagtagcacttcttttatccaagactatagtcgagatggccgattgctacagaccctgcatctggggacagggcgcagagtcttatacaagtacaccaagcaagcaaggctttctgaggttctctatgataccactcaggtcacattaacatatgaagagtcttctggagtgattaagacaatacacctgatgcatgacggattcatctgcacaatcagatacaggcaaacaggacctcttattggacgccagattttcagattcagtgaagaaggccttgtgaatgcacggttcgactacagctacaacaatttccgagtcacaagcatgcaagctgtaatcaatgaaacccctttgcctatagatctttaccgatatgttgatgtctctggcagaacagagcagtttggaaaattcagtgtaattaattacgatttaaatcaggtcataactactacagtgatgaaacacaccaaaatcttcagtgccaatggacaagtcattgaagtccaatatgaaatcctaaaggcaattgcctactggatgaccattcaatatgataatgtgggccgcatggtaatatgtgacataagggtaggagtagatgccaatataacaaggtacttctatgaatacgatgctgatgggcaacttcagactgtttctgtaaatgacaaaacccagtggcgttatagttacgatctgaatggaaacatcaacctcttaagccatgggaagagtgctcgtcttactcctctccgatatgacctccgagaccgcatcaccagattaggagaaattcagtataaaatggatgaagatggctttctgaggcagaggggaaatgatatttttgaatataattctaatggcctgctgcagaaagcctacaataaggcttctggctggactgtgcagtattactatgatgggcttgggcgacgtgtcgcgagtaagtccagcctagggcagcaccttcagttcttttatgcagaccttaccaaccccataagagttactcatttgtacaaccacacaagctcggagattacatctctgtattatgatctccaaggtcaccttattgccatggagttaagcagtggtgaagaatattatgtagcctgtgataatacaggtaccccactagctgtgttcagcagccgaggtcaggtcataaaggagatactatacacaccttatggcgatatctatcatgacacttaccctgactttcaggtcattattggttttcatggaggactctatgatttccttactaaattagtgcacctggggcaaagggattatgatgttgttgctggcagatggacaacgcctaatcatcacatatggaaacagttgaacctccttcctaaaccattcaacctctactcctttgaaaataactacccagttggcaaaattcaagatgttgcaaagtataccacagacatcagaagttggttggagctatttggtttccaattacacaatgtactacctggatttcccaaacctgaattagaaaatttagaattaacttacgagcttctacggcttcagacaaaaactcaagagtgggatcctggaaagactatcctgggcattcagtgtgaactccagaaacagctcaggaatttcatttccttggaccaactacctatgactccccgatacaatgatggacggtgccttgaaggagggaagcaaccaaggtttgctgctgtcccttctgtttttgggaaaggtataaaatttgccatcaaggatggcatagtaacagctgatattataggagtagccaatgaagatagcaggcggcttgctgccattctcaataatgcccattacctggaaaacctacattttaccatagaggggagggacactcactacttcattaagcttgggtctctggaggaagacctggtgctcatcggtaacactggggggaggcggattctggagaatggtgtcaatgtcactgtgtcccagatgacttctgtgttgaatgggaggactagacggtttgcagatattcagctccagcatggagccctgtgcttcaacatccggtatgggacaactgtcgaagaggaaaagaatcacgtgttggagattgccagacagcgcgcagtggcccaggcctggactaaggaacaaagaaggctgcaagagggggaagaggggattagggcatggacagaaggggaaaagcagcagcttttgagcactgggcgggtacaaggttacgatgggtattttgttttgtctgttgagcagtatttagaactttctgacagtgccaataatattcactttatgagacagagcgaaataggcaggaggtaacaaaaatatctctgcctttgcgtcaccaaagactgcctgtttttaaaacataaaatggtttattgtattggttttctagatcagaactctgtatatgtaaatatggaggaaaaacatatccaactgcctttcaatgtgacggaagatggtattttaatattgtttgtttaaactctttaagaaatgacagagatttttagttcttgtgtggcagtattcaaaataacacaagtagaactcaaacagctaaaaacagttttcagaaagcaccactttcaatttgccgagccatgcatatgttccaatatccagaaagaacccaaggttctctatctctattgtgagaagcagtttcatccttaactgttggcagaacttacgggctatttgaataggtggtgcaatagtatctgaaacttgcctttcgaaagactgccagccctttgacgttttccagatctgttataggaaacttaaaaacaggtgtaaaatgtcttcagccaccatctcctagagtgaggacccaattgcccttccttcttgattattcctccttgcttgttaaagtaaatgccatattgttgtgctgtgttttggcgtgtggtggctgggttctgtctaccatgcttccctgtgggtgtggtaaccagactgtatagccgctatttgctcgtgtgtacatgataccaaagcagctggccagcgtgacctctctcacacgacctgttttgactcaattttttactaaaagttgttcagctgtattggtatcatgtaaacatagcttttattaacctgggtaggaatttctcatttatatataggatgtgttttggtcatagtttcacattagtgattcagtatctatacactgacccaatggttttgtgcacatgaacggtaatttacttaaaagtatgattctggtacaaaaacaaacaaaggctttagcaggcatacgtgtctgggatgccgatacatacattaactactactgcagaaattcataagagccaaaaccttaaaaaaatagacctggtacttaagtgaaagtactaaagggaagaccagaccaaacatcacagcagttgctgccacattgtttcagcccacttagatttatctttcaaatgtacaattctgtattgaacatctcccagccatcttcaggaaatcgaatcaagtaaatcctttccaaccgaaaacatttcaactaactatagagaggcagactcatttttactaaaataatttatacagttagttattttcgttctccgtacttacccatttatctttatttaatcgtctctactgcctaggaaaataactattttccaggacgggttatttgttctgcgatcatttaaaatttggagaaaggtcaggattagtgttaatatcagctgcagtttctcaatctctaggaatcctgcagtaaaacaagccccttggtgagctggaagatttgtgcccagtgacaaagagatagtttgtaaaatgctgtgtaattgtaagttaccacaaatgaaaatacatgacagcacaatgtggcccgtagaaaattcccctgagccagcttctgcactttcatcaccgaatctgaacatttgctatgtctgaaggcaaatttatgatggaatgttagtttggattctttccagatgctacctaaatgcagtgtggggtcattgccttgctttgcgatgacagtttctttgaaaatatgcaaagtcataagctcatgttaaggtttttcaagagtctgcctcctactacacaaaggaaagcaagggaaaggaaatgaccctggcaaacagtagggaagggtgtattcaaacatttcattttcaaaaccttcgggttagaataccacttacacatgtattctgagagacagaattcatgaggaactcatctctctttataactggaaacacaccagcttgatatattgctaatccatactaaaatcatattattgggttttttctgaatcaggcctgtattaatggtacagtatttattcagaatggaattctaaaattactaacaaacttgttgaaaatttgaatacctccacaccaacctaaaaatggaccttaagttcctagaacctctgatgttcttttaaattaatggaaaaataatttgtgaactgtatatagagagtgcattcataaatgtgattatgtattttatcacaaatccaaaatgtcaatattagagtctattttgcttatattttaagcaattatacgtttttgcaattcattgatgatgtatcattttcaaactgctttaaatatccattagaaacaaatatttgaagcttttacttaatagtgattaccttgaactgtgcatttctagtttgtaatacgtatttggttggttcgtgcctttagtttgttaaagttacatttgtattatattcaggaaatgcactttttattacttacagctgtggttttaatactgccttgaactattattattctttttacaactcctaaagcttgagggaggaaagaaaaaaaaaacaaaactactaatcagtagtaaatcgaagagaaacattttggcatttcttaagaagaagatggagatattgagtatatcacttcctattcagctgaatagaaagaatgccttcattgacttgcagttctgcagtttaaattattgaaagaacaattcgtttgcatttcctgatgaaagtaaaagcatttttcagagaaacatatgaatttctcatacccagcagacagatggctgacactgcacagccacacaccattcgagtaagttaaagtgagagcatagtagttggactctcctatgaagaacattctgggctggaggcagggaatactccatggttgtttctttttcctacttaagcccattttgtttgtgcttttctgttttgttttgttttcactcttgcactacagtctagagatccaaatgaactgaaaagttcaaagtttaacacatttaaatatgtttacttttagttgtcattctaatcgttattgattagaagcatgactcctgaaggaaagggaaataaatctcaattcatactaacttgcaacaaaacacttttaccatataaataagtatatgatttatttttaacccaaaaaatgtataaaataagtgtgtcctttactgtcaatttatctagaagatctataatatatagactacatatatataatatatacaacatagccaaatgtatgaaaacttgacaatgtataatttggaattcacatgctacctatgtagacaggtatgaaattaagttataattttcatgagacattttcatcactgttgacacagtttcaagcattccatcatgttattttgactctttttcttttttttttctttaaaaatatatttttaactagaccaggccccactataatatcacttaagagagtcagggcaaagtttttgcatttatgaagatgtgttcatgtaagggtgattgtaatggagttcattggtaatagaagcaaaagtacagtaacgaagtattgaaaagaaaattttggagacattggagcatattatatatagcttgtggaaagacataaggctacagatggaatggaacattcctgttttcttgaagaaattcacatacacatagctgacctgactagtacttcagctcttccacagccttctataaaggttctttcttctgcaaagaaaacaaaacaaaacaaaacaaaacaaaaaaaacaaaaaaagcgcaaaaaacaaaaaaacaaaaaaaagcaaagtaaaatttaaaaatacagaaaacaaacaacaaaaaagaattcaaccataaatagtgactattattttcagtgtgtccttcatgtgaaagctattaaggaccaaatatactactgttcataagaagaaattactttctaaacagtaactgaaaatacttagagttaaacttgctgtggattttgtcttggcagttgtcatcttacattatttgtcaaaggaaatgtgtttggcagttaaaaatctttccttagatttagtggtggactttaacctcttaaataaatgttagtatatcagattgtgtccttgaaaaatattttacttgtatgaatcatgacaacgtctaaatctttactattcttctggcaaaagcatcagtaagaaagaaggcgaaaaagagaagtatagcctttatgtcagaaaaacattctttttagctgcttactttctcatgaaaagtaaagatgtttacagtgtatgccaagttttcagtttctgtataacaacaggtagaggttctaatcatattgaaaattgtgttataatggtctgagccatgttgctaggaaacaataggttccaattttgtattcctgctctcctgtgctgaaaagtgactggatactgtacaggttcatgttctctggctgcagttaaatggtcttttgcattttgctctggctttcaggccagaagcatgcatttttctacaagagcatcacaacaacatgctgtaaatatttaaagttaaacattatgtgttgatatttgaaagaaaagtactttgaatatttcatttttaaaaaataaaattgccaatgaaaaaaaaaaaaaaaa

SEQ ID NO: 1072 - DNA, 489 bp, HOMO SAPIENS
  misc_feature (56)..(56): n is a, c, g, or t
  misc_feature (76)..(76): n is a, c, g, or t
  misc_feature (86)..(86): n is a, c, g, or t
  misc_feature (105)..(105): n is a, c, g, or t
  misc_feature (116)..(116): n is a, c, g, or t
  misc_feature (148)..(148): n is a, c, g, or t
  misc_feature (162)..(163): n is a, c, g, or t
  misc_feature (168)..(168): n is a, c, g, or t
  misc_feature (176)..(176): n is a, c, g, or t
  misc_feature (346)..(346): n is a, c, g, or t
cttactgcagtaagttcacttgaactcctgggctcaagtgaacctcttaccccagnctcccaactagctgggactngaggggtgcnaccactgcacccagctaantttgtcaaaantttttgtagagacagggtctcgccatgttgcntaggctggtctcgnnctctnggcctcangtgatcctcccaccttggtctgccaaagcactgggattacagatgtgagccactgcacccagcctaatctttataaatctccatccccattactctggttcaccccctatcgtttcttagactatttaacagcctcctaacttcactctacttttaatctcttccctctnccaggtctttctccatattttaaaaaactagtttcaccatccattcctctctgcccttaaaactttctggtggttttccatggcttaagagaataaagcccaattctttgatttgacatgctaggcattccataatcctctcc

SEQ ID NO: 1073 - DNA, 855 bp, HOMO SAPIENS
gaggcccggctgcagacctctcccgagaggggaataatccgtgccggccggttccgccatggagccaggtgcaggtcacctcgacggtcaccgcgcggggagcccaagccttcgtcaggctctgtgcgacggaagcgcagtgatgttttccagtaaagaacgcggacgttgcaccgtgatcaattttgtccctttggaggcgccgttacggtccacgccccgctcgcgtcaagtgactgaggcctgtggtggagaaggacgtgccgtgccgctgggttctgagccggagtggtcggtgggtgggatggaggcgaccttggagcagcacttggaagacacaatgaagaatccctccattgttggagtcctgtgcacagattcacaaggacttaatctgggttgccgcgggaccctgtcagatgagcatgctggagtgatatctgttctagcccagcaagcagctaagctaacctctgaccccactgatattcctgtggtgtgtctagaatcagataatgggaacattatgatccagaaacacgatggcatcacggtggcagtgcacaaaatggcctcttgatgctcatatctgttcttcagcagcctgtcataggaactggatcctacctatgttaattaccttatagaactactaaagttccagtagttaggccattcatttaatgtgcattaggcacttttctgtttatttaagagtcaattgctttctaatgctctatggaccgactatcaagatattagtaagaaaggatcatgttttgaagcagcaggtccaggtcactttgtatatagaattttgctgtattcaataaatctgtttggaggaaaaaaaaa

SEQ ID NO: 1074 - DNA, 6975 bp, HOMO SAPIENS
gggagagggaagggggcggagctagccggagccgcgagtccattttggggctgtgcttggcgcgtaccgtgcggtccctgtagttggaggacgggcggtcgcgcggcctttcccactagccggaggtcggagataagtacccgccgcccggctcctctcgggaaagcggggtggtcctcgaaccttcagcgagggtggggagttgcccagtagcctctagttcgttagtcaaaacgtgaaaaaaaagacctgctttgccctgggaaatagtaaccctgccaaatacatcagcttgtaggagacagagaataacagcacctggccgggtgcagtggctcaggcctgtaatcgcagcactttgggaggctgaggtgggcggatcacctgaggtcaggagctcgagaccagcctggccaaaatggatgtgatggagctgcttgaagaagatctcacatgccctatttgttgtagtctgtttgatgatccacgggttttgccttgctcccacaacttctgcaaaaaatgcttagaaggtatcttagaagggagtgtgcggaattccttgtggagaccagctccattcaagtgtcctacatgccgtaaggaaacttcagctactggaattaatagcctgcaggttaattactccctgaagggtattgtggaaaagtataacaagatcaagatctctcccaaaatgccagtatgcaaaggacacttggggcagcctctcaacattttctgcctgactgatatgcagctgatttgtgggatctgtgctactcgtggggagcacaccaaacatgtcttctgttctattgaagatgcctatgctcaggaaagggatgcctttgagtccctcttccagagctttgagacctggcgtcggggagatgctctttctcgcttggataccttggaaactagtaagaggaaatccctacagttactgactaaagattcagataaagtgaaggaattttttgagaagttacaacacacactggatcaaaagaagaatgaaattctgtctgactttgagaccatgaaacttgctgttatgcaagcatatgacccagagatcaacaaactcaacaccatcttgcaggagcaacggatggcctttaacattgctgaggctttcaaagatgtgtcagaacccattgtatttctgcaacagatgcaggagtttagagagaaaatcaaagtaatcaaggaaactcctttacctccctctaatttgcctgcaagccctttaatgaagaactttgataccagtcagtgggaagacataaaactagtcgatgtggataaactttctttgcctcaagacactggcacattcattagcaagattccctggagcttttataagttatttttgctaatccttctgcttggccttgtcattgtctttggtcctaccatgttcctagaatggtcattatttgatgacctggcaacttggaaaggctgtctttcaaacttcagttcctatctgactaaaacagccgatttcatagaacaatcagttttttactgggaacaggtgacagatgggtttttcattttcaatgaaagattcaagaattttactttggtggtactgaacaatgtggcagaatttgtgtgcaaatataaactattataaaatctgtttcaagtatgcagttttcttttgttagaaattgttagagaatagagagtggtaattcagatttggtcaacgattctagtcacatattttcctccaaaagtattccttccaaaaataatctatacatgttcaaattaggtagcataaagataaaagtgaaatttagtagtataggcctgaacctttttttgtttaaaagagtgcttttgaaataagcatccaccccaaatgttggttgtatttatgctgtgataaaaataggtgagagatcatatgatctaatattgtattgatggaagtataggtagtatagtagtgattgttcttcaagcatgcagtaaagatcacttttttttttttttttttttttgagatggagtcttgctctgtcgcccaggctggagtgcagtgatgcaatcttggctcactgcagcctctacctcccaggttcaagtgattatcctgccttagcctcctgagtagctgggattacaggcgcgtgccaccacgcccagctaattttttgtatttttagttgagacagggtttcactgtcccttaagaccatcctgttagccaagatggtcttgatctcctgacctcgtgatccgcctgcctcggcctcccaaagtgctgggattacaggtgtgagccaccgtgcccagccaaagactgctcttaaagcacctttttgacagtgaacatggtctaaaaaagggaagatattgtagaagatttcacacacacacgcgtgtgtgggagacaactaaaggtattgaaggtactaattaattagatttccaaaattttctacagagagttaattatcaccaaaatgtgaatggtacatacaaaacctggcattttcttgtgataagtttacatttttaggagagtggagctttcaatctgcccttttctcctttgtttttgtagttttcaccaaagatgatcaactagaaatgttaagtggctatgcaagcaaaagcatagataggttaaaaaaaaggatcagctggctgggcagggtggctcatgtctataatctcagcattctaggacagtgatgtgggaggattatttgaggctaggagttccagttcgaaaccagcttcgtaaacatagcaagacccagtctctaccaaaaaaaaaaaaaaaaaaaaaaaaaaaaaaaatatatatatatatatacacacacacacacacatatgtacacatacatatatatacatatatatgtatatatagaacacatggcaagagcaggaaatgggaagactaccttttttctggcagctatgtgttgttttgttcgaaagatggcaagtgtacaaccaaaccaatccacttgcttacagaaagaatgtttagtgtagttaagactaatttgacaacagataaaacagtctgtcagctattacaaagtaatcagctgaacactaatgctgttctgtctgctcacaagagataaagataccctctcatggaataaacaccttgcttagaattcatataacaaagaagtaaccttataactgctctctagtctgccttatttgtgtcatagagtaagatattccttgaaagcccattaagtggaatagactttctgaaaataagagttctttacctcagtcctcctctaatttggttgagaggaggtaatgaaaatggggacaggataaaaggtggcaactaaatttaaagcacagaagaaatgatttccttctagctatgagaatagtcaaattgagcttgccaggctgtctcattcctaacatgtaattcatgatttagccactaaatttctaaggagatcataagaaattaagaaaaacgtttaagtctagcctctgcgtggtagacaggtatggggagggagaatgcttttcccctcccagtaataaaaaaaaaaaaaaaaaaaatatatatatatatatatatatatatatatatatatatatatatatatatatatatagttttactaggttttcatggataagtttttaaatgtaagacaggaaagggatctatttgatgtctatcttcagatatattggcagttttccttaagctatttagttcctcatctgttgctttttcattttgtatactgcaagttcccaggcaactcgaatttgcaaacacagccatggatacactatttaccttacagtagtttcctgggaatctaagtctggtttttgttattcttccctcccctccactgcataatcatgtataactagcaacatttatggttataggttgatttcctaagtgtggctgatggtagcctctagtttgaagtgagggaagaatgagtagtcaggaactggtcactttgaatgtgggagggaagatattcacgacaaggttttctacgataaagcagtttcctgcttctcgtttggcacgcatgttagatggcagagaccaagaattcaagatggttggtggccagatttttgtagacagagatggtgatttgtttagtttcatcttagattttttgagaactcaccagcttttattacccactgaattttcagactatcttaggcttcagagagaggctcttttctatgaacttcgttctctagttgatctcttaaacccatacctgctacagccaagacctgctcttgtggaggtacatttcctaagccggaacactcaagcttttttcagggtgtttggctcttgcagcaaaacaattgagatgctaacagggaggattacagtgtttacagaacaaccttcagcgccgacctggaatggtaactttttccctcctcagatgaccttacttccactgcctccacaaagaccttcttaccatgacctggttttccagtgtggttctgacagcactactgataaccaaactggagtcaggtattttgtactttgcagtatttctcttgtataccagtttgtgatgttttctctaaaaacttgaagttcctcaggcctgtaacttctggaaaagatgattattcaaaataatgttttggggtaaccagtggagttgggtagaatgaccaaataattattttccaaactgggatactttttagagtgaaaggggctattattaggtgggacaaaaggaataaatgaagactgcccagaaaaaactgagactatggacattcaaatcatgggagaaaataattttgtagattatgttccattgctaatgaatttgacttagaaaagaattgccttatttttaagagattgtttcagtggttcacataaaggctcgctcactggtttctcttgagttccttacacactatataagttgttctttcagttttatgattcaactactgtttttccttcagctgactttatttttaaacacccttaaagacagatatatctcatggcaaatttggtatcctgttacagccttggctcttaaacaactcaaaatattgggataggctgtcagtatgttaaggatagttgctcctgagtcaattcttcacttactccctctgttgttcttggctggatcctaacgctgatttccactctgctgtcacaaacatttttccccccgtaaaatgtcttaatgctgtcctaccattattttaccaactgtgaaagctggctttaatttttaggaggaaaagaaaagcctgcatgtgttctttattggtatcatttaaaatatacttttttttttttttttggtaaaggtaggcgtattttaagatattttcttaacttgagcagtagccaacaggaaggataccagtgtctctctctcttagcgacacactccttggtcttgcttaccaactggaggacactaggtagaataaccgagtatgacaattcttaattgtttacattttataacttcctgtccttcaaaagagtttgaaatgtcattttgggaaaagagagccagtcaagctagtaggctgattgtgaagaaaatctaataccttatctttatctcaaacctctgtacaactttattttcattgatgggatactttaacaaaaatgaaattttttttggtttttaaaatatgagtgattatgacctctttggggatcatgcttcaaaaagtcagaaacctagagacaaaactgtcattgatttttaagaagaaacacactaggtcaaaagaagatgtcctggaaatatgaagtactctttaaaaaccatgcatttggagaaagtaattgtttccttgaaaaacatgattaaaaactaaaactgggatgttcctgtgtgtacacagtgccaaatggttttccctttttatgttgtgttttagaaacagcacgaaagttttttccattttaaagtgagaaaacattatatttagacttccataattccaaaatcagaagctatttttaaaattagcattttcttgcatcaccaaatggtattcaattgtttgaagctcaaaatttttaccattccataaatgtttgtgaatttttagacagtgccaatttaaaagtagagatagccaatctgaatacggtgaaattatggggatctctggtgattgggatgaaaactctggccttaaaaggtccacttttagtatataattgcctaattagcaatcatttttattttttgctcactccctggtctgaatctatctgtctattcagatattttttggtaggtttggaaaatggagaagtgagcctaattggtgcctaattgtctggtgtatcattcactttattcagtttgttctatcaatatgatttacccctcaaggttaacctagcaggttgctcagttattatctctcaaggtcacagtactagaaatacttggcttgcatctttcagatgccattcatgttatcaagctcaaattatagttggtcacaggattctaaagtctttatttgacttctcctttttgaactggctcaaatggaaaagtgtagttgcttttaaatgttaaaaataagtttaaactttatatttcccattggtttcccctattttgtcctttctttgtgtgcttgaaatattttatttttcagtttgtcctcatagggaatcaagtattttagctaggtgatgtcttgcaagtacgttccactttgttacaatctactatctgtatatactatttgtatcttaattcttttatgagatgttctgtaacatttttctcactttgacaaatgtttttagactgtacagtcaagatctggcgcttgggggtaagtggaatgatttgctaatattgagaatctgttgtatcaaacataataaactttttttgagatgtgaaaaaaaaaaaaaaaaaaaaa

SEQ ID NO: 1075 - DNA, 5888 bp, HOMO SAPIENS
acttctgacagtggggaaagcagctgtgtgtgatagcttggaaggtttactgctgcctcaagtcctcttctctgcagttgaggtttcaggtttcaatcctcccaataccacaagacagagcacggggcggctgccgcctccgcctccgcgccttaacctaggcggcttgccgaagatctcagccccgcggccgcgcgctcgccctgccctagaccagggttgggcgcagcggcggaggtggcttctgggctgcgcgagctgggagagctgggaggcggcgatcgcagctgggccgggacttccttcctccaccgcacggcaacaaaacaaccctgcggcaggcactgagtgcttcgcagctgtctgggcgagaggcacagcgatgggctccgtgctgagcaccgacagcggcaaatcggcgcccgcctctgccaccgcgcgggccctggagcgcaggagggacccggagttgcccgtcacgtccttcgactgcgccgtgtgccttgaggtgttacaccagcctgtccggacccgctgtggccacgtattctgccgttcctgtattgctaccagtctaaagaacaacaagtggacctgtccttattgccgggcatatcttccttcagaaggagttccagcaactgatgtagccaaaagaatgaaatcagagtataagaactgcgctgagtgtgacaccctggtttgcctcagtgaaatgagggcacatattcggacttgtcagaagtacatagataagtatggaccactacaagaacttgaggagacagcagcaaggtgtgtatgtcccttttgtcagagggaactgtatgaagacagcttgctggatcattgtattactcatcacagatcggaacggaggcctgtgttctgtccactttgccgtttaatacccgatgagaatccaagcagcttcagtggcagtttaataagacatctgcaagttagtcacactttgttttatgatgatttcatagattttaatataattgaggaagctcttatccgaagagtcttagaccggtcacttcttgaatatgtgaatcactcgaacaccacataattttattaaaacgaagggaaaagggaccactgaattgcaccatttaagatgctgcttgaacaaatgggagggaagttgtcaatgattgatgggcaaaaatgtacaacacagttatgtgtttgtccatgtttattgttatagtgcatttaaaaactgctttaattttaatggtttaaatctgttttacatccttgagattcttacacatctaacaacaaaaaaaattatctacatcagtcattgttacatggaaaagacaggtggtaggcaagtaggtggaggatctcggtttgcaaattagataatactctgtgtataatgctacatatcaataactaccatcatggttaggcacgataactaatctttgttctgtgtaaaaaaatatggagagtgaaacaaagtgcagacattcaaagaaataagaaatctgctccaatgctcttgttctaatctctaataggttaacgttaataatcttgtatgggagttggaaaggaaaattttggaagtcaagaaagtccatttaggccggacgcggtggcttacgcttgtaatcccagcactttgggaggctgaagcaggcggatcacaaggtcaggagttcgagaccagcctggccaacactggtctctgtgaaactccgtctctactaaaaatacaaaaattagctggacgtgttggcgggcatctgtaataccagctacttgggaggctgaggcagaagaatcacttgaacccgggaggcagaggttacagtgagctgagatcgcaccagtacactccagcctgggtaacagagctagactccatctcaaaaaaaaaaaaaaaaaaaatccatttaaccaaattgtcttacataatactgtaacaaaacaaattttgtgttagaaaagtatacttaattctttgactttttataactgcatacataagaattcaatatttttcaaatatttatagcttatttagaaatatttctataatataagcaatttcttaaaaaccatcagatgatacttacagtataagtattcacatccagactttttagtagaaaaccctaagggctttgatatcttttttgattgtaacattttaaaaattatgaaataaaagtactgaaaaccagacacaaaatttatagctgaatgccttattataaggaaatactcttttaggactcagccagtcaccccacgtgtcctttttgtgtcctgtcacaattacaaccccacaaaagtaactgctagactgatttaaatggtaatcactttgttgcatttgattactgctgccacacctaaatgcatatatctatattttaatattatcaatttaaagttgttattaaatgtatattttattttacatctcttttttaatctagaagttcctccttctttccagttccttaaaatttacctggtgaagaacctgatcctaggacctatagagtttcccatactttgtattttgctgattgcacactcatggcacggttcagcacattgccctgtcctctcgatattagcacacagtgcaggttcaggcacattgaatttgagaagacttaggttcagtcctttggcaagactgtaaatcacggtgtctttctttccttcctccttcttctctctctctctctctctctctttccttttctttctctttttttcagagttgcactctgttgcccaggctggagtacagtggcacgatctcgactcactgcaacctccatctcccgggttcaagcagttctcctgtttcagcctcccaagtagctgggactacaggtgcacgccaccatgcccggctaatttttgtatttttagtagaggggtttcaccataatggtcaggctggtcttgaactcctgaactcaagtgatccaccagccttggcctcccaaaatgctgggattacaggcatgagccaccatgcccagctaatttttgtatttttagtagagacagggtttcaccataatagccaggctggtctcaaactccttaccttgtgatccgcccacctcagccttccaaagtgctgggattataggcgtgagccactgtgcccggcctacagggtttttatctaacctttctgttacaactgtacctctccttctgtactgaaagtcctggttttcaagaacacagggcacgatagaattagaacatcccacaattactcatttcttttatttatcttacacttacagctgtctcagaataacaatagaaatacaaccacaaataatatggcaattgaaacaattaaaaagttttcatttgcttttctcattctttcccaatttttttttttttttgagatggagtctcgcgctcttgttgcccaggctggagtgcaatggcacgatctcggctcactgcaacctctgcctcctggattcaagcaattctcctgcctcagcttcccgagtagctgggattataggcatgcgccaccacgccctgctaattttgtatttttagtagagtcaggatttctccacattggtcaggctggcctcaaactctcgacctcaggtgatccgcctgcctcggcctcccaaagtgctgggattacaggtgtgagccactgcgcccgacatcccaatttttaaaatagttatactatgtcaacattttcagaacatactggtatagcatactgtactttcttccttttatcccccatttattcttagttcttcaactatatatttaacacttgcccccagttttgttttgttttgttttgaggaggaatcttgctctgttgcccaggctggagtgcagtggtgtgatcttggctcactgcaacctccgcctcccgggttcaagtgattctcctgcctcagcctctcgagtagctgggattacaagtgggcaccaccacacccggctaattgttgtatttttagtagagatgggttttgccatgttggccaggctggttttgaactcctgacctcaagtgatccacctgtgttggcctcctaaagtactgggattacaggtgtgtgccaccgcgccaggcaattgcccccagtttttatttgatggctctgactgtttctcatatctgactctttaattatgaatccagggcatagattagtatctccatcttgtaaggatgcaaagaagccatgaaaataagtaatatcaactcctgaggataaaacgttacttgactagagttagctttttaattgtaatcatttataaacttctttgttccttacatataagcatagtcataaccatggtacccaaaattttctataagttattgtaactccttaaaggtcttgctacagttcttttatccagtacaaataattgggaaaatgtaaagctgaatgaaatctagtgagcctcatatcctcccttttagatattgattttaagtttgcttttcacagctgctaaaaagtaacaactgatttttagttccacaacctctctttcttcaatttagatggatcatacaataaagcaaaatctggctggttacagtggctcacacctataatcccagcactttgggaggctgaggtggagggtctcatgagcccaggagttcaagaccaacctgggcaatatagtgagactctttctatttaaacaaaaacaaaaacaaacaaacaaacaaacaaaaagctgggcatgatgcacacctttagtttcagctactaaggaggctgaggttggaggatcacttgagcctaggaggtcaacactgcagtgagctatgatcatgctactgccctccagcctgggcaacagagcaagaccctgtctccaaaaacataaataattaaatataaataaaaataaagcaaaatctgttgggaaacgagaaaaaggagaggaatttttcaggaataatcataaaaagaaatgatcatcagactgaaagtccagagcctgagaaatgaaaacatatttttaagcattggtgttgaccatgcagacaaacttttgttaattcagagcgatacaaaaggcactttgaatctataaaacttgaaaaagttaaaaattgtatgtcggataaagctttaagtcatctgtcactattaacctcagtgcagcaattctgactcctgtgcctggattccttttatgataattttgccacctacaggacagattaggtgctggtcgcctgaattattttgtgttctgaattattttgagctctaaaatggtaaagtacaaatactcattgttttactgtgcctttggccttttataaaaaggtatttataattcgttgataaaaaccaatatttgaagctgttgattaccaacaaaaaagtttcactctctttatagtgcttcaggatacaactttttcagggccttattagagaaaaactgattcacatgttattcttctaaagctaaattattaaaatgtaggttgaaagattggattgattgtgaatctacactaaagatatggttccaggcagacctccttagagacctccaggcagacctccttactgtcttcagtgatgtttaatttcattactgttactgggtgccaagtgtctttcatttggaagtgaacttactccagttattgaatgtttatcatatcataatttgcatttttccaacattgaaggtattttaaaaagtcactaagagattcattcttttattattcaactacaaaaaaatagtgtaatgatcagaatttaaaatgtgtgattctttttcttctgtaagtatgtattgctatgataaataaaaaatggcaggaccattgtttttattaaaat

SEQ ID NO: 1076 - DNA, 3531 bp, HOMO SAPIENS
agcggagcgccaggcagcgcggagcggaggccaggcccacagccgctccgcctcccggcccgcagatccccgacggccgcaccgcgggctcctctggcccgcaagaacacgtgcatggcgtcctggggaaggcgctgagtgcggagtcgcggcgccgcacgcggcaccatggccctggagcaggcgctgcaggcggcgcggcagggcgagctggacgtgctgaggtcgctgcacgccgcaggcctcctggggccctcgctgcgcgacccgctggacgcgctgcccgtgcaccacgcggcccgcgctgggaagctgcactgtctgcgcttcctggtggaggaagccgccctccccgccgcggcccgcgcccgcaacggcgccacaccggcccacgacgcctccgccaccggccacctcgcctgcctgcagtggctgctgtcgcagggcggctgcagagtgcaggacaaagacaattctggtgccacagtcttgcatctggctgcccgcttcggccaccccgaggtggtgaactggctcttgcatcatggcggtggggaccccaccgcggccacagacatgggcgccctgcctatccactacgctgccgccaaaggagacttcccctccctgaggcttctcgtcgagcactaccctgagggagtgaatgcccaaaccaagaacggtgccacgcccctgtacctggcgtgccaggagggccacctggaggtgacccagtacctggtgcaggaatgcggcgcagacccgcacgcgcgcgcccacgacggcatgaccccgctgcacgccgcggcgcagatgggccacagcccagtcatcgtgtggttggtgagctgcaccgacgtgagcctgtccgagcaggacaaagacggcgccaccgccatgcacttcgcggcgagccgcggccacaccaaggtgctcagctggctgctgctgcacggcggggagatctcggctgacctgtggggcgggaccccgctgcacgacgccgccgagaacggggagctagagtgctgccagatcctggtagtgaacggcgcggagctggacgtccgcgaccgcgacgggtacacggccgccgacctgtcggacttcaacggccacagccactgcacccgctacctgcgcacggtggagaacctgagcgtggagcaccgcgtgctttcccgggatccatccgcagagctggaggctaagcagccggattcaggcatgtcctcacccaataccacggtgtcggtccagccgctgaactttgacctcagctcgcctaccagcaccctctccaactacgactcctgctcctccagccactccagcatcaagggccagcaccctccatgtgggctttccagcgctagagctgcagacatacagagctacatggacatgctgaacccggagctgggcctgcctcggggcacgattgggaagcccacacccccaccacccccacccagcttccccccgccacccccgcccccaggcacccaactgcccccacccccacctggctacccagctcccaagcctcctgtaggaccacaggcagctgacatctacatgcagaccaagaacaaactccgccacgtggagacagaggccctcaagaaggagctgagctcctgtgacggccacgacgggctgcggaggcaggactccagccgcaagccccgcgccttcagcaagcagcccagcacgggggactactaccggcagctgggccgctgccccggcgagacgctggccgcacgcccgggcatggcgcacagcgaggaggtgcgtgcccgccagcccgcgcgcgccggctgcccgcgcctcggccctgccgcccgcggctcactcgaaggcccctccgctcccccgcaggcggcgctgcttcctgggaaccatgttcctaacggctgcgccgcggaccccaaggcgtccagggagctgccaccgccgcccccaccgccgccgccgcccctgccggaggccgcgagttcgccaccgccggccccgcctctgcccctcgagagcgctggccctggctgcgggcagcgccgctcctcctcgtccaccggcagcaccaagtctttcaacatgatgtccccgacgggcgacaactcggagctactggctgagattaaggcaggcaagagcctgaagccgacgccccagagcaaggggctgaccacagtgttctcaggcatcgggcagccggccttccagcccgattcgccgctgccttctgtgtcacctgcactgtcaccagtccggagccccacaccgccagctgcggggtttcagccgctgctcaatggaagcttggttcccgtgccgcccactactcctgcgccgggagtgcagctggacgtggaggctctcatccccacgcacgatgagcagggccggcccatccccgagtggaagcgccaggtgatggtgcgcaagatgcagctgaagatgcaggaggaggaggagcagaggcggaaggaggaggaggaggaggcccggctggccagcatgcccgcctggaggcgggacctcctgcggaagaagctggaagaagagagggagcagaagcggaaagaggaggagcgacagaagcaggaggagctgcggcgggagaaggaacagtcagagaagctgcggacgctgggctacgatgagagcaagctggcgccctggcagcgacaggtcatcctgaagaagggggacatcgctaagtactagaggccgcagactcctgtccgcagcctcgcagctccgtggggccctccgccccagccccagccagccaggccctggtggaaaggctgggagccgcacagccctcccctcctgcgctggaaaccctccctgacccccaccctggccccccgtatccccagcccttggcaacactggagtgcacacgccgccacggttgcccagaaaaagtgcccaagctgctgacgcaaacaacaacaaatgctgcttatttgcatgccgacttacatatatttgcatgttcgttgactatcaaagagtgcagagctctccccagccccgtgggtggtgactttgttttcctgcggggctcagccccctccaggatgcagccccctcccccgcaccccggaaccggcgtcgctggcgcatcctgggtggaggcaggccccgagctcggggaaggggttttcccttcctctctgacccagatctgcgcgcggcctagcccgggcctcatttcttatccccgccaagggtttcctctcagtcatttgtttaccagaaacatgaaaactgcctgtctggccgggccgcacttgtggcccccgggaccccacctctggccccacctccctcaagtctgcgccccgtccccagccagacccactcgctgccgggaccctttcactgccccggtggagtgaatagaggatgaggggccctgaccctgtgtctccaactgctgcaccccatcccgaccctgtctccgccacctcgcagccccattaaagcgctctcatctgggctccggttcactca

SEQ ID NO: 1077 - DNA, 1605 bp, HOMO SAPIENS
cagcgccggggcggagggtacgatggagaatttcacggcactgtttggggctcaggctgacccaccaccgcccccaaccgcactcggcttcggaccaggaaagcctccacccccgccaccgcctcctgcgggcgggggacccggcacggccccgcctcccaccgcggccacggctcctcctggcgcggacaagtcaggagctggctgtggccctttttacctcatgagggaactgccaggtagcacagagctgacaggcagcacgaatctgatcacacactacaacttggaacaagcctataataaattctgtgggaagaaggtgaaggagaagctaagtaacttcctgcctgacctgccagggatgattgatctgcctggttcccatgataacagcagcctccgctctctcattgagaagccccctattctcagtagctctttcaatcctatcacagggaccatgctggccggcttccgcctccacactggcccgttgccggagcagtgtcgtctgatgcatattcagcctcccaagaagaagaataagcacaagcacaaacagagccgtacccaggatcctgtccccccaggtaaacccagttaagttccgtatggagctctggactcctaaattcccctgaagaagaaaccaatgtactgtggtctcttgggacttgggacagggactctagcagcacctctgtatcctttctggccatttggacaaaagcagttgccccgacttgggattttcctgtagtcttcagtggttcataacagtagaggattttgagctttacaggtgataggtacctaatgtctcctacagaaacaccatctgattcagatcacaagaagaagaaaaagaaaaaagaagaggatcctgaacggaaaaggaagaagaaagagaagaagaaaaagaaggtagagtagaggcctattgccacaacccagtgagtttccccagatctcacccctgtcctaaataccctagagttctttgcctcaagttggacccaagattgaaaacccaaggcaggttgcaggtttctcctgtacagcctgatcaaagccaaggctagttcctagttgttcttaccctgcttctttctcccccagaatcgacatagtccagaccacccaggtatgggcagctcccaggccagcagcagcagcagcctacgctaataggaccactggactctttgccaggatggcttttcctgctgtactgaacctgctgataaaagctgccttccaggctcttggacactgccttgggagcatcctgcagctgggacagaggccagctcctgttgggctcagttgagactaagtaaattaggagagagagggacatgcttttgtaggctcatcccagttggttttctcatggacatctcttcctctcccaggaagcttacaattttcttctctctcttttgtgcaatttgtctgatttaggacttgttctgtgttttctttaaaaaaaaaaaaattacatttatcaaaaaaaaaaaaaaaaaaaaaaaaaaaaaaaaaaaaaaaaaaaaaaaaaaaaaaaaaaaaaaaaaaaaaaaaaaaaaaaaaaaaaaaaaaaaa

SEQ ID NO: 1078 - DNA, 2015 bp, HOMO SAPIENS
cacacacgcacacacacacacacaaaccttcactggcttcccattgcctctcttgagtgtcagcgcctcggtcggtcattcaaggctccgtgatgtgacttcaagactttcaggctgtgtctccacacatctccccatatgcttcctcaccccctggtagttctttatatatcaccttgaaatgtctctcttctcatctcctatctccgcctgatgcaatccttctgtgcctcatggcccttcctggtagttttttattttgttgttgttgttgttttatttaattgaggcaggggcttgccctttagcccaggagaatgcagtggcatgatcacagctcactgctgcctcgacctccgtcagcctccctagctcaacgatcctctcacctcagcctcctgagtaactgggactacaggcacagctcactatgcccagctaatttttgtattttctgtacacacagggtttcatcatgttgtccaggctggtcttgaactcctgggctcaagcaatcagcccacctctgcctcccaaagcgttgagattacaagcgtgagccaccattcctggaccctcgtagtttttctggagcctcgtgatttgatatgatcttcctgccgctgattcctcacagtgttggcttgccacacctccaggggcactgatcacattctacctggcattatttcatctgagtccctgtcctagcccttctgcccattagactgtaaccttgtttagggaaagacctgtgtcttactcatctgtgattttgttgttgttgttgttttgagacagggtcttgccctgttgcccaggctggagagcagtggtgcaatcttggctcactgcagcctcaacctgttggggtcaagccatcctcccacctcagctttccaagtagctgagactacaggcctgtgccaccacacccagctagttttttgtatttttagtagagatggggttttgccatgttgcccaggcttctcttgaactcctgagctcaagggatctgcctgcctcggcctcccaaagtgctgggattacaggcgtgagccactgtgcctgacccactcacctgtcattgtagtacttaagatgccttgttcatttattgtgcctgtgcaataaatacaccttgatttgagtttacaaagattctcagcagttggtggtcatcctcatctcctgggcgggggcctcctggtgtggccagtatctgaattagtctcataactcatgttcactttttaaaatcggagcttcccagacctcagttttgttttgttattttccattatctgcagctgtctcctttcccctctctcacctatactctactgatcagtgactgctggctcctttgttacccatccttctctttctccacattttttctcttctcatccctttcagttctggactgtttccttcttcctccctgtctttcatttagtcattcattgaatgtacttactaagcacatatagcataatcaggctgtgttgggtaggcatcccgagttctatgagataaagaaagaatgggatatgattaccaattttaagaagcatctaaaacaacctgttatgttttagcaaattgcccccaaaggacccattagggaggaaaacgttcatgtcctttttgcgtatcatctcaagcagtacccatgatggctgggatcccagaacccacctttgagaatgctgccgtatttgcgtgtggttgacaaggttgggccagacactcaggaaatagggttgtcgtcctacctcccccactaacttcctgtaagaacttcagcccctctcaggacctttttctttaccaataaaattcagaaattgggctcaatcagtaattcccaagttattttccaaagaacatgaattttgtggaactttaatagatatcatgcaaaaaaaaatgtgggagggattgttccatggtcaaatggtcttggaaataactcgtttaaacaaaaataaaactgtttctttacccac

SEQ ID NO: 1079 - DNA, 6915 bp, HOMO SAPIENS
cctctgagcccagccctccctagcatcaccacttccatcccattcctcagccaagagccaggaatcctgattccagatcccacgcttccctgcctccctcaggtcccagctcttgctcctgcctgtttgcctggaaatggccacgcttctccttctccttggggtgctggtggtaagcccagacgctctggggagcacaacagcagtgcagacacccacctccggagagcctttggtctctactagcgagcccctgagctcaaagatgtacaccacttcaataacaagtgaccctaaggccgacagcactggggaccagacctcagccctacctccctcaacttccatcaatgagggatcccctctttggacttccattggtgccagcactggttcccctttacctgagccaacaacctaccaggaagtttccatcaagatgtcatcagtgccccaggaaacccctcatgcaaccagtcatcctgctgttcccataacagcaaactctctaggatcccacaccgtgacaggtggaaccataacaacgaactctccagaaacctccagtaggaccagtggagcccctgttaccacggcagctagctctctggagacctccagaggcacctctggaccccctcttaccatggcaactgtctctctggagacttccaaaggcacctctggaccccctgttaccatggcaactgactctctggagacctccactgggaccactggaccccctgttaccatgacaactggctctctggagccctccagcggggccagtggaccccaggtctctagcgtaaaactatctacaatgatgtctccaacgacctccaccaacgcaagcactgtgcccttccggaacccagatgagaactcacgaggcatgctgccagtggctgtgcttgtggccctgctggcggtcatagtcctcgtggctctgctcctgctgtggcgccggcggcagaagcggcggactggggccctcgtgctgagcagaggcggcaagcgtaacggggtggtggacgcctgggctgggccagcccaggtccctgaggagggggccgtgacagtgaccgtgggagggtccgggggcgacaagggctctgggttccccgatggggaggggtctagccgtcggcccacgctcaccactttctttggcagacggaagtctcgccagggctccctggcgatggaggagctgaagtctgggtcaggccccagcctcaaaggggaggaggagccactggtggccagtgaggatggggctgtggacgccccagctcctgatgagcccgaagggggagacggggctgccccttaagtgtcggtgaatagtgaggctggaggccggaatctcagccagcctccagcaccttccctctcaccatcccactgccccctcgctcccatgtttccacccggcaccctgatcctcacccgaatctcctttttttttttcttttgagacagagtttcgctttgtcgcccaggctggagtgcaatgcacgatctcagttcactgcaacctctgcctcctaagttcaggcgattctcctgcctcagcttcccgagtaactgagattacaggcacccaccaccatgcccagctgcttttttgtatttttggtagagatggggtttcaccatgttggctaggctggtctcaaactcctgacctcaggtgatctacctgcctcagcctcccaaagtgctgagattacagacatgagcctccgcgccttgcctcctcacccacctcttcactctgaatcctcatgaggcttctcagccctggatttcctgctgccatcctcacccagcacccacaactagcgcctgggcagggcagggctggcacctctcaacgtctgtggactgaatgaataaaccctcctcatccacccctatttatctccatcaccatttccccctctttcttgttcctggaaacggctgctgagtctccatcggccaaacttatctgccctgtgatttctttgacaattctccttttcccccagaacccaccctgggttgaccagagtctgggaagaaggacaagagaacccggcaaactccctcctaggattaactttgtaaagcacccttgccctgtagctgcaagggctgtggaacctgggcagcccgcaaccacctttagctctgggccccccaggccagcctggagcatggctgggtggggccaccagcccatgctctcaggcgggcctgtgatctttcccagggcacatggactgtaggctggccctggcccacaccaccacactctccccagccatggacagaggcagccagaggcctcacggtttctcctccgagtttctggctgggtgtagttctcagaaaccccagtgcctgcgtgtgtccactcgtgggtgtggtttgtgtgcaagagctgaggatttggcgatgcttgggaggggtagttgtgggtacagacggtgtgggggtgggaagtggtgcagagactgaagagggtcaacctgggcatgggggacacagggactgctgagaacgtgcgtgtcatctttgctctgatggggtggacatagcagaaaatctaactctgtctgtagccccatacagaatgccagggtgagcacagtggctggtgcctttaatcccagcactttggaaagttgaggcaggaggatcgcttgagcccaggagttcgagtctgaagtgagctgtgattgcaccactgcacttcagcctgggcaacagagtgagcccctgtctcaaaaaagaaaagaaaaagaaagccaggcttcatggaaagatcgtatgtgtgacccaaatatgagttcttcagctcagccatggtaatcccttccttgaagtctccatttctgcagtacacatgcatgtgcgctctctctctctctctctctctcacacacacacacacacacacacacacacgcgcgcgcgcgcgcgctctcctgcgaacagaggcagggggagaggggtttgccctggtctcggggactggtctggctggcgcttccccactgcacgtttccaggtttagtttgtctgtgtctcctcttccatcccaggggctgagccccttccatcctccaagaggaaccagtgagagtgagtgaaggaggggcctggagccagggacttcccctgtggggcctgggtggagaggggagaactcaatggtgctgcctttgagaccagcccaggctacagcccaggagcacacatgggccagggcagttggtatttcccgaggacaaagaggaaattttcaaagaggaagttgttgagttagagcttgcggtggctgagagcagacaggttgacctgcaaaaaaagacaggggaggcatgtgagtgtgacagccctgctctgtggcctgggcaggagatgggggaaagggtcaggtgggggatgggctcgtgcagtgggagaggagacggagggagggagcgggaaggggcttgcttagtgggtgggaagagctgagctcggatggaaccagcttctaccagccaggctgggcacccactgggctgcatctggtggccttttctgattgctatttggactcactgcagctgcagaatgacagaggccatgtccaaaatcccttagagacactgttgtcttagagttgttaaaataagagcccccatatcaggtttagaaaatactgtcaccgaacgaacgtcgctgtcctcagctccacctccctttcctttgacagatatggttgttttctaagccaggactggttttagtcaggtcctgggcgaatcctgaaaaaaagaggtagtacgggtaaggaaggcacccaacagggctttcacaatccagaaaatatcaaaatataagtgttaaaagagaggcacaggccgggtgcggtggctcacgcctgtaatctcagcactttgggaggccaaggtgggcagatcatgaggtcaggagtttgagaccagcctggccaatatgatgaaaccccgtttctactaaaaatacaaaagttagccaggcatggtggtgtgctcctgtaatcccagctacttaggaggctgaggccagagaattgcttgaaccctggagtcagaggttgcagtgagccgggatcatgccactgtactccaggctgggtgacaaagtgagactgtctcaaaaaataaaaataaataaaataaataaaagagaggcacaaacagtgttatgaatgcaccaaggaaaatggtgcattcataactctcaggtgaagcctaccaagccatgcgtgtgtgcacatatgtgtgtacgtgtgcatgtgcgtgcgtgcatgtgcgtgcgtgcatgtgcctgtgtgtgtatgtgtgcacatgtgtgtgcgcatgtgtgtgtgtgcgcgcatgtgtgtgtgcatgcatgttctcccatgcatgtgtactgtggcaagggagactttgaggaagagattccagtggctgagcagaagggctcgcattgccctggcgaaaggttggaaggcttcacctgagagtgtgtcgtggcctttgtcatatccactgcttgattcctttctttaaaaattatttttattgttttctacatatgagaaccaccacacctggctaatttttgtattttttgtagagatggggtttcaccatgttgtcccggctggtctcaaactcccgggcacaagagatccacctgcctcagcctcccaaaatgctgggactataggcatgagccactgcacccagccactgcttcattcctggtggctgctgtgcctggcatgttgcagatcctccatgaatatgcatttgaatgaatgaatgaatgaatgaatgaatgaatggagatgacgcctcagagattctttcttttgagatgaggtctcattctgtcacccagactagagggcagtggtgcaatcacagctcaccacagcctcaacctcctgggcctcccaagtagctgcgatcacaggtgtgcaccaacatgcccagctaatttttttttttaatttttaatttgtacagacagggtcttgctgtgttgcccaggctggtctcaaactcctgggctcaagtggtcctcccacctaagcttccccaaatactgggattataggtgtgagccactgtgcccaggcttgcctcagatatttgaaggctgggaaggattttgcaaagctgggaaaaggaaaaggcattcccagcagaggggatagcaggtggaaatacataattaaaaaaaaaaaacgtggagcagatccagcgcagtggctcatgcctgtaatcccagcactttgggaggcagagcagggaggattgcttgagtctaggagttcaagaccagcctgggtaacatagaaagaccctgtctctacaaaaacacaaaaaattagccaggcgtggtggtgcatgcctgtagtaccagctacttgagaagctgaggcaggaggactgcttgaagccaggagtttgagaccagcctgggcaacatagtgagaccccgtgtctacaaaaagtaaacatttatatatatattttttaaagtggagcagttcaatatagagtcttttttgaacaaacgtgaaatagatgtcttttttttttttttgagatggagttttcactcttgttacccaggctggagtgcaatggcgtgatcttggctcaccagaacctccgcctcctgggttcaaacaattctcctgcctcagcctcccaggtagctgggattacaggcatgcaccaccaaacccggataattttgtatttttagtagagatggggtttcaccatgttggtcaagctggtcttgaactcccgacctctgctgatccgtatgcctcggcctcccaaagtgctgggattacatgcgtgagccaccgtgcccgacaatagatgtcttttaattttctggaggaaaaagcaaagcaaaagaagcagtggatattttaagactaaaaaggaaaacaaaaaaaggagatagagcaggccagacgtggtggctcaacgtctgtaatcccagcactttgggaggccgaggcaggtggatcacctgaggtcaggagttcaagaccagcctgaccaacatggtgaaaccctgtttcaaaatacaaaaaattagctgggcgtggtggcgggcacctgtaatcccagctacttgggaggctgaggcaggagaatcccttgaacccaggaggtggaggttgcagtgagccgagatcacgccattgcactccagcctgggcgacaagtaaaaaactccatctcaaaaaaaaaaaaggagatagagcaaggaacagtaagaaaatagttgggtgcagtggctatgcggtggcactataggaggctgaggcgggcagatcacctgaggtcaggagttggagaccagcctgggcaacatagacccctatctctacaaaaaatttgaaatatgaaaaattagccaggtgtagtggtgtgcgcctgtggtaccagctactcaagaggcgaaggcagggaagattgcttgagcccaggagtttgaggctatagtgagctgtgatcatgccactgcactccagcctgggcaatagtgtgagactctgtctcaaaagaaagaacatggccaggcgtggtggctcacacctgtaatcccagcactttgggaggccgaggcagtcagatcatgaggccagtttgaaaccagcctggccaacatggtgaaaccctgtctctactaaaaatacaaaaattagccaggcgtggtggcatgcccccgtaatcccagctacttgggggtctgaggcagaagaattgcttgaaaccgggaggcagaggttgcagtgagccgagatcgtgtcattgcactctagtctgggcgacagagcaagactccgtcttggaaaaaaatttaaaaaaa

SEQ ID NO: 1080 - DNA, 6287 bp, HOMO SAPIENS
gcggcggcggcggcggcggcagcagcggggctgggggcggcgagtggcccgcgcgacacgcgccggcctcgaccctatgctttgattcgcgtggcgcaggcgcctactgccccgccggcggggcccgggcttcctgccgcgggatgttctcccgaaggagccacggggatgtgaagaagtccacccagaaggtgctggacccgaagaaggacgtgctgacccgcctgaagcacctgcgggcgctgctggataatgtggatgcaaatgatcttaagcagttttttgagaccaactattctcagatatatttcatcttctatgaaaattttatagcactggaaaatagtttgaaattaaaagggaataataagtcacaaagggaggagctggactccatcctcttcctttttgaaaaaatactgcagtttctacctgaacgaattttctttcgatggcattaccagagtataggctcaactttaaagaagcttctacacactggaaattctattaagataagatgtgaaggaatcaggctgtttcttctgtggcttcaagcacttcagacaaactgtgcagaagagcaggttctgatttttgcttgcctggtgcctggtttcccagcagtcatgtcatccaggggcccttgcacactggagacactcatcaatcccagccctagtgtagctgatgtaaagatatatccagaagaaatcactccactcctaccagccatatcaggggagaagattgctgaggaccaaacctgcttttttcttcaaatactgttgaagtatatggttattcaggctgcgagcttggagtggaagaataaggagaatcaagatactggttttaaatttctttttacattgtttcgaaagtattatcttcctcatttatttccatcatttactaagttaacaaacatctacaaacctgtacttgacatcccccatttgagaccaaagcctgtgtacattactaccactcgagacaatgagaacatttacagtacaaagattccatatatggcagctcgtgttgtttttattaagtggattgtaaccttctttttggaaaaaaagtatctaactgcaacacaaaacactaaaaatggagttgatgtattgcctaaaatcatccagactgttggtggtggtgctgtgcaggagagagcgcctgagctggatggtggtgggcccacggagcaggacaaaagccattctaacagcagcaccttgtcggaccgaagactcagcaactccagcctctgtagcattgaagaagagcaccgaatggtgtatgaaatggtacagcggattctcttgtcaacacgaggttatgtcaacttcgtgaatgaagtatttcaccaggcatttttgttgccttcctgtgagatagctgtaacaagaaaagtagttcaagtgtacagaaagtggattctccaggacaaacctgtgttcatggaggagccagatagaaaagatgttgcccaagaagatgctgaaaaattaggattttccgagactgatagcaaggaggcctcatctgaaagttctggtcataaacgatcttccagttggggacgcacatactccttcacaagtgcaatgagcagagggtgtgtgacagaggaggaaaatacaaatgtgaaagccggcgtccaggctttgttgcaggtatttttgacgaactctgcaaacatctttttgttggaaccatgtgctgaagttcctgtgctcttgaaagaacaagttgatgcttgtaaagctgttttgattatttttaggcgcatgataatggagcttacaatgaataaaaagacatgggaacagatgttgcaaatactactcaggataacagaagctgtcatgcagaagccaaaggataaacaaataaaggacttgtttgcccagagcttggcagggttactatttaggacgctcatggtagcttggatccgagcaaacctctgtgtgtacatttctcgagagctctgggatgactttcttggtgtgctgtcctccctcacggaatgggaggaacttataaacgagtgggccaacattatggactccttgacagcagtgcttgcaagaaccgtttatggagttgagatgacaaacctacctctggataaattaagtgaacaaaaggaaaagaagcaacgaggcaaaggctgtgttctagatcctcagaaaggaaccaccgtggggaggtccttttctctcagctggcggagccacccagatgtgaccgaaccgatgcgatttaggagtgccaccacgtctggagcaccgggagtggaaaaggcaagaaatattgttcgccaaaaagcaactgaagtggaggagtgtcaacagtcagaaaatgcacctgcagccggatctggccatctcacagtgggacagcagcagcaggtccttcggagcagcagcacctccgacatccccgagccgctgtgctcagattcttctcagggtcaaaaggcagaaaacacacagaattcgagttcttcagagcctcagcctattcaagagaataaaggacatgtgaagagagaacatgaaggaataacaatcttagttcgaagaagcagcagccctgctgaattggatttgaaagatgatttgcagcagacacaaggaaaatgtagggaaagacagaagagtgaaagtaccaacagtgacacaactctgggctgtaccaatgaggcagagctgtccatgggcccatggcagacctgtgaggaagacccagaactgaatactcccacagatgttgtggctgatgctgatgcccgtcattggttacaactgagtcccaccgatgcttcaaatttaacagatagcagcgagtgcctcacagatgactgtagtataatcgccggggggagcctcactggttggcacccagactctgctgctgtgttatggcgaagggtcttggggatcctcggagatgtgaataacatccagtcacccaagatccatgccagagttttctgctatctctatgaactctggtacaaactagcaaagatacgggataatctagcaataagcctggataaccagtcttctccatctcctccagttttgatcccaccactcagaatgtttgcatcatggctgtttaaggcggcgacactgccaaatgaatataaggaaggcaaactacaagcctacaggctgatctgtgccatgatgaccagacgccaggacgttctgccaaactcagatttcctggtgcatttttaccttgtgatgcacctgggattaaccagcgaggatcaggatatcttaaatacgatcataaggcactgtccaccccgctttttctccctgggttttcctggcttctcaatgctggtgggggacttcatcacggccgctgccagggtccttagcacagacattttgacggcgcctcgttcagaggctgtcactgtcctcggctctctggtctgctttccaaatacctaccaggagattcctttactgcagtcagtgccagaagtaaatgaggccattacaggaactgaagatgtcaagcattacctcataaatattttactgaagaatgccacagaagaaccaaatgaatatgcaagatgcattgctgtttgctcccttggggtctggatatgtgaagagcttgcacagtgtacaagccaccctcaggtgaaagaggccatcaatgtgataggagtaactctgaagtttcccaacaaaatcgtggcccaggtagcttgcgatgtccttcagttgctggtttcctactgggagaagcttcagatgtttgaaacctctctgcctcggaaaatggcagaaatcctcgtggccacagttgcttttcttttaccaagtgcagagtactcctcagtggaaacagacaagaagtttattgtgtccttgctactctgcctcttggactggtgcatggcattgcccgtgagtgtccttctccaccccgtgtccacagcagtcctagaggagcagcattcggccagagcccccttgctggattatatctacagggttttgcactgctgtgtgtgtggctcaagcacgtacacccaacagagtcactacatactgaccctggctgacttgtcatccacggattatgaccccttcctgccactggcaaatgtgaagagctctgagccagtccagtatcattcatcagcagaattgggtaacctgctgactgttgaagaggagaagaagagaagaagtttggagttgatccctttgactgctcgaatggtgatggcccacctggtgaaccacctggggcactaccccctcagtgggggccctgccatactgcacagccttgtcagcgagaaccatgacaatgcccatgtggaaggctccgagctgtcctttgaggtgttcagaagtccaaacctgcagctgtttgtatttaatgatagcaccctcatctcctaccttcagacacccacagaaggaccggtagggggatcaccagtgggctctctctctgatgtgagagtaattgtgagggatatctcagggaagtactcttgggatggtaaggttttatatggacctttggaaggctgcttagcacccaatggaagaaatccttcatttctgatttcgagctggcatcgtgacacatttggacctcagaaagactcttctcaagttgaggagggggatgatgttcttgacaaattacttgaaaacattggccatacaagtcctgaatgccttttaccgtcacagctaaatctaaatgaaccttccctaaccccatgtggcatgaactatgaccaagagaaggaaatcattgaggtcattttgcgccaaaatgctcaagaggatgagtatatccagagtcataacttcgattctgcaatgaaagtcaccagccaagggcagccctccccagtggagccccgaggacccttttatttctgcaggttattgcttgatgacttgggaatgaattcttgggacagaaggaagaattttcatctattgaagaaaaattcaaaattattgagagagctgaaaaatttggactcccgccagtgccgtgagacacacaaaatcgcagtgttttacattgctgaaggtcaagaagacaagtgttcaatcctctctaatgaaagaggaagccaagcatatgaagactttgttgctggacttggatgggaggtggatctctccacccactgtgggttcatgggtggccttcagcgcaatggcagcaccgggcagacggccccttactatgctacctcaactgtggaagtgattttccatgtttccactcgaatgccgtcagactcagatgattccctcaccaaaaagcttcgtcacttggggaatgacgaggtccatatcgtctggtctgaacactccagagactaccgcaggggtattatcccaactgcctttggagatgtttcaatcattatttacccaatgaagaatcacatgttcttcatcgcgataacgaagaaacctgaggttccattttttgggcctctgtttgatggagccatagtgagtgggaagctgctgccaagccttgtatgtgccacgtgcatcaacgccagcagggctgtgaagtgcctcatcccactctaccagagcttctatgaagagcgagctctgtatctcgaagcaataattcagaaccaccgcgaagtaatgacattcgaggatttcgcagcccaagtcttttctccctctcccagctactccctcagcggaacggattaaaacacgtaaaggtctcatttcaatatttgagcaaggggccctggcctccagtctgagtgctgacctcgaagagcccctgagtgaggaggagacagaacaccctctcctgcctctgccccgagccactaaacccagaatctccaggaaatttcgttgctgtactagtgccctcagcaggtcttcccattagtggacttctgaagcccatggtgaatcccactaccgtgtctcagatgggactcaaactaggctgtatcatcttgtcctgaaacctcacaaaccttggacttccaaagaagaaaagaaaaagtcaccaaaaaccagagatgaacccactgacacgtgggcactggtgtggctgctctgggcagatgacagcaggaaaagattctgcgctttcagggagggggcagagggcagcttgcttctgcaccccaagttgtttcttctcatttatgaacccaagcatgattcacaaaggggctggcaaaacaattgtctaattgaggaatctgatctgca

SEQ ID NO: 1081 - DNA, 2240 bp, HOMO SAPIENS
cggagcggggaacgaggccgtcggccattttgtgtctgcttcctgtgggacgtggtggtagccgttgggttgggaaagtgagggatttttggcctcgtttctcctgcttcttttctcctcccttttactttgccggtagaacacagttatgggtcgcaagaagaagaagcagctgaagccgtggtgctggtattgtaatagagattttgatgatgagaagatccttattcagcaccaaaaagcaaagcattttaaatgccatatatgtcacaagaaattgtatacaggacctggcttagctattcattgcatgcaggtacataaagaaacaatagatgccgtaccaaatgcaatacctggaagaacagacatagagttggaaatatatggtatggaaggtattccagaaaaagacatggatgaaagacgacgacttcttgaacagaaaacacaagaaagtcaaaaaaagaagcaacaagatgattctgatgaatatgatgatgacgactctgcagcctcaacttcatttcagccacagcctgttcaacctcagcaaggttatattcctccaatggcacagccaggactgccaccagtaccaggagcaccaggaatgcctccaggcatacctccattaatgccaggtgttcctcctctgatgccaggaatgccaccagttatgccaggcatgccacctggattgcatcatcagagaaaatacacccagtcattttgcggtgaaaacataatgatgccaatgggtggaatgatgccacctggaccaggaataccacctctgatgcctggaatgccaccaggtatgcccccacctgttccacgtcctggaattcctccaatgactcaagcacaggctgtttcagcgccaggtattcttaatagaccacctgcaccaacagcaactgtacctgccccacagcctccagttactaagcctcttttccccagtgctggacaggctcaggcagctgtccaaggacctgttggtacagatttcaaacccttaaatagtacccctgcaacaactacagaacccccaaagcctacattccctgcttatacacagtctacagcttcaacaactagtacaacaaatagtactgcagctaaaccagcggcttcaataacaagtaagcctgctacacttacaacaactagtgcaaccagtaagttgatccatccagatgaggatatatccctggaagagagaagggcacagttacctaagtatcaacgtaatcttcctcggccaggacaggcccccatcggtaatccaccagttggaccaattggaggtatgatgccaccacagccaggcatcccacagcaacaaggaatgagacccccaatgccacctcatggtcagtatggtggtcatcatcaaggcatgccaggataccttcctggtgctatgcccccgtatgggcagggaccgccaatggtgcccccttaccagggtgggcctcctcgacctccgatgggaatgagacctcctgtaatgtcgcaaggtggccgttactgatcttacttcatccagtctaataggtttggagattaaaccttttctcaacttgtgctgtttatatagccaagcttccgtcaataaggcttcattgtgactttaacaaacattatcttcccacataccaggaactattggacatttattttacatgggaaaaattatttggaataataaagcaggaacttttcctgaagttgcaatttatactgtatggcttctttttcatgtttcatctaggtttttagaagtgaagtatagtaaatttggttcgttaaattgtgaaggcgctggaattacatgaacataccaccctagtaaaggcaagttctgtaagcttacattgctatttgtaaagtttgccttcacagcatttcagatgctgttggacttcatgtccccaacctagcttggtgagggctgtaactgtttccaagtacttgtacattggaagtctgaatgtgtaacaatatttaatgtatttagagttcctcatgttgcagggtttaagaaatctgacccaccaaggtcatgtgacttttctgtactgttaaacttcattgtaataaaatgagagaaaaatttatgcctttttattcataacccagctgtggaccactgcctgaaaggtttgtacagatgcatgccacagtagatgtccacataataaaattcatagttaccaatgcaaaaaaaaaaa

SEQ ID NO: 1082 - DNA, 11202 bp, HOMO SAPIENS
aattctcctgcctgagcctcggcccaacaaaatggcggcggcagcggtgtcgctttgtttccgcggctcctgcggcggtggcagtggtagcggcctttgagctgtggggaggttccagcagcagctacagtgacgactaagactccagtgcatttctatcgtaaccgggcgcgggggagcgcagatcggcgcccagcaatcacagaagccgacaaggcgttcaagcgaaaacatgaccgctgagcccatgagtgaaagcaagttgaatacattggtgcagaagcttcatgacttccttgcacactcatcagaagaatctgaagaaacaagttctcctccacgacttgcaatgaatcaaaacacagataaaatcagtggttctggaagtaactctgatatgatggaaaacagcaaggaagagggaactagctcttcagaaaaatccaagtcttcaggatcgtcacgatcaaagaggaaaccttcaattgtaacaaagtatgtagaatcagatgatgaaaaacctttggatgatgaaactgtaaatgaagatgcgtctaatgaaaattcagaaaatgatattactatgcagagcttgccaaaaggtacagtgattgtacagccagagccagtgctgaatgaagacaaagatgattttaaagggcctgaatttagaagcagaagtaaaatgaaaactgaaaatctcaaaaaacgcggagaagatgggcttcatgggattgtgagctgcactgcttgtggacaacaggtcaatcattttcaaaaagattccatttatagacacccttcattgcaagttcttatttgtaagaattgctttaagtattacatgagtgatgatattagccgtgactcagatggaatggatgaacaatgtaggtggtgtgcggaaggtggaaacttgatttgttgtgacttttgccataatgctttctgcaagaaatgcattctacgcaaccttggtcgaaaggagttgtccacaataatggatgaaaacaaccaatggtattgctacatttgtcacccagagcctttgttggacttggtcactgcatgtaacagcgtatttgagaatttagaacagttgttgcagcaaaataagaagaagataaaagttgacagtgaaaagagtaataaagtatatgaacatacatccagattttctccaaagaagactagttcaaattgtaatggagaagaaaagaaattagatgattcctgttctggctctgtaacctactcttattccgcactaattgtgcccaaagagatgattaagaaggcaaaaaaactgattgagaccacagccaacatgaactccagttatgttaaatttttaaagcaggcaacagataattcagaaatcagttctgctacaaaattacgtcagcttaaggcttttaagtctgtgttggctgatattaagaaggctcatcttgcattggaagaagacttaaattccgagtttcgagcgatggatgctgtaaacaaagagaaaaataccaaagagcataaagtcatagatgctaagtttgaaacaaaagcacgaaaaggagaaaaaccttgtgctttggaaaagaaggatatttcaaagtcagaagctaaactttcaagaaaacaggtagatagtgagcacatgcatcagaatgttccaacagaggaacaaagaacaaataaaagtaccggtggtgaacataagaaatctgatagaaaagaagaacctcaatatgaacctgccaacacttctgaagatttagacatggatattgtgtctgttccttcctcagttccagaagacatttttgagaatcttgagactgctatggaagttcagagttcagttgatcatcaaggggatggcagcagtggaactgaacaagaagtggagagttcatctgtaaaattaaatatttcttcaaaagacaacagaggaggtattaaatcaaaaactacagctaaagtaacaaaagaattatatgttaaactcactcctgtttccctttctaattccccaattaaaggtgctgattgtcaggaagttccacaagataaagatggctataaaagttgtggtctgaaccccaagttagagaaatgtggacttggacaggaaaacagtgataatgagcatttggttgaaaatgaagtttcattacttttagaggaatctgatcttcgaagatccccacgtgtaaagactacacccttgaggcgaccgacagaaactaaccctgtaacatctaattcagatgaagaatgtaatgaaacagttaaggagaaacaaaaactatcagttccagtgagaaaaaaggataagcgtaattcttctgacagtgctatagataatcctaagcctaataaattgccaaaatctaagcaatcagagactgtggatcaaaattcagattctgatgaaatgctagcaatcctcaaagaggtgagcaggatgagtcacagttcttcttcagatactgatattaatgaaattcatacaaaccataagactttgtatgatttaaagactcaggcggggaaagatgataaaggaaaaaggaaacgaaaaagttctacatctggctcagattttgatactaaaaagggcaaatcagctaagagctctataatttctaaaaagaaacgacaaacccagtctgagtcttctaattatgactcagaattagaaaaagagataaagagcatgagtaaaattggtgctgccagaaccaccaaaaaaagaattccaaatacaaaagattttgactcttctgaagatgagaaacacagcaaaaaaggaatggataatcaagggcacaaaaatttgaagacctcacaagaaggatcatctgatgatgctgaaagaaaacaagagagagagactttctcttcagcagaaggcacagttgataaagacacgaccatcatggaattaagagatcgacttcctaagaagcagcaagcaagtgcttccactgatggtgtcgataagctttctgggaaagagcagagttttacttctttggaagttagaaaagttgctgaaactaaagaaaagagcaagcatctcaaaaccaaaacatgtaaaaaagtacaggatggcttatctgatattgcagagaaattcctaaagaaagaccagagcgatgaaacttctgaagatgataaaaagcagagcaaaaagggaactgaagaaaaaaagaaaccttcagactttaagaaaaaagtaattaaaatggaacaacagtatgaatcttcatctgatggcactgaaaagttacctgagcgagaagaaatttgtcattttcctaagggcataaaacaaattaagaatggaacaactgatggagaaaagaaaagtaaaaaaataagagataaaacttctaaaaagaaggatgaattatctgattatgctgagaagtcaacagggaaaggagatagttgtgactcttcagaggataaaaagagtaagaatggagcatatggtagagagaagaaaaggtgcaagttgcttggaaagagttcaaggaagagacaagattgttcatcatctgatactgagaaatattccatgaaagaagatggttgtaactcttctgataagagactgaaaagaatagaattgagggaaagaagaaatttaagttcaaagagaaatactaaggaaatacaaagtggctcatcatcatctgatgctgaggaaagttctgaagataataaaaagaagaagcaaagaacttcatctaaaaagaaggcagtcattgtcaaggagaaaaagagaaactccctaagaacaagcactaaaaggaagcaagctgacattacatcctcatcttcttctgatatagaagatgatgatcagaattctataggtgagggaagcagcgatgaacagaaaattaagcctgtgactgaaaatttagtgctgtcttcacatactggattttgccaatcttcaggagatgaagccttatctaaatcagtgcctgtcacagtggatgatgatgatgacgacaatgatcctgagaatagaattgccaagaagatgcttttagaagaaattaaagccaatctttcctctgatgaggatggatcttcagatgatgagccagaagaagggaaaaaaagaactggaaaacaaaatgaagaaaacccaggagatgaggaagcaaaaaatcaagtcaattctgaatcagattcagattctgaagaatctaagaagccaagatacagacataggcttttgcggcacaaattgactgtgagtgacggagaatctggagaagaaaaaaagacaaagcctaaagagcataaagaagtcaaaggcagaaacagaagaaaggtgagcagtgaagattcagaagattctgattttcaggaatcaggagttagtgaagaagttagtgaatccgaagatgaacagcggcccagaacaaggtctgcaaagaaagcagagttggaagaaaatcagcggagctataaacagaaaaagaaaaggcgacgtattaaggttcaagaagattcatccagtgaaaacaagagtaattctgaggaagaagaggaggaaaaagaagaggaggaggaagaggaggaggaggaggaagaggaggaggaagatgaaaatgatgattccaagtctcctggaaaaggcagaaagaaaattcggaagattcttaaagatgataaactgagaacagaaacacaaaatgctcttaaggaagaggaagagagacgaaaacgtattgctgagagggagcgtgagcgagaaaaattgagagaggtgatagaaattgaagatgcttcacccaccaagtgtccaataacaaccaagttggttttagatgaagatgaagaaaccaaagaacctttagtgcaggttcatagaaatatggttatcaaattgaaaccccatcaagtagatggtgttcagtttatgtgggattgctgctgtgagtctgtgaaaaaaacaaagaaatctccaggttcaggatgcattcttgcccactgtatgggccttggtaagactttacaggtggtaagttttcttcatacagttcttttgtgtgacaaactggatttcagcacggcgttagtggtttgtcctcttaatactgctttgaattggatgaatgaatttgagaagtggcaagagggattaaaagatgatgagaagcttgaggtttctgaattagcaactgtgaaacgtcctcaggagagaagctacatgctgcagaggtggcaagaagatggtggtgttatgatcataggctatgagatgtatagaaatcttgctcaaggaaggaatgtgaagagtcggaaacttaaagaaatatttaacaaagctttggttgatccaggccctgattttgttgtttgtgatgaaggccatattctaaaaaatgaagcatctgctgtttctaaagctatgaattctatacgatcaaggaggaggattattttaacaggaacaccacttcaaaataacctaattgagtatcattgtatggttaattttatcaaggaaaatttacttggatccattaaggagttcaggaatagatttataaatccaattcaaaatggtcagtgtgcagattctaccatggtagatgtcagagtgatgaaaaaacgtgctcacattctctatgagatgttagctggatgtgttcagaggaaagattatacagcattaacaaaattcttgcctccaaaacacgaatatgtgttagctgtgagaatgacttctattcagtgcaagctctatcagtactacttagatcacttaacaggtgtgggcaataatagtgaaggtggaagaggaaaggcaggtgcaaagcttttccaagattttcagatgttaagtagaatatggactcatccttggtgtttgcagctagactacattagcaaagaaaataagggttattttgatgaagacagtatggatgaatttatagcctcagattctgatgaaacctccatgagtttaagctccgatgattatacaaaaaagaagaaaaaagggaaaaaggggaaaaaagatagtagctcaagtggaagtggcagtgacaatgatgttgaagtgattaaggtctggaattcaagatctcggggaggtggtgaaggaaatgtggatgaaacaggaaacaatccttctgtttctttaaaactggaagaaagtaaagctacttcttcttctaatccaagcagcccagctccagactggtacaaagattttgttacagatgctgatgctgaggttttagagcattctgggaaaatggtacttctctttgaaattcttcgaatggcagaggaaattggggataaagtccttgttttcagccagtccctcatatctctggacttgattgaagattttcttgaattagctagtagggagaagacagaagataaagataaaccccttatttataaaggtgaggggaagtggcttcgaaacattgactattaccgtttagatggttccactactgcacagtcaaggaagaagtgggctgaagaatttaatgatgaaactaatgtgagaggacgattatttatcatttctactaaagcaggatctctaggaattaatctggtagctgctaatcgagtaattatattcgacgcttcttggaatccatcttatgacatccagagtatattcagagtttatcgctttggacaaactaagcctgtttatgtatataggttcttagctcagggaaccatggaagataagatttatgatcggcaagtaactaagcagtcactgtcttttcgagttgttgatcagcagcaggtggagcgtcattttactatgaatgagcttactgaactttatacttttgagccagacttattagatgaccctaattcagaaaagaagaagaagagggatactcccatgctgccaaaggataccatacttgcagagctccttcagatacataaagaacacattgtaggataccatgaacatgattctcttttggaccacaaagaagaagaagagttgactgaagaagaaagaaaagcagcttgggctgagtatgaagcagagaagaagggactgaccatgcgtttcaacataccaactgggaccaatttaccccctgtcagtttcaactctcaaactccttatattcctttcaatttgggagccctgtcagcaatgagtaatcaacagctggaggacctcattaatcaaggaagagaaaaagttgtagaagcaacaaacagtgtgacagcagtgaggattcaacctcttgaggatataatttcagctgtatggaaggagaacatgaatctctcagaggcccaagtacaggcgttagcattaagtagacaagccagccaggagcttgatgttaaacgaagagaagcaatctacaatgatgtattgacaaaacaacagatgttaatcagctgtgttcagcgaatacttatgaacagaaggctccagcagcagtacaatcagcagcaacagcaacaaatgacttatcaacaagcaacactgggtcacctcatgatgccaaagcccccaaatttgatcatgaatccttctaactaccagcagattgatatgagaggaatgtatcagccagtggctggtggtatgcagccaccaccattacagcgtgcaccacccccaatgagaagcaaaaatccaggaccttcccaagggaaatcaatgtgattttgcactaaaagcttaatggattgttaaaatcatagaaagatcttttatttttttaggaatcaatgacttaacagaactcaactgtataaatagtttggtccccttaaatgccaatcttccatattagttttactttttttttttttaaatagggcataccatttcttcctgacatttgtcagtgatgttgcctagaatcttcttacacacgctgagtacagaagatatttcaaattgttttcagtgaaaacaagtccttccataatagtaacaactccacagatttcctctctaaatttttatgcctgcttttagcaaccataaaattgtcataaaattaataaatttaggaaagaataaagatttatatattcattctttacatataaaaacacacagctgagttcttagagttgattcctcaagttatgaaatacttttgtacttaatccatttcttgattaaagtgattgaaatggttttaatgttcttttgactgaagtctgaaactgggctcctgctttattgtctctgtgactgaaagttagaaactgagggttatctttgacacagaattgtgtgcaatattcttaaatactactgctctaaaagttggagaagtcttgcagttatcttagcattgtataaacagccttaagtatagcctaagaagagaattcctttttcttctttagtccttctgccattttttattttcagttatatgtgctgaaataattactggtaaaatttcagggttgtggattatcttccacacatgaattttctctctcctggcacgaatataaagcacatctcttaactgcatggtgccagtgctaatgcttcatcctgttgctggcagtgggatgtggacttagaaaatcaagttctagcattttagtaggttaacactgaagttgtggttgttaggttcacaccctgttttataaacaacatcaaaatggcagaaccattgctgactttaggttcacatgaggaatgtacttttaacaattcccagtactatcagtattgtgaaataattcctctgaaagataagaatcactggcttctatgcgcttcttttctctcatcatcatgttcttttaccccagtttccttacatttttttaaattgtttcagagtttgttttttttttagtttagattgtgaggcaattattaaatcaaaattaattcatccaatacccctttactagaagttttactagaaaatgtattacattttattttttcttaatccagttctgcaaaaatgacctataaatttattcatgtacaattttggttacttgaattgttaaagaaaacattgtttttgactatgggagtcaactcaacatggcagaaccatttttgagatgatgatacaacaggtagtgaaacagcttaagaattccaaaaaaaaaaaaaaaaaaaaaaaaaagaaaactgggtttgggctttgctttaggtatcactggattagaatgagtttaacattagctaaaactgctttgagttgtttggatgattaagagattgccatttttatcttggaagaactagtggtaaaacatccaagagcactaggattgtgatacagaatttgtgaggtttggtggatccacgcccctctcccccactttcccatgatgaaatatcactaataaatcctgtatatttagatattatgctagccatgtaatcagatttatttaattgggtggggcaggtgtgtatttactttagaaaaaatgaaaaagacaagatttatgagaaatatttgaaggcagtacactctggccaactgttaccagttggtatttctacaagttcagaatattttaaacctgatttactagacctgggaattttcaacatggtctaattatttactcaaagacatagatgtgaaaattttaggcaaccttctaaatctttttcaccatggatgaaactataacttaaagaataatacttagaagggttaattggaaatcagagtttgaaataaaacttggaccactttgtatacactcttctcacttgacattttagctatataatatgtactttgagtataacatcaagctttaacaaatatttaaagacaaaaaaatcacgtcagtaaaatactaaaaggctcatttttatatttgttttagatgttttaaatagttgcaatggattaaaaatgatgatttaaaatgttgcttgtaatacagttttgcctgctaaattctccacattttgtaacctgttttatttctttgggtgtaaagcgtttttgcttagtattgtgatattgtatatgttttgtcccagttgtatagtaatgtttcagtccatcatccagctttggctgctgaaatcatacagctgtgaagacttgcctttgtttctgttagactgcttttcagttctgtattgagtatcttaagtactgtagaaaagatgtcacttcttcctttaaggctgttttgtaatatatataaggactggaattgtgtttttaaagaaaagcattcaagtatgacaatatactatctgtgttttcaccattcaaagtgctgtttagtagttgaaacttaaactatttaatgtcatttaataaagtgaccaaaatgtgttgtgctctttattgtattttcacagctttgaaaatctgtgcacatactgtttcatagaaaatgtatagcttttgttgtcctatataatggtggttcttttgcacatttagttatttaatattgagaggtcacgaagtttggttattgaatctgttatatactaaattctgtaaagggagatctctcatctcaaaaagaatttacataccaggaagtccatgtgtgtttgtgttagttttggatgtctttgtgtaatccagccccatttcctgtttcccaacagctgtaacactcattttaagtcaagcagggctaccaacccacacttgatagaaaagctgcttaccattcagaagcttccttattacctggcctccaaatgagctgaatattttgtagccttcccttagctatgttcattttccctccattatcataaaatcagatcgatatttatgtgccccaaacaaaactttaagagcagttacattctgtcccagtagcccttgtttcctttgagagtagcatgttgtgaggctatagagacttattctaccagtaaaacaggtcaatccttttacatgtttattatactaaaaattatgttcagggtatttactactttatttcaccagactcagtctcaagtgacttggctatctccaaatcagatctacccttagagaataaacatttttctaccgttattttttttcaagtctataatctgagccagtcccaaaggagtgatcaagtttcagaaatgctttcatcttcacaacattttatatatactattatatggggtgaataaagttttaaatccgaaatataaaaaaaaaaaaaaaaaaa

SEQ ID NO: 1083 - DNA, 3286 bp, HOMO SAPIENS
tagcagcgaatatactttacaccaaatctcagaagattcagaacttagatgagtggggcccaggacaggaaccctggagccttggaaggaggggagccccatctccccagaagagcagtgaccccagcagagaggggcctggtgtatcactggaggaaatagcctgccaaggaatacacgtcttcagaagaaattctgtgtggcttcaagagactgatcaaattgtgagaggaaaacagcctacccggtcctcttttcttcaatacaaaatgagataataggggttggaaggaaaaccttcaagacctatggaagtcagttgcagccagctcatcacatagaggtgcaggtgaggtgtattttcatcacggtggaaaattctggctgcttcatctccatctctagagccaatattggagcttttcaataaaagctatggcctcaaccaccagcaccaagaagatgatggaggaagccacctgctccatctgcctgagcctgatgacgaacccagtaagcatcaactgtggacacagctactgccacttgtgtataacagacttctttaaaaacccaagccaaaagcaactgaggcaggagacattctgctgtccccagtgtcgggctccatttcatatggatagcctccgacccaacaagcagctgggaagcctcattgaagccctcaaagagacggatcaagaaatgtcatgtgaggaacacggagagcagttccacctgttctgcgaagacgaggggcagctcatctgctggcgctgtgagcgggcaccacagcacaaagggcacaccacagctcttgttgaagacgtatgccagggctacaaggaaaagctccagaaagctgtgacaaaactgaagcaacttgaagacagatgtacggagcagaagctgtccacagcaatgcgaataactaaatggaaagagaaggtacagattcagagacaaaaaatccggtctgactttaagaatctccagtgtttcctacatgaggaagagaagtcttatctctggaggctggagaaagaagaacaacagactctgagtagactgagggactatgaggctggtctggggctgaagagcaatgaactcaagagccacatcctggaactggaggaaaaatgtcagggctcagcccagaaattgctgcagaatgtgaatgacactttgagcaggagttgggctgtgaagctggaaacatcagaggctgtctccttggaacttcatactatgtgcaatgtttccaagctttacttcgatgtgaagaaaatgttaaggagtcatcaagttagtgtgactctggatccagatacagctcatcacgaactaattctctctgaggatcggagacaagtgactcgtggatacacccaggagaatcaggacacatcttccaggagatttactgccttcccctgtgtcttgggttgtgaaggcttcacctcaggaagacgttactttgaagtggatgttggcgaaggaaccggatgggatttaggagtttgtatggaaaatgtgcagaggggcactggcatgaagcaagagcctcagtctggattctggaccctcaggctgtgcaaaaagaaaggctatgtagcacttacttctcccccaacttcccttcatctgcatgagcagcccctgcttgtgggaatttttctggactatgaggccggagttgtatccttttataacgggaatactggctgccacatctttactttcccgaaggcttccttctctgatactctccggccctatttccaggtttatcaatattctcctttgtttctgcctcccccaggtgactaaggaaaagagcagaagctccttggtttaaccagcacagagaaaataatataaatcccataagggcagacgtttggtctgttttcttcgctgtcatttccttagtagttagactagtgctgagattttagtggatatataattgatttatgttgaatatatggacttagcaactaaaaataccacagatggttaacctggactggggcaaagcaagataatagtgatgatcgtatgttgctgtctccatccgtctttaatgggtcagggctttgatttccaagggtcttcaggtgatgagtaggggtacccacaagtcagaaggtctgcgttctcctagtttgtttgctgccatttgaactcatgtagggaatgaaagaaagctgcaattatccgccaactgcatttaaaacaaaacaaaacagaaaaatcaaaataacattgactcttccaaccactgacatgttgtttaataatctaagcggcagtcctggaggctaccagacttactgagttctacctgagaaacagccaagcaaagtgtgagagaagggttaagactggcttacaatgagatgcttcaaatgaaaagggaattatgagtaaaattgaactttgatgggggattcagttctggaaaagaatttggtattttccagtctgctaggaccaattaccttgaaatattttaaaatctcagtaaatagttattgctgaaatggctgttggcagttcttattatgattcagagaagagcaaatagaccttaacttcattttgaaaaagaccaaattaccatacccgagtgagtaatgacaggactacaactaaaacataaacaacattaatgatgaccataaaaagtcacaaaattgctaaatgttataatttagagttgacataaaaattgatggccaggcatggtggctcacgcctgtaatcccagaactatgtgaggctgaggcaggtggatcacttgaggtcaggagttcaacaccagcctggccaacatggtgaaaccctgtctctactaaaaatacaaaaattagccgggcatggtggtaggggcctgtaacccagctactcgtgaggccaaggcaggagaattgcttgagcctgcagcagctgcagtaagccaagatcatgctgtgcctcaaggaaaaaaaaaattaatgtttactgatatttgttgaagtcctacaacatcacctctgagaataggagaaatgaagcaacagttgtgtctagatgtcagaggcatggctgggcctccatctctgcctaagggagatataaaagagttcaaactattgcccatgttccccagggtcagaagttctaattatgatgatagaggctgggttgtaagtagtaagtgaagggtagcagaatatgccatctttggcataagaagtattttgagttgaagacaattgagaaaaaaaaaaaaaaaaaa

SEQ ID NO: 1084 - DNA, 2172 bp, HOMO SAPIENS
tactcccggagtcactcatcccttaagcaagcagggtggggttaggtgcgcgtgcgcggttttaatactcctccccgaactgccaactcttcacgcacgcgaagtaggccccaccctggctgggtttacgcgtgcgcactaacgggcctggtcccggaagaccacacgcgtgcgtggtggggactacggtgacagtaccccgggtggggcgagggccagtcatggcggagtcctggtctgggcaggccttgcaggctctgccggccacggtgctgggcgcgctgggcagcgagttcttgcgggagtgggaggcgcaggacatgcgcgtgaccctcttcaagctgctgctgctgtggttggtgttaagtctcctgggcatccagctggcgtgggggttctacgggaatacagtgaccgggttgtatcaccgtccaggtctgggtggtcagaatggatccacgcctgatggctccacgcatttcccttcgtgggaaatggcagcaaacgaacctctcaaaacccacagagaataagggaaggcagcagagggtctccaagggcatcactgggtctgctggcttctacactgggttctgctactccccagacctcagggacaactgccgggggttcagggttggtagcagggagtacccagtgcctacagggctgggcctcttctgcctcttaagcctgctccctcacccaggcactgggcaagtgaagagtttgcctgtactcttatctgggtgccttaaggagagagattgtgttcttcctctctcaggggtgataactcaggaagcctctgggttgggaagaccatcagttcttttgtcttaggtttcttttcctgtccctcttccatccccaagatgtgaccccataaaaatttttcctgagttggccaggcatggtggctcacgcctgtaatcccaacactttgggaggctgaggcaggcagatcacgaggtcaggagttcgagaccagcctgaccaacatggtgaaaaccccatctctactaaaaatacaaaaattagccgggtgtggtggcacacaccagtaatcccagctactcaggaggctgaagcaggagatttgcttgaacctgggaggcagaggttgcagtgagccaagattgcgccgttgtactccagcctgggcaacagagcaagacccatctcaaaaaaaaaatttttttcctgagaggaagcctgaggttgaccagctctggggtttgtaaggcaggtctgttttctcctaggccctgagttttctgaatctctggttttgctttgttggcaaggagccagggaatcctgacctgagccagaccttaagctctatggttatttagctggccattcaggtataaggcagggtggtgtacctgctggcactatccagatggaggcaccaaacacccacatacctggcccaaccagacttctcccgtgagccaggcaaaggaaattgtcatctgccaactgtcctactcatattcctctcagtccttcttgggggtaagctgattacctgaaggacagctgaacccctggggtagcctcctatccaccactgcttaagtgcctatgggaatgtgggtctgcaccttgtcccctcataggatggtaccaagcatttagtgcacagtggccccatcatagcctgcagcctcatcatttcccatctggacctggtacaaatgcacgtcacaggctcagctcctccccactagcattttctctaccttcaagaaccaggcagccctgccatgtcacaataggccaggggagtttccaaagatgtgggtggcaaatgcccctatagaaacaccagtacctgaaagcactgtagccctggacctgcctccttccctcggggccatacttctgtttccatctgctgggccaccagccactttagtgacccctgcctacttccttcctgttggatatcatacttccatctggctgcctttgcttaagccatctttgtggtagaggggccctggaattgcagctgtactgaggatgatgttattcacagcccctggcccacccactaatactactgcacagagtcaggatctcacatttcaccccaggctcaactgaggatgtggcttattaaacacggaagtgcaaaaaaaaaaaaaaaaaaaaaaaaaa

SEQ ID NO: 1085 - DNA, 4639 bp, HOMO SAPIENS
gagcgcgcacgtcccggagcccatgccgaccgcaggcgccgtatccgcgctcgtctagcagccccggttacgcggttgcacgtcggccccagccctgaggagccggaccgatgtggaaactgctgcccgccgcgggcccggcaggaggagaaccatacagacttttgactggcgttgagtacgttgttggaaggaaaaactgtgccattctgattgaaaatgatcagtcgatcagccgaaatcatgctgtgttaactgctaacttttctgtaaccaacctgagtcaaacagatgaaatccctgtattgacattaaaagataattctaagtatggtacctttgttaatgaggaaaaaatgcagaatggcttttcccgaactttgaagtcgggggatggtattacttttggagtgtttggaagtaaattcagaatagagtatgagcctttggttgcatgctcttcttgtttagatgtctctgggaaaactgctttaaatcaagctatattgcaacttggaggatttactgtaaacaattggacagaagaatgcactcaccttgtcatggtatcagtgaaagttaccattaaaacaatatgtgcactcatttgtggacgtccaattgtaaagccagaatattttactgaattcctgaaagcagttgagtccaagaagcagcctccacaaattgaaagtttttacccacctcttgatgaaccatctattggaagtaaaaatgttgatctgtcaggacggcaggaaagaaaacaaatcttcaaagggaaaacatttatatttttgaatgccaaacagcataagaaattgagttccgcagttgtctttggaggtggggaagctaggttgataacagaagagaatgaagaagaacataatttctttttggctccgggaacgtgtgttgttgatacaggaataacaaactcacagaccttaattcctgactgtcagaagaaatggattcagtcaataatggatatgctccaaaggcaaggtcttagacctattcctgaagcagaaattggattggcggtgattttcatgactacaaagaattactgtgatcctcagggccatcccagtacaggattaaagacaacaactccaggaccaagcctttcacaaggcgtgtcagttgatgaaaaactaatgccaagcgccccagtgaacactacaacatacgtagctgacacagaatcagagcaagcagatacatgggatttgagtgaaaggccaaaagaaatcaaagtctccaaaatggaacaaaaattcagaatgctttcacaagatgcacccactgtaaaggagtcctgcaaaacaagctctaataataatagtatggtatcaaatactttggctaagatgagaatcccaaactatcagctttcaccaactaaattgccaagtataaataaaagtaaagatagggcttctcagcagcagcagaccaactccatcagaaactactttcagccgtctaccaaaaaaagggaaagggatgaagaaaatcaagaaatgtcttcatgcaaatcagcaagaatagaaacgtcttgttctcttttagaacaaacacaacctgctacaccctcattgtggaaaaataaggagcagcatctatctgagaatgagcctgtggacacaaactcagacaataacttatttacagatacagatttaaaatctattgtgaaaaattctgccagtaaatctcatgctgcagaaaagctaagatcaaataaaaaaagggaaatggatgatgtggccatagaagatgaagtattggaacagttattcaaggacacaaaaccagagttagaaattgatgtgaaagttcaaaaacaggaggaagatgtcaatgttagaaaaaggccaaggatggatatagaaacaaatgacactttcagtgatgaagcagtaccagaaagtagcaaaatatctcaagaaaatgaaattgggaagaaacgtgaactcaaggaagactcactatggtcagctaaagaaatatctaacaatgacaaacttcaggatgatagtgagatgcttccaaaaaagctgttattgactgaatttagatcactggtgattaaaaactctacttccagaaatccatctggcataaatgatgattatggtcaactaaaaaatttcaagaaattcaaaaaggtcacatatcctggagcaggaaaacttccacacatcattggaggatcagatctaatagctcatcatgctcgaaagaatacagaactagaagagtggctaaggcaggaaatggaggtacaaaatcaacatgcaaaagaagagtctcttgctgatgatctttttagatacaatccttatttaaaaaggagaagataactgaggattttaaaaagaagccatggaaaaacttcctagtaagcatctacttcaggccaacaaggttatatgaatatatagtgtatagaagcgatttaagttacaatgttttatggcctaaatttattaaataaaatgcacaaaactttgattcttttgtatgtaacaattgtttgttctgttttcaggctttgtcattgcatctttttttcatttttaaatgtgttttgtttattaaatagttaatatagtcacagttcaaaattctaaatgtacgtaaggtaaagactaaagtcacccttccaccattgtcctagctacttggttcccctcagaaaaaaattcatgatactcatttcttatgaatctttccagggatttttgagtcctattcaaattcctatttttaaataatttcctacacaaatgatagcataacatatgcagtgttctacaccttgcttttttacttagtagattaaaaattataggaatatcaatataatgtttttaatattttttcttttccattatgctgtagtcttacctaaactctggtgatccaaacaaaatggcttcagtggtgcagatgtcacctacatgttattctagtactagaaactgaagaccatgtggagacttcatcaaacatgggtttagttttcaccagaatggaaagacctgtacccctttttggtggtcttactgagctgggtgggtgtctgttttgagcttatttagagtcctagttttcctacttataaagtagaaatggtgagattgttttctttttctaccttaaagggagatggtaagaaacaatgaatgtcttttttcaaactttattgacaagtgattttcaagtctgtgttcaaaaatatattcatgtacctgtgatccagcaagaagggagttccagtcaagagtcactacaactgattagttgtttagagaatgagaaatggaacagtgaggaatggaggccatatttccatgacttcccttgtaaacagaagcaacagaagggacaagaggctggcctctacatcactctcaccttccaaatcttgtggaagtgcatctacttgccagaaccaaattaacttacttccaagttctggctgcttgcaggtggaactccagctgcaagggagttagggaaatgaaggtctttttttaaaagcttctcagccttcctagggaacagaaattgggtgagccaatctgcaatttctactacaggcattgagaccagttagattattgaaatattatagagagttatgaacacttaaattatgatagtggtatgacattggatagaacatgggatactttagaagtagaattgacagggcatattagttgatgaaatggagtcatttgagtctcttaatagccatgtatcataattaccaagtgaagctggtggaacatatggtctccattttacagttaaggaatataatggacagattaatattgttctctgtcatgcccacaatccctttctaaggaagactgccctactatagcagtttttatatttgtcaatttatgaatataatgaatgagagttctggtacctcctgtctttacaaatattggtgttgtcagtatttttcctttttaaccattccaatcggtgtgtagtgatgtttcattttggttttaatttgtatatccctgatagctataattgggtcatagaaattctttatacattctagatgcaagtctcttgtcggatatatgtattgagatattacacctagtctgtggcttgactgttttctttatgtcttttgatgaatagaagttttaaattttgacaaggtcaaatttatttttttcttttgtttgatattttttctctccaatttaaccccaagatttcagatattctgctctattatataaactttatatttttatatttgtgatctaccttgaattgatatgtatgttgtgaattatggatcagggttctttttttcccccatacaagtatccagtcattgtaacactgtttattgaaagaattatcctttcctcattaaattaccttgccaattagtaaaaaatcaattaaccataatggtggatctgtttctggactttctgtttggttacactgaaatgtttgtccatccttgcactcactcataccatactgccttgaattactgtagctgcatagatgctccttaagttgggattacattgtaataaacgcaatgtaagttaaaaaaaaaaaaaaaaaa

SEQ ID NO: 1086 - DNA, 331 bp, HOMO SAPIENS
gagctcaagtcacttgaccaggctccatccctacaagaggcagcacgcaaactaaaaaccaggcggccttttccaaagcttgtgctctgctccactgctggaaggaacccttcggggaattgaagcagcactgaacaaaggccatttttaagaagcgacaccagaaacctaaggcggggtccccggctcaacaaggatctcatgttttgtgggtcagagattcttgtgtcgtgtctgggtgaggtcaaaaaccatgcagagactttcacttcctgttctgtggcagacaagacatctgaaaagctctcctgcagcaacacttctagatgcc

SEQ ID NO: 1087 - DNA, 6853 bp, HOMO SAPIENS
gccaggccgcgtccgccatagtacctggcttggaggtgtcgccgccgctcggtgagagcccccgagcggcagggggccaacacaaaaagggagccggagaagccctagccgctgcccagcagcttgcgggcgtgttctcgcggttccgggcctcaaggcgacggaaacgaaaggcgagcgaagcgcggaggatccggcgagaagaagcgtcagggagcctcggcggtgtccccggggtccgccgaagccacccggccgccggctggggcccggggtggtgaggaagtgctccgaggcctcgccgaggcctagcgccggctttgtgtccgaggcggcggcggcggcggggggaggcggagccgggggcggcctgcgggaaggcctctcctccgccgaccgcgcgttttcggcctaggccgtggggccgctcgtggcctccggggagcaggcgccaggggtttgtgtgcggtgggggcctgggcctgggcctggggaagctgacgccggtcgtccggaagccaggaggaggcgtgaggccgctcgtggactccgggcctaggccctctcccctcaaccttctcccggggcctgggtcaccccaatccacggagagagagacccgccgggaggtgcggccgcgctatggacccctgaccccgtggggtcgctcggactcttaacgtgtggactgaccgctactgactgcaccgccaatccccccgtctctgccggccccttagcatgagcgagggggacccagccgggtgacattgtgcccgttggcggattctcgatttcccctcttccccgtcctcgtcctcctcctcccccatgaagtgattctgagtatcggggggtctctggattattgttctgacgaacccctgcttgtggttggggggtatttaatctgaggccttagggtccttcggtgtctttgagtgttttgtgtgtacatattttgctcttaaagtttataaatatacgtatattgagagtgtccacgtctcctcgctgaaccttaggaatcccttggcaccatgtcctgtgtgcattataaattttcctctaaactcaactatgataccgtcacctttgatgggctccacatctccctctgcgacttaaagaagcagattatggggagagagaagctgaaagctgccgactgcgacctgcagatcaccaatgcgcagacgaaagaagaatatactgatgataatgctctgattcctaagaattcttctgtaattgttagaagaattcctattggaggtgttaaatctacaagcaagacatatgttataagtcgaactgaaccagcgatggcaactacaaaagcaattgatgactcttccgcgtctatttctctggcccagcttacaaagactgccaatctggctgaagccaatgcttctgaagaagataaaattaaagcaatgatgtcgcaatctggccatgaatacgacccaatcaattacatgaagaaacctctaggtccaccacctccatcttacacgtgtttccgttgtggtaaacctggacattatattaagaattgcccaacaaatggggataaaaactttgaatctggtcctaggattaaaaagagcactggaattcccagaagtttcatgatggaagtgaaagatcctaatatgaaaggtgcaatgcttaccaacactggaaaatatgcaataccaactatagatgcagaagcatatgcaattgggaagaaagagaaacctcccttcttaccagaggagccatcttcttcctcagaagaagatgatcctatcccagatgaattgttgtgtctcatctgcaaggatattatgactgatgctgttgtgattccctgctgtggaaacagttactgtgatgaatgtataagaacagcactcctggaatcagatgagcacacatgtccgacgtgtcatcaaaatgatgtttctcctgatgctttaattgccaataaatttttacgacaggctgtaaataacttcaaaaatgaaactggctatacaaaaagactacgaaaacagttacctcctccaccacccccaataccacctccgagaccactgattcagaggaacctacaacctctgatgagatctccgatatcaagacaacaagatcctcttatgattccagtgacatcttcatcaactcacccagctccgtctatatcttcattaacttctaatcagtcttccttggcccctcctgtgtctggaaatccgtcttctgctccagctcctgtacctgatataactgcaacagtatccatatcagttcattcagaaaaatcagatggaccttttcgggattctgataataaaatattgccagctgcagctcttgcatcagagcactcaaagggaacctcctcaattgcaattaccgctcttatggaagagaagggttaccaggtgcctgttcttggaaccccatctttgcttggacagtcattattgcatggacagttgatccccacaactggtccagtaagaataaatactgctcgtccaggtggtggtcgaccaggctgggaacattccaacaaacttggctatctggtttctccaccacaacaaattagaagaggggagaggagctgctacagaagtataaaccgtgggcgacaccacagcgaaagatcacagaggactcaaggcccgtcactaccagcaactccagtctttgtacctgttccaccacctcctttgtatccgcctcctccccatacacttcctctccctccgggtgttcctcctccacagttttctcctcagtttcctcctggccagccaccacccgctgggtatagtgtccctcctccagggtttcctccagctcctgccaatttatcaacaccttgggtatcatcaggagtgcagacagctcattcaaataccatcccaacaacacaagcaccacctttgtccagggaagaattctatagagagcagcgacgactaaaagaagaggaaaagaaaaagtccaagctagatgagtttacaaatgattttgctaaggaattgatggaatacaaaaagattcaaaaggagcgtaggcgctcattttccaggtctaaatctccctatagtggttcttcgtattcaagaagttcatatacttattctaaatcaagatctggttcaacacgttcacgctcttattctcgatcattcagccgctcacattctcgttcctattcacggtcacctccataccccagaagaggcagaggcaagagccgcaattaccgttcacggtctagatctcatggatatcatcgatctaggtcaaggtcacccccttacagacgctatcattcacgatcaagatctcctcaagcgtttaggggacagtctcctaataaacgtaatgtacctcaaggggaaacagaacgtgaatattttaatagatacagagaagttccaccaccatatgacatgaaagcatattatgggagaagtgttgactttagagacccatttgaaaaagaacgctaccgagaatgggagagaaaatatagagagtggtatgaaaaatattataaaggttatgctgctggagcacagcctagaccctcagcaaatagagagaacttttctccagagagatttttgccacttaacatcaggaattctcccttcacaagaggccgcagagaagactatgttggtgggcaaagtcatagaagtcgaaacataggtagcaactatccagaaaagctttcagcaagagatggtcacaatcagaaggataatacaaagtcaaaagagaaggagagtgaaaacgctccaggagatggtaaaggaaataagcataagaaacacagaaaaagaagaaaaggggaggaaagtgagggttttctgaacccagagttattagagacttctaggaaatcaagagaacctacaggtgttgaagaaaataaaacagactcattgtttgttctcccaagtagagatgatgccacacctgttagagatgaaccaatggatgcagaatcaatcacttttaaatcagtgtctgaaaaagacaagagagaaagggataaaccaaaagcaaagggtgataaaaccaaacggaagaatgatggatctgctgtgtccaaaaaagaaaatattgtaaaacctgctaaaggaccccaagaaaaagtagatggagaacgtgagagatctcctcgatctgaacctccaattaaaaaagccaaagaggagactccgaagactgacaatactaaatcatcatcttcctctcagaaggatgaaaaaatcactggaacccccagaaaagctcactctaaatcagcaaaagaacaccaagaaacaaaaccagtcaaagaggaaaaagtgaagaaggactattccaaagatgtcaaatcagaaaagctaacaactaaggaagaaaaggccaagaagcctaatgagaaaaacaaaccacttgataataagggagaaaaaagaaaaagaaaaactgaagaaaaaggcgtagataaagattttgagtcttcttcaatgaaaatctcgaaactagaagtgactgaaatagtgaaaccatcaccaaagcgcaaaatggaacctgatactgaaaaaatggataggacccctgaaaaggacaaaatttctttaagtgcgccagccaaaaaaatcaaactcaacagagaaactgggaagaaaattggaagtacagaaaatatatcaaacacaaaagaaccctctgaaaaattggagtcaacatctagcaaagttaaacaagaaaaagtcaaaggaaaggtcagacgaaaagtgactggaactgaaggatccagctcaactctggtggattacaccagtacgagctcaactggaggcagtcctgtgcggaaatctgaagaaaaaacagatacaaagcgaactgtgattaaaacgatggaagaatataataatgacaataccgcgccagctgaagatgttatcattatgattcaggttcctcaatccaaatgggataaagatgactttgaatctgaagaagaagatgttaaatccacacagcctatatcaagtgtaggaaaacctgctagtgttataaaaaatgttagtacaaagccatcaaatatagtcaagtatcctgagaaagaaagtgagccatccgagaaaattcagaaattcaccaaggacgtgagccatgaaatcatacaacatgaggttaaaagttcaaaaaactctgcatctagtgaaaaagggaaaaccaaagatcgagattattcagtgttggaaaaggagaaccctgaaaagaggaagaacagcactcagccagagaaagagagtaatttggaccgtctgaatgaacaaggaaattttaaaagtctgtctcaatcttccaaagaggctagaacgtcagataaacatgattccactcgtgcttcctcaaataaagacttcactcccaatagagacaaaaaaactgactatgacaccagagagtattcaagttccaaacgtagagatgaaaagaatgaattaacaagacgaaaagactctccttctcggaataaagattctgcatctggacagaaaaataaaccaagggaagagagagatttgcctaaaaaaggaacaggagattccaaaaaaagtaattctagtccctcaagagacagaaaacctcatgatcacaaagccacttatgatactaaacggccaaatgaagagacaaaatctgtagataaaaatccttgtaaggatcgtgagaagcatgtattagaagcaaggaacaataaagagtcaagtggcaataaactactttatatacttaacccaccagagacacaggttgaaaaagagcaaattactgggcaaattgacaagagtactgtcaagcctaaaccccagttaagtcattcctctagactttcctctgacttaactagagaaactgatgaagctgcttttgaaccagactataatgaaagtgacagtgaaagtaatgtttctgtaaaagaagaggaatcttcaggaaacatttctaaggacctgaaagataaaatagtggagaaagcaaaagagagcctggacacagcagcagttgtccaggtgggcataagcaggaatcagagccacagcagccccagcgtcagccccagcagaagccacagtccttctggaagccagacccgaagccacagtagcagtgccagctcagcagaaagtcaggacagcaagaagaagaagaaaaagaaggaaaagaaaaaacacaagaaacataaaaagcataagaagcataagaaacatgcaggcactgaagtggaattggaaaaaagccaaaaacacaaacacaagaaaaagaagtcaaagaagaacaaagataaagagaaggagaaggagaaagatgaccaaaaagtgaaatctgtcactgtgtaaaaagacagattttttaaattgacttaattactaagtcatctgtattaaattttgttataatgtaaagagattcaagccttgtaaataatgacatggaagaccctgtgctgcacttaaaatattgctgcttgattatttgatttttacatcagagctttataacacgaacttttgtacagaattgtgagttgtgaccatgtaacatgagaggttttgctagggcctattatttttaaccaccattaattagttggggtggagtttactgtaatgtgaaattttcacatttgaattttttaattgcctggcaaaagctgatataagttctaaaatatcagcagaatgatttgctgaattcattacaaccctgttatgtcactttttgattacaataaaagttttcagtaaacttttcaaaaaaaaaaaaaaaaaaa

SEQ ID NO: 1088 - DNA, 1369 bp, HOMO SAPIENS
attaggtgactggctgaggcggcgccagttggccgggcacggggctgctgtaaggccgaggttgcggcggaagcggagaccatgttccgagcggcggctccggggcagctccggcgggcggcctcattgctacgatttcagagtaccctggtaatagctgagcatgcaaatgattccctagcacccattactttaaataccattactgcagccacacgccttggaggtgaagtgtcctgcttagtagctggaaccaaatgtgacaaggtggcacaagatctctgtaaagtagcaggcatagcaaaagttctggtggctcagcatgatgtgtacaaaggcctacttccagaggaactgacaccattgattttggcaactcagaagcagttcaattacacacacatctgtgctggagcatctgccttcggaaagaaccttttgcccagagtagcagccaaacttgaggttgccccgatttctgacatcattgcaatcaagtcacctgacacatttgtgagaactatttatgcaggaaatgctctatgtacagtgaagtgtgatgagaaagtgaaagtgttttctgtccgtggaacatcctttgatgctgcagcaacaagtggcggtagtgccagttcagaaaaggcatcaagtacttcaccagtggaaatatcagagtggcttgaccagaaattaacaaaaagtgatcgaccagagctaacaggtgccaaagtggtggtatctggtggtcgaggcttgaagagtggagagaactttaagttgttatatgacttggcagatcaactacatgctgcagttggtgcttcccgtgctgctgttgatgctggctttgttcccaatgacatgcaagttggacagacgggaaaaatagtagcaccagaactttatattgctgttggaatatctggagccatccaacatttagctgggatgaaagacagcaagacaattgtggcaattaataaagacccagaagctccaattttccaagtggcagattatggaatagttgcagatttatttaaggtagttcctgaaatgactgagatattgaagaaaaaatgaatcaggatcatgccttaaaaagaaaacttttgttaaagtattccactgaaatcacagatatttgtgggtattataacaatcattggaaagcatggagagctacatttcataatttgagggaaaatttctaacagatgccagaatgcttgtttatgggattgctgtgtttccttttaattatttgtggttccaaacaattattgtttgaactttttaaattctgtactaaaatctataataaagcttttccacagctttaaaactatcagaaaaaaaaaaaaaaaaa

SEQ ID NO: 1089 - DNA, 3156 bp, HOMO SAPIENS
caccgtagtgcttagaggccgaaaaagtacagccccttccgggctccgcggtacgggaagacagctttgggatgtcggaagatcctagaggtcccaaggtaccacgaaaggcagtggtagaaaagccagctcgggcagcagagcgagaggcccgggccctgctggagaagaaccgatcttataggttactggaagacagtgaagagagcagtgaggagactgtgagtagggctggaagcagcctccagaagaaacgtaaaaagcggaaacacctcaggaagaagcgtgaggaagaagaggaggaagaggcttctgagaaagggaagaagaaaacaggggggagtaaacagcagacagagaagccagagtcggaagatgagtgggaacggacagagcgtgaacgccttcaggacctggaggagcgtgatgcctttgctgagcgggttcgacagcgggacaaggatcggactcgaaatgtcctggaacggtcagacaagaaggcttatgaagaggctcagaagcgcctcaagatggccgaggaagaccggaaggccatggtccctgagctgcggaagaaatctcgccgagagtacctggctaagcgggagcgagagaagcttgaggacctggaggcggagctggctgatgaggagttcctttttggggacgtggagctgagccggcacgagcggcaggagctcaaatataagcggcgagtgcgggatctcgcccgggagtaccgggcagctggggagcaggagaagctggaggccaccaatcgctaccacatgcccaaggaaacccgaggacagccagcccgagctgtggatctagtggaggaggaatcaggagcccctggggaggagcagcggcgctgggaggaggcgcggcttggggcagcgtccctgaagtttggggcccgagatgctgcctctcaggagcccaagtatcaactggtgctggaggaggaggagaccattgagtttgtccgggccactcagctccagggtgatgaggagccgtcagctccacccacttcaactcaggcccagcagaaagagtccatccaggccgtccgccgcagcctcccggtgttcccatttcgagaggagctcctggctgctattgcaaatcaccaagtcctcatcattgaaggcgagacaggctcagggaagaccacccagatcccgcagtatctctttgaggagggttatacaaacaagggtatgaagattgcctgcacccaaccccggagagtggctgccatgagtgtggccgcccgagtggcccgggagatgggtgtgaagcttgggaatgaggttggctacagcatccgctttgaggactgcacatcagagcgaactgtcctccgctacatgacagatgggatgcttctccgggagttcctctctgagcctgacctggcgagttacagcgtggtgatggtggatgaggcacacgaaaggaccctacacacagacattctctttggattgatcaaggatgttgctcgcttccgacctgagctcaaggtcctggtggcttcagccacaatggacactgcccgtttttccaccttctttgatgacgcccctgtgtttcgaatccccggacgcaggtttcctgtggacatcttctacaccaaggctccagaggctgactacttggaagcttgtgtagtatctgtgttgcagatccatgtgacccagccccctggggatatcctggtgttcctgacaggacaggaggagattgaggctgcctgtgagatgctccaggatcgctgccgccgcctgggctccaaaatccgggagctcctggtgctgcccatttatgccaatctgccctctgacatgcaggcccgtatcttccagcccacaccacctggggcacgaaaggtggttgtggcaacgaacattgctgagacatcactcaccattgagggcatcatttatgtgctggatccagggttctgtaagcagaagagctacaacccccgcacaggcatggaatcgctcactgtcacaccctgcagcaaggcctcagccaatcagcgagctggcagggcaggtcgggtggctgcagggaagtgcttccgcctgtataccgcctgggcctatcagcacgagcttgaggaaaccacagtgcctgagatccagaggaccagcttgggcaatgtcgtgttgctgctcaagagcttagggatccatgacctaatgcactttgatttcctggaccctccaccatatgagacactgctgctggctttggagcagctgtatgctctgggagccctcaaccaccttggggagctcaccacgtctggtcgaaagatggcagagctgccggtggaccccatgctgtccaaaatgatcttagcctctgagaagtacagctgttcagaggagatcctgacagtggctgccatgctctctgtcaacaactccatcttctaccgaccaaaggacaaggtcgtccatgctgacaatgcccgtgtcaacttctttctccctggcggtgaccacctggttctgctaaatgtttacacacagtgggctgagagtggttactcttcccagtggtgctatgagaactttgtacagttcagatcgatgcgccgagcccgggatgtgcgggaacagctggaagggctcttggaacgtgtggaagttggtctcagttcctgccagggggactatatccgtgtacgcaaggccatcactgctggttacttttaccacacggcacggttgactcggagtggctaccgcacagtgaaacagcagcagacagtcttcattcatcccaactcctccctctttgagcaacagccacgctggctgctctaccacgaacttgtcttgaccaccaaagagttcatgagacaggtactggagattgagagcagttggcttctggaggtggctccccattattataaggccaaggagctagaagatccccatgctaagaaaatgcccaaaaaaataggcaaaacacgagaagagctagggtaagagaaggacgtaaacagaacctgacaccagctccttttccttctatacattatttaatacctattaaataaaattatttttggaataaagcttgtgggaacatttgggatctagagaaagtgaaaaaaaaaaaaaaaaa

SEQ ID NO: 1090 - DNA, 364 bp, HOMO SAPIENS
gatgaacgggatgttttctaaacttggtgaaacgtataaatctacaaattcataaagctccagaaagcccaaccaggatgtgtgtccagaaatccctgtctaggcttgtcattgtcaaactgctgaaaagcagcagtaaagagaatctttaaggcagccagagaaaaaaggatccatgacatacaaggggacactcatgggaatcaccacagccgccctgtcagaaaccatggggttcaggacacagtggatcacatcttcgaagatctgggctgggaggaattaacccagaattctgtgtgcagcagaaatattcttcaagagtgtaagtgtaataaggagagttcagacagaatccaagagc

SEQ ID NO: 1091 - DNA, 3968 bp, HOMO SAPIENS
aggccccgccgccgccgccgctgctgacccggcggccggccgccgttccgccccctcccgtggcggcgagcgggcgggcctccccacacgcccccgccgcccgcgccccgcgtccacccgcgccccgctcccggggactgggagaacaggatagcagcaggagtcggggggccgccgaagatggggaacactacctcgtgctgcgtgtcgtccagtcccaagctccggaggaatgcccactcccggctggagtcctaccggccagacacggacctgagccgcgaggacacgggctgcaacctgcagcacatcagcgaccgggagaacatagacgatttgaacatggaattcaatccttcagatcatcctcgggccagcacaatattcctcagtaaatctcagacggacgtgagagaaaaacgcaagagtctcttcattaaccatcatcctccaggacaaatagcaaggaaatacagttcctgctccaccattttcctagatgatagcacagtcagtcaaccaaacctcaagtatacaattaaatgtgtcgctcttgcaatatattatcacatcaaaaacagggacccagatggaaggatgctcttagatatttttgatgaaaatcttcaccctctttcgaaatccgaagtgccaccagattatgacaaacacaacccagagcagaagcagatttaccggttcgttcggacactgttcagtgctgctcagctgacggctgaatgtgccatcgtcaccctggtgtaccttgaaagacttttaacatacgcagagatagatatctgtccggccaactggaagcggattgttttaggggcgatcctgctggcctccaaggtgtgggatgaccaggctgtatggaatgtggattactgccagatcctgaaagacatcacggtggaggacatgaacgagctagagcgacagtttcttgaattgctgcagttcaacatcaatgttccttccagtgtctatgccaagtattattttgatcttcgttctctggcagaagcgaacaacctgagctttcccttggagcccctgagcagggagagggctcacaagcttgaggccatctctcgcctctgcgaggacaagtacaaggacctaagaagatccgcgaggaagcgctcagccagtgcagacaacctgactctgccccggtggtccccagccatcatctcttaactacggaggcccgccggaggccacaccatcccttagtttctcctttagtttgagaaaagacagacttggggtgggtttgtttttgttttttctttccttttctttttttacgcatagctccgtcaagctgcctggatgagcgcccatgcagcaaggcttggaggaagcgtcagtgccctggagatcccagctcgctctccccactgtcagcaacagcacttccttcgtggaggaagtggactcgaatcctggaggaggaaataaagggaaagggaagtcgtggagaggcagggaaaatggttaagcagcccggccctctggagtccccatgggggcggtagctgaagttggcgagcgcagcggtggatgcagagctggctgcacccagggctgggccagtgtgtcctgtaagacttcttgcattccttctgctgcttttttgggatgggggtatttttgttcatttgtttttgccctgttttgattttggtcccacagagcaggggatgtagtttgtacccaccatggcgcagacttccaaataaatagtactggtcatttctctctgcactatttctgcgcgctgtcttctgagctttcttcctcaccagtgggctgtgcttgttccatttctgtacacccttattttataccgtttttcttcaacaatggcgaaattgactgtagtgctgaaccaaaagtatccctttccctccttattcctcaccccaagaacattctagatcacatgggtgcttgtgccttccgattttcttgcatttgtttttttcctgacctgaagttgttgttacaaaatcagtcagactttgtgggctgaaggacacggtgcagcagagggtgtccctgtgagagttctgcagagtgctgggcatgtgcctggaactaccgagtaggagccatttctttgtacccctgcctaatccattcctctccttccaagtccattgttgcaagcaatattcttctcaatttttatatgtttactttaaatcaaagttagtctatttgtataaaatttttaaaaaatctaaaagaaaaagaaaaaaaacaagggtgggttgggtattccagtgggaagatcattgaagggaaaaatgttactatttactgaggtatttttcacagaatgattgaattaaaaaaaactcaacttgcattttcattgtgggtgcttagagaagttctacaaaattcaaactgtgaaggtttatgcttcattaattatgaccatactttttcattttctgacgatccctgatttccttatggactcaataagaatcttttatatcaagtaaaatgaaagttgatgatagaatatcaaatagtgaatttgatatgaaatctaagagtgtgagtcacttgcatatgtaatgctttgggtttttgcatattttcttaggtcacagtgacaggtttctgagttgtttcccttttcaagtctctgggaggccagtggcagcagcaggtctgtgtttcaccttcttcccatgtgagcttggaaaactttggcatcttaattagtcttgaatcatacacctgatccccaaacattgcctgctctcaatgaaacatgctttggaaatggaagggactcagaaagtcgaaatcccaagaactccaagccaaaagtgttaggttttagtgaaatttgtgtcaggtataagcatacctgtttgggccagaattattatcacagcctttctgacccaaactttcaaaagcaaataaacagcatataaaacgttaattatctttccattgtaattgtgatgatctactctgtatgggtaccaaaatcaccttctctcttcaagtcaaagttgaatttagaactttgaatacaggtcaaaaaatgtagaaaatatcattttatattccctaatctatatagctgaaaaagggttgtattttcttagctgaatatgaatacctcttaaacataaattagttcctctccagtgaagtatcttattttaccaatccatttcaggaaagaggttctgctgccgtaaaggcagaaattttatttttatcccttttatttgaatgagagatttgaaaatcgaattatgtaaatatttcaatgcatctgctattattttgtggagtttattaaactactttaaaaaaattgtatagtctatttattgtatgtatgtacatacagtctgatacctaaaatttaaagtggattccataaaaccagactcaagtcttgtttagactactgaatactgttttagcctgtgccctggattctacctctgtataggaaaattttccatattcattaattagtgttgatctgtattaattggttatgtttcttgcactaaggatgtttaaaactccgctgtaagtgtagattttagttttactggcaggatgaatcacttgacacataggtagatacttgaggttcattttcttttctttttctacatgatgatgaatagttatgttttcttctctgatttgttcaaagtttgccaaaagaaaacacaaaaccagtacagtacttactgataaatcgtagtgactgtaatttgtttgtaaggcgaattaatgctctacaattaaagctggattactattgaggaacacattgtcttagtgtagtttttgaatggaaagtttttgtcattaaggatgaaggaaacgacacaatttgttactttaattttatatttgatttaaacaacaaataaagtcattgggacaataaaaaaaaaaaaaaa

SEQ ID NO: 1092 - DNA, 1025 bp, HOMO SAPIENS
tttctcactcccattgggcgtcgcgtttctagagaagccaatcagtgtcgccgcagttcccaggttctaaagtcccacgcaccccgcgggactcatatttttcccagacgcggaggttggggtcatggcgccccgaagcctcctcctgctgctctcaggggccctggccctgaccgatacttgggcgggctcccactccttgaggtatttcagcaccgctgtgtcgcggcccggccgcggggagccccgctacatcgccgtggagtacgtagacgacacgcaattcctgcggttcgacagcgacgccgcgattccgaggatggagccgcgggagccgtgggtggagcaagaggggccgcagtattgggagtggaccacagggtacgccaaggccaacgcacagactgaccgagtggccctgaggaacctgctccgccgctacaaccagagcgaggctgggtctcacaccctccagggaatgaatggctgcgacatggggcccgacggacgcctcctccgcgggtatcaccagcacgcgtacgacggcaaggattacatctccctgaacgaggacctgcgctcctggaccgcggcggacaccgtggctcagatcacccagcgcttctatgaggcagaggaatatgcagaggagttcaggacctacctggagggcgagtgcctggagttgctccgcagatacttggagaatgggaaggagacgctacagcgcgcagagcagtctccccagcccaccatccccatcgtgggcatcgttgctggccttgttgtccttggagctgtggtcactggagctgtggtcgctgctgtgatgtggaggaagaagagctcagatagaaacagagggagctactctcaggctgcagtgtgagacagcttccttgtgtgggactgagaagcaagatatcaatgtagcagaattgcacttgtgcctcacgaacatacataaattttaaaaataaagaataaaaatatatctttttatagataaaaaaaaaaaaaaaaaa

SEQ ID NO: 1093 - DNA, 10057 bp, HOMO SAPIENS
aactgtcgcggccgccgccaacatggccgagaccagcgaggaggtggcggtgctggtgcagcgggttgtgaaggacatcactaacgccttcaggaggaacccacacatagatgaaattggcctgatcccatgtcctgaagctaggtataaccggagtcccatagtcctggttgaaaacaaactgggtgtggagagctggtgtgtcaagttccttttaccatatgtccacaacaagctccttttgtacagaacaagaaagcaatggctgaacagagatgaattgatagatgtcacatgtaccctgctgcttctaaacccagactttaccactgcatggaacgtgaggaaagagctgatcctctctggcactttaaatccaattaaggatttacatctgggaaaactcgccttaaccaagtttccaaagagtccagaaacatggattcacaggcgatgggtgctacaacagctaattcaggaaacctccttgccttcctttgtgaccaaaggaaacttgggaacaattcccacagaaagggcacagcgactcatacaagaagagatggaggtctgtggtgaagcagcagggagatacccaagcaactataatgcttggtcccatcgcatctgggttttacagcacttggccaagctagatgtcaagattcttcttgatgaactatcttctactaaacattgggcatctatgcacgtttcagaccacagtggatttcactaccgccagtttttgcttaagtctttgattagccaaactgtgatagacagttctgtgatggagcaaaatcctttgagaagtgagccagccctagttcctccaaaagatgaagaagcagcagtttcaacagaagaaccaaggattaatcttccccatcttctagaagaagaagttgaattcagcactgatcttattgattcctacccaggacatgaaaccctttggtgtcataggcggcatattttctaccttcagcatcacttaaatgcaggctcccagctgtctcaagcaatggaagtagatggactgaatgactctagcaagcaaggctattcccaggaaaccaaacgcctgaagcggacgccagttccagactccctaggcctagaaatggagcacaggttcattgatcaagtattgtccacctgtcggaacgtggagcaagccaggtttgccagtgcatacaggaaatggctggttactttgagtcaatgaaagaggtgaattagtcctacaaggttccccttttagtgcaatattgctttcttttattatttacatagttgcatgaactgtttactattattggctaaccatatgttcttcgtctttaggttgaaagtccatagtaaatctttcattttatttattttgttaataactggcattcctgtggggataaaataatcgtatagttccttcctgctgaacagcgagtcttaaattttctgtttaacttctcaccctttgtatttctatatgtggggcttctcatttggttttcctgattggttcacacacacacacctctacccccctcagtccaattgctgcataggcaaattcttttaaaaattaaaaatttaaggcctaggcaggaggattgcctgagcccaggactttgagaccaacctgggccacatagcaagacccgatttctacaaaaagtaaaacaaaatagctaggcatggtgctatgcaactgtgttcctagctatgcaggaagctgaggcagaaggattgcttgagccccaggtgtttgtggctgtagtgagccatgattgcaccactgtactcagcctgggcaatagagttgagaccctgtctctaaaacaaattgaaaataaacatttatgttgcagttcaactgaagaatgttggtatgaatgccgaataacttgatgtaattgttttgagaatcaaatggctagatgggcgaatgtttaaaaatgtaaactagttctctttctctagcatgttctacccaattaccaaagtcagaagtattggaatttatatgaaaaaaatgcttccaatgtaatccattttttaaatggttatttaagaaaaaactaacttaagagtttatgtaattgcagtaaaggaaaattatttttattgctagttttgatagattatttttacctcaaatttggtatatgccaaaacacatcagtccttataaaattgatttttttttcctgaaaacctggaatgccatttttagctattactactttttaatttcaaattcacttatgacaaatgggagaaatatataaagaaatagatccataaaaatattcctttttaaaaatctaaattattgaggatacactatggaaactataaaattatcatgaagtgactgttaaagtttactggcaaatgccaagggaaggaatagtatgtgcaaaacaaaacactttgatactgaacttaatcagggatgaggtaccaaagtatccacattatagccgtatcttatgtttccaataacaagggctgagtttttcaggtaggtgggatgagggtggggaatgggccatgtaatgtctgctttcttatatttgcccttttgtaagtggtctgtttcttcttttcatatactttgttttgccaatccattacgtattttttgtcacttttgtgtgtcatttttgtatacctttcctttcttacttcaggggtgtgtcttcaagatttctaccccctatttgcaatgaatttcatacctcatctaaaatacattcatataccagaaatatgaagagtggcccttctaaaagtttccctaatgatggaagctgtcagttgtcctatctgtgcagaatgtgagtaatagtggcagaaataagtgtgacaacaatgctttgcctgttgttctttttacttgctaggtaatttgtaaagtggggataaagatgtagggaaagtaaacctctctctcactgttacggaaagcctggacttgagttaggtagactgccttaaagaagaagaaatatgtccttttctttggcatcatggttttgttgagtggcagactgttgaagtgagttgagacttaagaacgccagaaaagttgtctagcctggccccagtagacagaatttgttcttctctcaagtaaaaaattacctttttatagcttttatattatttagatgaaaaaataccattatgaacataattccatggccctttgtgtacaaagcatattttgaattaaatacctcaaggtccacctagacctctatggataaaatcataagtttatgatttttagctcctgtgagtgtttgggggcaaactacacagagaagacatgggtggttcagcccattccactaaaatatgttgccagattctggcctaactcagtattaccttttttcctaaaaatcatttttcacattttgagtaatagggcttatgctttgatgtgaaaaaatgtcaggaaatgagtgtagacaataccctataaaacactagctaagttttatagtgctccatgcctttgtgtaccttccactgattatcttgcctatctttggtgtgtaaactattttcatatcttctaaggctcttaacccactcttttctgaagccgcacagtcctttaatatgtcttgtttccttcctaaaagtttaaagtagagagcaaaaatgcaaatacccaaaggatactgttagtatgtaacttttgtgtgctgctttatttctagagtttgcattttttaattgttcattcacagaaaatcctaatattgccctatatggttggtttttttcctaagtggttaatatttaaacccgctagctgtagcatgataatgtctttgactgagcttatgtagtagaaaggatgtgtctgttttctgggacttttagtcttcacttatttttctataacaatctaattgttaaaaggaaaagatggcttattgacacatatttcattaaactttcactggaagaacagtgggtcatcctactgtggattaagaatactactgacaagcaaaaagcattaagctctgtaactgtctccaacaccaccttcaccccgcctttagtgtaccttagtgtactttagtgtacctattttggcagtacggtgttttccagattctacttgtgccctgcacattgtgaggactcattaaatatttattaaattaatgaatgactaacaggaagagaaagattgtttgtgagtgttaagaatgagtgatgattgagaaattgatggattagtgcaatggattgggaatgaatgatgctttctagtttcgtaatacttgggaagagctattgcatatagagtaagttgatttagactttttttttcttcatttcattaccttgtttaaacttgttaaatcccagccaagaaatgcagctctgtaattgtcaattaactgtattataatatatattaaaaatttgtagagctaaagaacccacttgcattaagaacaccactttctgttcatttgtgatactagaggacagatcctgcatacagagccgaaactgcttttaatcatctgaagaaattctttgatttcagtgacttactgatctgtacctgtgcacatatcattttatgcttctccttttttccccgcaacttgaactgtgactctttcagatatttcttaaatctgtatgagtcattttttaagcttagggatttgatatgtattaatgtcccctttgtcttctgtagattttagcattttattacctcttaagaaactctgggcccagactttcagtcatatttcttattcctatggtacagttctcacttaaaggcttaattattagtagggttaaatatatacaggttatctctaaaagtacttaaatttttaaataagggcttatgtgatacaagatacggaaacaaaagtttttggatttttatgcagtagtttgcaggaaagcaaatacatagtagatcgtatgccacttaggtatgttcaggtcatgccagtttattcttgttgggccacacacacatgtatgtgtgtgtaaaaggaatttttagtattgaagcaaacaaattgtcagtttaataattttctcttacatagcacaagatggcagataccacctactgtacaacaatctaataatccctaccttagttcccctgagttatagaagatgctaaagatttagttgtaaagggaagtaacatgattttttttttctaaaaagctgttttaagctaactattattttgctactggaaaattatattttaaaacttacagatatttaaagtatgctagaaaatttgaacctgataacaactgaaccttttgtcttgaataaatttctcaaatagaactgtgcaaaccctagcactttatgtgttgctgcctccccatacctaggtatgctctgtaataagctcccatttaatggagagatgtgtggaggcactgagaagttaatgaagaaaaatcaaccctaagaattccttattgtcacatagtgtcttttaaaaaataactgtagagactgtgttaattcgagtgcctttcttacttttttgggagcaagattatatttaatgtttaagaaaacaggatggaagttttatcaaacagttgattgtggcccattgttttatttattcccatcgctaggcatggccccgtagggtattttatccttcagtgagagactgatataagcaggcaggatgctttgattattccattagttatcattttaagcaccctaccaagatttagttctttctttctggcaactaacgttttgggggttggaggcatcccatttagaggatggtgtgtgcacaaatagattagcctgaaacctgcgtccaaagggaaacagtggcactctgccctaaaataaaggccagaacgttgtcctaaatgaatcctttgccttactttaggaccttccttccctctcaaattcaggcataatgtaatatagttgaaagggggaaaacagtacttgctttctctcaggtattggaggaaaagaagtaaatgcgtagatgaaattttaaatgtatcattttatctgtttgtatatggagaagggagggataggaattccatatttcaagatagcaaatataatttcatagaaatatatagctaaagattccaaagtgcttttacagagaactgttgaataatatattcctaaagggcagcaatatgccatgttcatggtgaagacagaaaaccaatgaatcagttgtggatctcaggtgggagaggaaacctcaggctcccaactttgacttctctactctcaccaggccatgttaacactgtaaaaccaaactctttgctaagaacaatacagggcagtagtttagtctgctgatgaaaccttgtgcttccaagaatattagctatatataatttgtgctttctggatgattctattgtccagaaagctaaccctgacgttacttttattagtctgttgttattcctcagggtgtagaagatttagtaaattcaggacaaattttatattcagtggcaaaaagaaaaggcaaaaatatgctaaatatattattagctcttaaattttagtatagatcgtattttttataaactattaccagtacagtagctagtagatattctgtgactgcctcattgtttatcttgctgctttggtccctatggctctagtatgaacattctcgtgtcttctgtggaaatgatttctgtgttatagttccatctttggtagaggtggggatgattgtattttgttttagttgacatcattctcaacttttagaaatactgttgaggaaaatgattaccgttggttttcaaattgacaactattttgcttccaaagacttcagtttccctttgttttatgtgtagacctcatatatgttcaacacattgcatactgccttgcacattgtaggaattcaacaagtcaagagttgataaaagctagaaagataaaactagcttagctatcatatcatcattgtccatattcttagctttgggaaaaatataccattttgcataaaatacataatcagtttcaaatgcataaggcaaagatatacagttgcacaacattgcaagtgaaatttacaaaggatttttatttttgtgtatgctaaaagtgctcctacttaaagcagttttctttattagaccaacaccttccagcaaagttagaaaccaaacacaagtgctcatttgcccaaattaaccagatagttatgtaaactgttcatattaagtctttagtggtttacaaacaataacattctggcttttcttccataccttttaggaatcagccttaattttaagtatagcagtcactttcctcaaggtactatgcagcatactttagattgcttatttatcattataaggtgataggtaataaatttgaggtttacttgtcatataatttcatatggcagatattgattcaaggagcattctattagaaaaagttgataaattatcctcccttacaaatatcatcttgcatttggagcaggtatttttttcttattagttaaagactgggtacagttatagtagatgctcaataaatgcttagtcagtgattgatctaacatcaaactaacagctttcagaaaggagactgttgacatcttttcaccaaggagtatatttgtagagtaatatatgtgtggaattttgaaattatatcatttgacatgatttatgaggcttatttaagctggagttagtaacgtaatagaagtattatttatacagaacatagttgaaagataggagatgtgaaagattaagtagtattttcttgtgcaaggcatattaataaatgtaattaaatgtcttaataagcagctggctgaactctagagagaactgctgtagtcttctgcaatcagtctctgtattggtatatccagtactatcgggtttaggttctttttatttttccttaaatcttacttgtttctagcgtcttaagagtggtaatggtaaaatgtgaagttacaataaacttctgcttgttttctcagaacatctttggcatgaggaagaactttttgtgaatgatacagtagtctcagcatctgttaatttgtggttttcaaagcatttttgacagagtttacctaatgtaaaaagattaaacagttttataaaacacaaataaacattcctacctgaactgtgaggaacagagtgtatagtacaaatgtaattaggcattgcctcctggcgaggttcttgatgcatgacttcgatgctggctgctgactgaggtgaccactgtcagtattgtactttggcatatgttgtttttaggaaaataatggaatgcattcttagattaacttactgtttttgagttggaaaaaataaaagatgaggtattataagtatgccaaatatttatacactacaaaagattaaaaaaggagagggagaaaaaaaaaggccagttatgattttaatagcgtctaatttttttttgactcgaattttgtggacactagtcaattgcataatttaacatggaggagctttcatttaaaagaagttctcagctactatattctgccattaaaattaaccatgcctgttaattttacattgcttgaagatataagtaagctgccgtcaatattgttttaagattttcttatagtttatgtttaaatggaaaagttacatatataatctatggtgcagggtcaggcattggccattaaagataagtttggctaactattttactgaagagactaatggtcttccctctgttgtactgctatgtttcttgatctgtttttccccaatgtaacagtctacattgaagtcctttagctctctccatatactaattgacatttgttaaggattcaatattttgtgaattctttttacccttaaaatgcatatctttcagagagataagaatgaattttgcaataatttatatgcagagtgtgcttatgggtttctgggagttcaagttagtaccccagagtgcttaaaagtatgatgctaaattctaaggctaatgtaatgactgtagattatctatgtccacattgttcaacagaaatataatgtgaaccacaacataatttttaattttctagtagccatattaaaaaagaaacaagcaaaattaattttaataacagtttatgtaacccagtatattaaaaatatcatttcaacatgtaatcaatataaaagattattaatgaaacaccttatcttctttttcttccatactaagtcttagatttgagtgtattttgcactcacagcacatctcaattctgactggccacattttaagtgctcagtagtcacatatggctaagggctactatactggacagtacagattcatagagtataaaatatgactttaactttggagatggtgaggtaggcctgtaattatggtactttaaaaattcagaatatttagaaaagcatctaatagaattatccacttgttttccttcatcttcattttaatatgttctagaagtaggatcagcctgttccaatttgccaagcattattaaggaggaataattccataccatgtaaaataccatgatatgctgattatactacattaacaaatttttaagttgcgttcactaaattctgtcctgtttcttcaaaataatatagcttaaattgcatgttaattgtatatcttacctattttgtttttatattattcttacaatataatcatgtatattaacaaacagccctgggattctaatcttcctctgcaactgtcttccaggacttactggcacttattacactgtgataagtggcagaaaagtagaatgaaatattctttttccattagatttgttcttatgtgaccatgtaccaagccagctataaagtattgtatttctgtagaatatggaaaatagtatttgtcttacctttgctaaatgtttgcaatttctaagtaaaccttttatctcctaaaatgaaaaaaa

SEQ ID NO: 1094 - DNA, 2421 bp, HOMO SAPIENS; identical to SEQ ID NO: 1060

SEQ ID NO: 1095 - DNA, 5257 bp, HOMO SAPIENS
gtgcagtcagggcttctgctgggcagggccggctgttaatctcgcctggcggagcggacaccggggcgtggtgggggagatgggccttataggtggcgtccgctggtgagaaacaccttgcgcaggtaaaagggtggcggcgagagggagttcccacccgtggctttcttagagaaatgaagtcttaagtcttaaatagacaacaaggaggggccgatcggtgtcttttggacgcgtctggagcccctccctccgccaaaggaaaagccccttggatgagaggcaggcgcttcagagaagctaagaaaagcacctctccgcgcgccccacctcctccgcctcgcgctcctcctgagcagcgggcccagactgcgctccggccgcggccctcgccccgcggagccctcctaccccggcccgacgctcggcccgcgacctgccccgagccctctccatggaggcagcccgcccctccggctcctggaacggagccctctgccggctgctcctgctgaccctcgcgatcttaatatttgccagtgatgcctgcaaaaatgtgacattacatgttccctccaaactagatgccgagaaacttgttggtagagttaacctgaaagagtgctttacagctgcaaatctaattcattcaagtgatcctgacttccaaattttggaggatggttcagtctatacaacaaatactattctattgtcctcggagaagagaagttttaccatattactttccaacactgagaaccaagaaaagaagaaaatatttgtctttttggagcatcaaacaaaggtcctaaagaaaagacatactaaagaaaaagttctaaggcgcgccaagagaagatgggctccaattccttgttcgatgctagaaaactccttgggtccttttccacttttccttcaacaggttcaatctgacacggcccaaaactataccatatactattccataagaggtcctggagttgaccaagaacctcggaatttattttatgtggagagagacactggaaacttgtattgtactcgtcctgtagatcgtgagcagtatgaatcttttgagataattgcctttgcaacaactccagatgggtatactccagaacttccactgcccctaataatcaaaatagaggatgaaaatgataactacccaatttttacagaagaaacttatacttttacaatttttgaaaattgcagagtgggcactactgtgggacaagtgtgtgctactgacaaagatgagcctgacacgatgcacacacgcctgaagtactccatcattgggcaggtgccaccatcacccaccctattttctatgcatccaactacaggcgtgatcaccacaacatcatctcagctagacagagagttaattgacaagtaccagttgaaaataaaagtacaagacatggatggtcagtattttggtctacagacaacttcaacttgtatcattaacattgatgatgtaaatgaccacttgccaacatttactcgtacttcttatgtgacatcagtggaagaaaatacagttgatgtggaaatcttacgagttactgttgaggataaggacttagtgaatactgctaactggagagctaattataccattttaaagggcaatgaaaatggcaattttaaaattgtaacagatgccaaaaccaatgaaggagttctttgtgtagttaagcctttgaattatgaagaaaagcaacagatgatcttgcaaattggtgtagttaatgaagctccattttccagagaggctagtccaagatcagccatgagcacagcaacagttactgttaatgtagaagatcaggatgagggccctgagtgtaaccctccaatacagactgttcgcatgaaagaaaatgcagaagtgggaacaacaagcaatggatataaagcatatgacccagaaacaagaagtagcagtggcataaggtataagaaattaactgatccaacagggtgggtcaccattgatgaaaatacaggatcaatcaaagttttcagaagcctggatagagaggcagagaccatcaaaaatggcatatataatattacagtccttgcatcagaccaaggagggagaacatgtacggggacactgggcattatacttcaagacgtgaatgataacagcccattcatacctaaaaagacagtgatcatctgcaaacccaccatgtcatctgcggagattgttgcggttgatcctgatgagcctatccatggcccaccctttgactttagtctggagagttctacttcagaagtacagagaatgtggagactgaaagcaattaatgatacagcagcacgtctttcctatcagaatgatcctccatttggctcatatgtagtacctataacagtgagagatagacttggcatgtctagtgtcacttcattggatgttacactgtgtgactgcattaccgaaaatgactgcacacatcgtgtagatccaaggattggcggtggaggagtacaacttggaaagtgggccatccttgcaatattgttgggcatagcattgctcttttgcatcctgtttacgctggtctgtggggcttctgggacgtctaaacaaccaaaagtaattcctgatgatttagcccagcagaacctaattgtatcaaacacagaagctcctggagatgacaaagtgtattctgcgaatggcttcacaacccaaactgtgggcgcttctgctcagggagtttgtggcaccgtgggatcaggaatcaaaaacggaggtcaggagaccatcgaaatggtgaaaggaggacaccagacctcggaatcctgccggggggctggccaccatcacaccctggactcctgcaggggaggacacacggaggtggacaactgcagatacacttactcggagtggcacagttttactcagccccgtcttggtgaagaatccattagaggacacactctgattaaaaattaaacaatgaaagaaagtgtatctgtgtaatcaagatgaaaatcacaagcatgcccaagactatgtcctgacatataactatgaaggaagaggatcggtggctgggtctgtaggttgttgcagtgaacgacaagaagaagatgggcttgaatttttggataatttggagcccaaatttaggacactagcagaagcatgcatgaagagatgagtgtgttctaataagtctctgaaagccagtggctttatgacttttaaaaaaaattacaaaccaagaattttttaaagcagaagatgctatttgtgggggtttttctctcattatttggatggaatctctttggtcaaatgcacatttacagagagacactataaacaagtacacaaatttttcaatttttacatatttttaaattacttatcttctatccaaggaggtctacagagaaattaaagtctgccttatttgttacatttgggtataatgacaacagccaatttatagtgcaataaaatgtaattaattcaagtccttattatagactatttgaagcacaacctaatggaaaattgtagagaccttgctttaacattatctccagttaattaagtgttcatgtggtgcttggaaactgttgttttcctgaacatctaaagtgtgtagactgcattcttgctattattttattcttgtaatgtgaccttttcactgtgcaaagggagatttctagccaggcattgactattacaatttcattttggtggagtttagttttaggttttattgtatataaaatcctgcactgaatctgtgtctcctctgttacctacttttgccagtgaaatttaagttttaaaatactttcagaatgtatttttactactgcaagtttttggtctttaaaatgtcaagtagcatctctctctttctctctgtctctttctgtttctctctccagttttttttttttttttaatttccatatgggctaaagaatccaaatattttaaaaatctgtctctcttttcttctctcataaagtgaattattccttttttttgttttatgtaagtgtatatattcttagtttttcttgaaatcattgtaatgttaactttgttgtttcaaatatcttggtgattgcttcattatctcttcaacaaaaaaaacctttaattttgccattgaaactgtagaactatgccatgcttttattagaagcagtgctctgtgttaacaacaagaatggtgtaattagaattgggatgtggatatttactgtatgacaacacatttacagttctgtaatgcaaggatgcagtttaaaaatgtgaagtagtgatggtttttgaaataagctttaaaatatagggatcttgaaggctccctggggtaactattttataacttagataaaatggctagtcatatctgtgtgtttgtaaagttatttttttaatattttaagattacaattttaacaaatgtagaaatgagccaaactatttaaattttaaaacagtaaaacaaaatgaaacttaatagctcacaaaattccagtccatgtttcatgacttattttagtcaatgaattttctatttatactaaacatatggacattttaaatgtgtttctaatatttttgattatctataatgtgcctgtcttcaattcacaagattgggttataacaattatttgccagattaacactagggaattatttgataaccagcttatcttatcagtagttttattgctgatcaggcaaaaatagttttccaaagttatttttaataaagtatatacaaaattcttatatattactagtcatgataaagtaaattaagcagtttttaaaacttagtgtgagtttgttcatcacaggtctgatatgagtttaagggatttcgcactccctgaatcagagaagtaagaccccttccttagattcctgttatacattttttaaaatgtagagtttgttttggagacattttcagtgcattgttattgccatatttatataatatgactattctaaaggctgtgaggccatggggtattggttaagttgcttgcttttgctttgtccattttcatcattttaaaatgggggataataacagaacttgtttcctagggccattgtaagtcacttgaataaaaaatagttttgaagcatgagagtcatacagagcggtccacctaaaaggcactcctgataataataaatgattttaaacaaaaaaaaaaaaaa

SEQ ID NO: 1096 - DNA, 2949 bp, HOMO SAPIENS
gacgctccggaagtgacgtgctttcccgagccggggccatggcacctgcaaggtgtttctcagcaagattgaggaccgtgtttcagggcgtggggcattgggctttgtccacatgggctggcctgaagcccagccggctactgccacagcgggcttctcccaggctgctctcggtcggccgtgcggacctcgccaagcatcaggaactcccggggaagaagctgctctctgagaaaaagctgaaaaggtactttgtggactatcggagagtgcttgtctgtggaggaaacggaggcgctggggcaagctgcttccacagtgagccccgcaaggagtttggaggccctgatggaggggacggaggcaacggtggacacgtcattctgagagttgaccagcaagtcaagtccctgtcgtcggtcctgtcgcggtaccagggtttcagtggagaagatggagggagtaaaaactgcttcgggcgcagtggcgccgtcctctacatccgggtccccgtgggcacgctggtgaaggagggaggcagagttgtggccgacctgtcttgcgtgggagatgagtacattgccgcgctgggcggggcaggagggaaaggcaaccgcttcttcctggccaacaacaaccgtgcccctgtgacctgtacccctggacagccaggacagcagcgagttctccacctggagctcaagacggtggcccacgccggaatggtgggattccccaacgccgggaagtcctcactgctccgggccatttcaaacgccagacccgccgtggcttcctacccgttcaccaccctgaagccccacgtcgggatcgtccactacgaaggccacctacaaatagcagtggccgacatccccggcatcatacgaggcgcccaccagaacaggggtctggggtccgccttcctcaggcacatcgagcgctgccgctttctcttgttcgtggtggatctttctcagcctgagccgtggactcaagttgacgatttaaaatatgaactggagatgtatgaaaagggcctgtctgcgaggccccacgcaatcgtcgcaaacaagattgacctccctgaagcccaagccaatctgtcccagctccgggatcacttgggacaggaggtcatcgtgctgtcggcgttgaccggcgagaacctggagcagctgctgttgcacctgaaggtgctgtatgacgcctacgcggaggccgagctgggccagggccgccagccgctcaggtggtagccacgccagagcggggtcgcctctgggcctctgtctgagcaaacctgggtgtgaattcggtggttttgaatgcataaagtgccttgtggacacgggggagttgtggtgcttctgggtctctgggccccgcctgctggcctgagatgccctcatgttgggaagcattccgtgccccctaccccgcctgccctccgtatttcctgcacctgtcagcctgcaccgactgatgagccagttgctcatttgtgctgattaacacccctaataaggggttggggtgcccataacggggtggccctgccgctgactcaggtctccgccatgcacgcgtggactctcggatgagctcagcagaaccgcacagccagagccccaggtcagaagtgcagaccagggttctcagcacagtgcccgtcgtgcttccatggcttgctacggagagagacctctggatccacactggggctgcgtctggcccgttgtccagcagccctgcggtaccgcaagcccaggcaccagtgtctcggggggcctcactgctgcgcaaggggtggggccgaggatgcaagtccaggcagagcggcgcaggcagctgtgagcttttctccatcagccgtctgagaagagcagtgaggccagctgcttcctgtccttcagaacacttctctgtgctcagtgggagccaggaagcctcaggcttcacgactgaatgcacccaatatccgacctggctgcgtgtttctggctgggctgccgtgtgcacagcaagttaactagaggggctgtgggccatggaactgtcagcgttattctcagaaggcggccgtggcatgggcagggtatagtgaggagtggaaggagacgtgtgcctggtaatatggggcggaatttccactcagctccatttgctggggatttaaagagaacccttgtgctacgccaggcagttaccgagccgaagggagatgatgggccttcgcccctcagtgggatggcagctgagggggccctgcatttgaccgtcgagactgcagcagcgcctttcctgtctgtggtttaagtctttgcagtcaagtactgatgcatccaagccaggcccatgcctggtgtctccctgactgcagaggagccccagggcaaggacagctcagctgctggcagcctgcctggcccatagacatcccccaagtagtctcaggcctctgacatgtccctgaggggcccctaagaaagaaagtggaggggacactccagaggctgtcgtgggaggatcatgtgagcctgggaggtcaaggctgcagtgagccgtgattgcaccactgcactccagcctgagtgacagagcgagaccctgtctcaaaaaacaaacaaacaaacaaacaaaaacagaacattctgggcacggtggctcatgcctgtagtcccagcactttgggaggccgaggctggtggatcacaaggtcaggagattgagaccatcctggctaacacagtgaaaccccgtctctactaaaaatacaaaaaaattagccaggcgtggtggcggtcacctgtagtcccagctactcgggaggctgaagcaggagaatggcgtgaacctgggaggcggagcttgcagtgagccgagatcacaccactgcactccagcctgagcgacagagcaagactccatctcaaaaaaaaaaaaaaa

SEQ ID NO: 1097 - DNA, 971 bp, HOMO SAPIENS
gtccgggtgacgtctcccgagggcgtcggcagggtcggcggcgtcggcagcagtgtcgacggcagcggcggcggcgggtgggaaatggcggagtatctggcctccatcttcggcaccgagaaagacaaagtcaactgttcattttatttcaaaattggagcatgtcgtcatggagacaggtgctctcggttgcacaataaaccgacgtttagccagaccatcttgattcaaaacatctatcgtaatccccaaaacagtgcacagacggctgacggctcacactgtgccgtgagcgatgtggagatgcaggaacactatgatgagttttttgaggaggtttttacagaaatggaggagaagtatggggaagtagaggagatgaacgtctgtgacaacctgggagaccacctggtggggaacgtgtacgtcaagtttcgccgtgaggaagatgcggaaaaggctgtgattgacttgaataaccgttggtttaatggacagccgatccacgccgagctgtcacccgtgacggacttcagagaagcctgctgccgtcagtatgagatgggagaatgcacacgaggcggcttctgcaacttcatgcatttgaagcccatttccagagagctgcggcgggagctgtatggccgccgtcgcaagaagcatagatcaagatcccgatcccgggagcgtcgttctcggtctagagaccgtggtcgtggcggtggcggtggcggtggtggaggtggcggcggacgggagcgtgacaggaggcggtcgagagatcgtgaaagatctgggcgattctgagccatgccatttttaccttatgtctgctagaaagtgttgtagttgattgaccaaaccagttcataaggggaattttttttaaaaaacaacaaaaaaaaaaacatacaaagatgggtttctgaataaaatttgtagtgataacagtaaaaaaaaaaaaaaaaaaa

SEQ ID NO: 1098 - DNA, 1075 bp, HOMO SAPIENS
cagagctgctgtcatggcggccgctctgtggggcttctttcccgtcctgctgctgctgctgctatcgggggatgtccagagctcggaggtgcccggggctgctgctgagggatcgggagggagtggggtcggcataggagatcgcttcaagattgaggggcgtgcagttgttccaggggtgaagcctcaggactggatctcggcggcccgagtgctggtagacggagaagagcacgtcggtttccttaagacagatgggagttttgtggttcatgatataccttctggatcttatgtagtggaagttgtatctccagcttacagatttgatcccgttcgagtggatatcacttcgaaaggaaaaatgagagcaagatatgtgaattacatcaaaacatcagaggttgtcagactgccctatcctctccaaatgaaatcttcaggtccaccttcttactttattaaaagggaatcgtggggctggacagactttctaatgaacccaatggttatgatgatggttcttcctttattgatatttgtgcttctgcctaaagtggtcaacacaagtgatcctgacatgagacgggaaatggagcagtcaatgaatatgctgaattccaaccatgagttgcctgatgtttctgagttcatgacaagactcttctcttcaaaatcatctggcaaatctagcagcggcagcagtaaaacaggcaaaagtggggctggcaaaaggaggtagtcaggccgtccagagctggcatttgcacaaacacggcaacactgggtggcatccaagtcttggaaaaccgtgtgaagcaactactataaacttgagtcatcccgacgttgatctcttacaactgtgtatgttaactttttagcacatgttttgtacttggtacacgagaaaacccagctttcatcttttgtctgtatgaggtcaatattgatgtcactgaattaattacagtgtcctatagaaaatgccattaataaattatatgaactactatacattatgtatattaattaaaacatcttaatccagaaaaaaaaaaaaaaaaaaaaaaaa

SEQ ID NO: 1099 - DNA, 1776 bp, HOMO SAPIENS
caactatggttgctaacacaagaatcggcactggtgacttttgagccatcaatcatcctttcctaacacatgaatcttttggaaaatggtctcaaatagtcaagaccccctgctgggaggagcttctatcctgctctgtggaagaaatgggcatgccagatgcctggaagatcagaggctcacattccagttcaaagttagagaaacctgagaggggtgtactggtatgaccacccgagatcccatcgctgagaaagataatggccctggagacaaagactgatgaagaaagacagtatccagctgtgatgcagatgaaacatgcggcatggttgcactcactatgcagccaaggctggaagccactctggatccagccactctggcacagcgttcttgctctaggaagaacaactgaacatggccacacaggcctcacagctggcatatggaggctgttaataagctgagcttgaggcttcaaaggactcttgtagcctgtgctggatctagcagtgaccagtatgccagtggccatggatgcccaggcccatgttcagtagtgaagcaggtgctagcagcagaagcaatagaaatggaaactgggagatctgctgtggatgaatctcattatcttctttctctgaccctctttggactaaataaactcccagtattcttgaccaacagaggtagggttggaacagaacctcaaaagtcatcattagacttcctactaatagggcattggaagttcaagcgactaactaggaaacaggttagtatttgtacccctacactgtgcaacagattacataccatttgctctatttggcatcctttccttaggctagattcccagaagaaagattactgattcgaagggcatgaacatttttatgactcttggcctaaattactaggccaaggttttttcaaagggatgcactaattttcactatttccccacaccctttcaggtgataaataattgacttgatttgtttacactgacgccaagaattcttgggaagaaggatcaaagtgaaaagtggtagcccatggtggggaggccacactcagtgcagttgtgaagtcagcagcatttttaagcccattcattgccagtagccctgagatgagcattcccaagctgcttcccaggtccctcctccactctctcagggacatccattctgtaccagccccctcagatactcatgcccttgccctcccttctccatgctcattaaaaccagcttaagagcagatatgacatcagtcacttaccttttcgtgtggctctaaatcaaagtgtcacctctcccaagcacatgcttgcatcttagctctgattgaggaatgaaaagctttgttctctgttaaaagaactttgagcttagatgccccagactgagaaatccaccaaaagctggacctttgacttgagcggcaaaggacccccatagtcaggctgtgatttgaggagcatcaagaggccagagtttccaagttgggacccagaaggtggggttggcagggggagggtaggagcagctggagactctgctctaccaggggaatacggaggtggggaccaatcccagggtaaggaatgaaagtaggagccccagaagctgaaaacatacttcaccgatgtcagcattttacccagagccattccaaggtgaccataactcacttaaaagcctgaaagctgttttatgccaactaataaagtgcagtttaataaaaaaaaaaaaaaaaaaaaaaaaa

SEQ ID NO: 1100 - DNA, 4900 bp, HOMO SAPIENS
agggccgggcttcgtgcggtggggctcgctcgcgcggcagcggtggccgaggcctcttggttctgcggcacgtgacggtcgggccgcctccgcctctctctttactgcggcgcggggcaagatcatggaagggaagtggttgctgtgtatgttactggtgcttggaactgctattgttgaggctcatgatggacatgatgatgatgtgattgatattgaggatgaccttgacgatgtcattgaagaggtagaagactcaaaaccagataccactgctcctccttcatctcccaaggttacttacaaagctccagttccaacaggggaagtatattttgctgattcttttgacagaggaactctgtcagggtggattttatccaaagccaagaaagacgataccgatgatgaaattgccaaatatgatggaaagtgggaggtagaggaaatgaaggagtcaaagcttccaggtgataaaggacttgtgttgatgtctcgggccaagcatcatgccatctctgctaaactgaacaagcccttcctgtttgacaccaagcctctcattgttcagtatgaggttaatttccaaaatggaatagaatgtggtggtgcctatgtgaaactgctttctaaaacaccagaactcaacctggatcagttccatgacaagaccccttatacgattatgtttggtccagataaatgtggagaggactataaactgcacttcatcttccgacacaaaaaccccaaaacgggtatctatgaagaaaaacatgctaagaggccagatgcagatctgaagacctattttactgataagaaaacacatctttacacactaatcttgaatccagataatagttttgaaatactggttgaccaatctgtggtgaatagtggaaatctgctcaatgacatgactcctcctgtaaatccttcacgtgaaattgaggacccagaagaccggaagcccgaggattgggatgaaagaccaaaaatcccagatccagaagctgtcaagccagatgactgggatgaagatgcccctgctaagattccagatgaagaggccacaaaacccgaaggctggttagatgatgagcctgagtacgtacctgatccagacgcagagaaacctgaggattgggatgaagacatggatggagaatgggaggctcctcagattgccaaccctagatgtgagtcagctcctggatgtggtgtctggcagcgacctgtgattgacaaccccaattataaaggcaaatggaagcctcctatgattgacaatcccagttaccagggaatctggaaacccaggaaaataccaaatccagatttctttgaagatctggaacctttcagaatgactccttttagtgctattggtttggagctgtggtccatgacctctgacattttttttgacaactttatcatttgtgctgatcgaagaatagttgatgattgggccaatgatggatggggcctgaagaaagctgctgatggggctgctgagccaggcgttgtggggcagatgatcgaggcagctgaagagcgcccgtggctgtgggtagtctatattctaactgtagcccttcctgtgttcctggttatcctcttctgctgttctggaaagaaacagaccagtggtatggagtataagaaaactgatgcacctcaaccggatgtgaaggaagaggaagaagagaaggaagaggaaaaggacaagggagatgaggaggaggaaggagaagagaaacttgaagagaaacagaaaagtgatgctgaagaagatggtggcactgtcagtcaagaggaggaagacagaaaacctaaagcagaggaggatgaaattttgaacagatcaccaagaaacagaaagccacgaagagagtgaaacaatcttaagagcttgatctgtgatttcttctccctcctcccctgcaagagtggtcctaggagaggacctggcacaccttaggttgacattcagaaaacttcaagacatcaccatcagcaggctccagttgaacactagtctgtgtaactttaaacatctagcagtaaatacttgcagttgtgatataaaggaccctgtttctgtagaaaagaaaacatttaacataatggttgtgaaatgtaacatgaagcaaactaacttttttttttttaacatctttgtttttaaaatagaatgatagaactttgccagtctttaagatcttggcttaatttaatgtattaatctgtttgtgcaaacataataccaccatttaaaaatgttagggagatgagttgcagtttttataatagattttttttaaagtttggtattgtaaaacattcacacctctgtccctcaaaattgataattacgtttaaagtgcagtcatttgtggttagaatcttgttttgtttgcttccattattgagttcctcctaaggaaattgaggagagggactgaatagaagcccaaattcatataaaagttgcgtttaagttgtattaaaaatagatatataagaaaaaattctttcacttgatgtttgttagaccagaaagtgtgtgtgttctgtagctcagttcccagacagctttttaggtagtggaggaggtggcttcatgtggcacttgggcatttatattccacttgggagggtcaggctgtggccttctggagcaggtggcttgttaaggaatgctagcagggcatggcacgtgagctccggaatagatgtcttcatcacttcttccactgtgtgttgacactgttttccttacctatttcctcagatccccagctttctcctctgctatgcattttcttcacagtgcagcttgcagtccgttgctgaaaatgattataagccctgcataatgttaagctttattgtgattacgtgtatgtttcttctttcttttaagcagacccatacctttccagggtcaaagtacagaatagaatacattgatacaaagtacagaaaaatactttgatttttatccatttcttttactctgtgtaaagacttgagaagtctaattcacaggcaaaccaatacagaattgactgcagttgaacagactagaagtatttgtgggaggagtgacatgaagcatgagttatctgattttttttgtagctgctatatattttaagccttcatttgcaattcatgtaacagttgtgtcataaattacacaataaagcagtcctgttcaaatttttttttaacgtggcttgtagaatttttaaaaaagtgatcttaggtttgttttttcatgcgggatgcagatgggtgctatcagagcctctcccacaccactatagtgtaataatgttattattactctacactgaaacgtattcagagttagatattattttagcttcagttgttctttagaggctttcaaatgtaccgatgatactgtttcttgcactgaatatataaacactccacagtgtttatattgggaagatattgggaaggaaatatatttgtaaaagatgaaggctgtatctatttttttttctttttaaagtttgttcacttaaattcttttgaggatgggatgtatttttcttgctgttcagtgctttttccttttcatctgttgttctgtggtcacagtgaccttagctacatagcagactttcccaaatgtattgattacaaataaacagttgttacttagcaagacctgaaaatatgtctgcaggtttctccttgaagcaaatgtgtgggatcattgcatttccagaaatctgcctccttcaccctccgttgacagtatatgtcatgcctcactttcttctagctgagctttaaatcattagagcttaaattgtcagatcgttcattgcctttccagggttatttagtaaagtttgttgaaaacaaaaacgccttttcttggttcttttttcagttattttgaaggtccagcatcctgattaaatgtctgacacattaatgaatgaccagcagcagctttcagctcttaaaaagacacttatattttgattttacatgctggttacctgttccattgttgtcaaatgcccactctccatcagatgtgttcctccattttcttatccacaaagtactcctcacttttcaatttgtcatgttactaaatggtgttacattaaagccctgtgttaagtgtctgcttttgactgaatttcttcatagtaaccttcagtgtgtgtgtgtgactatgttcaattagtgggttgatcttcgtataattggccactatgtgagagttcactactaggcagaaactattatggacagtgaaataatgacttttatctcaccacgtgagtttgatgcagtcttttctgtctagcccttgcctcttcctgcccatgtgattgcggtgcagtagtttctgttgtataatagtgtggacagcagctcagaaaaggagggaatgctactgataatttgtagataatattctttaagacttaggggaaccattgaactttgaaatttttattagaaaattatttgttcagaatcagactccattattttacatatacttaaatactttaggggtatttttgaaagttagcccagttttttatgtgctattaaatttttagattacatactaaagaaaagtatgtacacagaatgtagtgctcctagttactattttttctattaagaaatagtttagttctggtgtaaaatttgtttgaatgctaaaaaaaaaaaagcaggactgcattatggcacttttgccttggtggcccactttctccatttaaaacattaggatttgtatttttctgctgcgtttgtatgaagacatatttgattgttgttttctcttgattttaaaataaaacctcatgagccctagtaaaaa

SEQ ID NO: 1101 - DNA, 6846 bp, HOMO SAPIENS; identical to SEQ ID NO: 1057

SEQ ID NO: 1102 - DNA, 11427 bp, HOMO SAPIENS
taccgggcggaggtgagcgcggcgccggctcctcctgcggcggactttgggtgcgacttgacgagcggtggttcgacaagtggccttgcgggccggatcgtcccagtggaagagttgtaaatttgcttctggccttcccctacggattatacctggccttcccctacggattatactcaacttactgtttagaaaatgtggcccacgagacgcctggttactatcaaaaggagcggggtcgacggtccccactttcccctgagcctcagcacctgcttgtttggaaggggtattgaatgtgacatccgtatccagcttcctgttgtgtcaaaacaacattgcaaaattgaaatccatgagcaggaggcaatattacataatttcagttccacaaatccaacacaagtaaatgggtctgttattgatgagcctgtacggctaaaacatggagatgtaataactattattgatcgttccttcaggtatgaaaatgaaagtcttcagaatggaaggaagtcaactgaatttccaagaaaaatacgtgaacaggagccagcacgtcgtgtctcaagatctagcttctcttctgaccctgatgagagtgagggaatacctttgaaaagaaggcgtgtgtcctttggtgggcacctaagacctgaactatttgatgaaaacttgcctcctaatacgcctctcaaaaggggagaagccccaaccaaaagaaagtctctggtaatgcacactccacctgtcctgaagaaaatcatcaaggaacagcctcaaccatcaggaaaacaagagtcaggttcagaaatccatgtggaagtgaaggcacaaagcttggttataagccctccagctcctagtcctaggaaaactccagttgccagtgatcaacgccgtaggtcctgcaaaacagcccctgcttccagcagcaaatctcagacagaggttcctaagagaggagggagaaagagtggcaacctgccttcaaagagagtgtctatcagccgaagtcaacatgatattttacagatgatatgttccaaaagaagaagtggtgcttcggaagcaaatctgattgttgcaaaatcatgggcagatgtagtaaaacttggtgcaaaacaaacacaaactaaagtcataaaacatggtcctcaaaggtcaatgaacaaaaggcaaagaagacctgctactccaaagaagcctgtgggcgaagttcacagtcaatttagtacaggccacgcaaactctccttgtaccataataatagggaaagctcatactgaaaaagtacatgtgcctgctcgaccctacagagtgctcaacaacttcatttccaaccaaaaaatggactttaaggaagatctttcaggaatagctgaaatgttcaagaccccagtgaaggagcaaccgcagttgacaagcacatgtcacatcgctatttcaaattcagagaatttgcttggaaaacagtttcaaggaactgattcaggagaagaacctctgctccccacctcagagagttttggaggaaatgtgttcttcagtgcacagaatgcagcaaaacagccatctgataaatgctctgcaagccctcccttaagacggcagtgtattagagaaaatggaaacgtagcaaaaacgcccaggaacacctacaaaatgacttctctggagacaaaaacttcagatactgagacagagccttcaaaaacagtatccactgcaaacaggtcaggaaggtctacagagttcaggaatatacagaagctacctgtggaaagtaagagtgaagaaacaaatacagaaattgttgagtgcatcctaaaaagaggtcagaaggcaacactactacaacaaaggagagaaggagagatgaaggaaatagaaagaccttttgagacatataaggaaaatattgaattaaaagaaaacgatgaaaagatgaaagcaatgaagagatcaagaacttgggggcagaaatgtgcaccaatgtctgacctgacagacctcaagagcttgcctgatacagaactcatgaaagacacggcacgtggccagaatctcctccaaacccaagatcatgccaaggcaccaaagagtgagaaaggcaaaatcactaaaatgccctgccagtcattacaaccagaaccaataaacaccccaacacacacaaaacaacagttgaaggcatccctggggaaagtaggtgtgaaagaagagctcctagcagtcggcaagttcacacggacgtcaggggagaccacgcacacgcacagagagccagcaggagatggcaagagcatcagaacgtttaaggagtctccaaagcagatcctggacccagcagcccgtgtaactggaatgaagaagtggccaagaacgcctaaggaagaggcccagtcactagaagacctggctggcttcaaagagctcttccagacaccaggtccctctgaggaatcaatgactgatgagaaaactaccaaaatagcctgcaaatctccaccaccagaatcagtggacactccaacaagcacaaagcaatggcctaagagaagtctcaggaaagcagatgtagaggaagaattcttagcactcaggaaactaacaccatcagcagggaaagccatgcttacgcccaaaccagcaggaggtgatgagaaagacattaaagcatttatgggaactccagtgcagaaactggacctggcaggaactttacctggcagcaaaagacagctacagactcctaaggaaaaggcccaggctctagaagacctggctggctttaaagagctcttccagactcctggtcacaccgaggaattagtggctgctggtaaaaccactaaaataccctgcgactctccacagtcagacccagtggacaccccaacaagcacaaagcaacgacccaagagaagtatcaggaaagcagatgtagagggagaactcttagcgtgcaggaatctaatgccatcagcaggcaaagccatgcacacgcctaaaccatcagtaggtgaagagaaagacatcatcatatttgtgggaactccagtgcagaaactggacctgacagagaacttaaccggcagcaagagacggccacaaactcctaaggaagaggcccaggctctggaagacctgactggctttaaagagctcttccagacccctggtcatactgaagaagcagtggctgctggcaaaactactaaaatgccctgcgaatcttctccaccagaatcagcagacaccccaacaagcacaagaaggcagcccaagacacctttggagaaaagggacgtacagaaggagctctcagccctgaagaagctcacacagacatcaggggaaaccacacacacagataaagtaccaggaggtgaggataaaagcatcaacgcgtttagggaaactgcaaaacagaaactggacccagcagcaagtgtaactggtagcaagaggcacccaaaaactaaggaaaaggcccaacccctagaagacctggctggcttgaaagagctcttccagacaccagtatgcactgacaagcccacgactcacgagaaaactaccaaaatagcctgcagatcacaaccagacccagtggacacaccaacaagctccaagccacagtccaagagaagtctcaggaaagtggacgtagaagaagaattcttcgcactcaggaaacgaacaccatcagcaggcaaagccatgcacacacccaaaccagcagtaagtggtgagaaaaacatctacgcatttatgggaactccagtgcagaaactggacctgacagagaacttaactggcagcaagagacggctacaaactcctaaggaaaaggcccaggctctagaagacctggctggctttaaagagctcttccagacacgaggtcacactgaggaatcaatgactaacgataaaactgccaaagtagcctgcaaatcttcacaaccagacccagacaaaaacccagcaagctccaagcgacggctcaagacatccctggggaaagtgggcgtgaaagaagagctcctagcagttggcaagctcacacagacatcaggagagactacacacacacacacagagccaacaggagatggtaagagcatgaaagcatttatggagtctccaaagcagatcttagactcagcagcaagtctaactggcagcaagaggcagctgagaactcctaagggaaagtctgaagtccctgaagacctggccggcttcatcgagctcttccagacaccaagtcacactaaggaatcaatgactaacgaaaaaactaccaaagtatcctacagagcttcacagccagacctagtggacaccccaacaagctccaagccacagcccaagagaagtctcaggaaagcagacactgaagaagaatttttagcatttaggaaacaaacgccatcagcaggcaaagccatgcacacacccaaaccagcagtaggtgaagagaaagacatcaacacgtttttgggaactccagtgcagaaactggaccagccaggaaatttacctggcagcaatagacggctacaaactcgtaaggaaaaggcccaggctctagaagaactgactggcttcagagagcttttccagacaccatgcactgataaccccacgactgatgagaaaactaccaaaaaaatactctgcaaatctccgcaatcagacccagcggacaccccaacaaacacaaagcaacggcccaagagaagcctcaagaaagcagacgtagaggaagaatttttagcattcaggaaactaacaccatcagcaggcaaagccatgcacacgcctaaagcagcagtaggtgaagagaaagacatcaacacatttgtggggactccagtggagaaactggacctgctaggaaatttacctggcagcaagagacggccacaaactcctaaagaaaaggccaaggctctagaagatctggctggcttcaaagagctcttccagacaccaggtcacactgaggaatcaatgaccgatgacaaaatcacagaagtatcctgcaaatctccacaaccagacccagtcaaaaccccaacaagctccaagcaacgactcaagatatccttggggaaagtaggtgtgaaagaagaggtcctaccagtcggcaagctcacacagacgtcagggaagaccacacagacacacagagagacagcaggagatggaaagagcatcaaagcgtttaaggaatctgcaaagcagatgctggacccagcaaactatggaactgggatggagaggtggccaagaacacctaaggaagaggcccaatcactagaagacctggccggcttcaaagagctcttccagacaccagaccacactgaggaatcaacaactgatgacaaaactaccaaaatagcctgcaaatctccaccaccagaatcaatggacactccaacaagcacaaggaggcggcccaaaacacctttggggaaaagggatatagtggaagagctctcagccctgaagcagctcacacagaccacacacacagacaaagtaccaggagatgaggataaaggcatcaacgtgttcagggaaactgcaaaacagaaactggacccagcagcaagtgtaactggtagcaagaggcagccaagaactcctaagggaaaagcccaacccctagaagacttggctggcttgaaagagctcttccagacaccaatatgcactgacaagcccacgactcatgagaaaactaccaaaatagcctgcagatctccacaaccagacccagtgggtaccccaacaatcttcaagccacagtccaagagaagtctcaggaaagcagacgtagaggaagaatccttagcactcaggaaacgaacaccatcagtagggaaagctatggacacacccaaaccagcaggaggtgatgagaaagacatgaaagcatttatgggaactccagtgcagaaattggacctgccaggaaatttacctggcagcaaaagatggccacaaactcctaaggaaaaggcccaggctctagaagacctggctggcttcaaagagctcttccagacaccaggcactgacaagcccacgactgatgagaaaactaccaaaatagcctgcaaatctccacaaccagacccagtggacaccccagcaagcacaaagcaacggcccaagagaaacctcaggaaagcagacgtagaggaagaatttttagcactcaggaaacgaacaccatcagcaggcaaagccatggacacaccaaaaccagcagtaagtgatgagaaaaatatcaacacatttgtggaaactccagtgcagaaactggacctgctaggaaatttacctggcagcaagagacagccacagactcctaaggaaaaggctgaggctctagaggacctggttggcttcaaagaactcttccagacaccaggtcacactgaggaatcaatgactgatgacaaaatcacagaagtatcctgtaaatctccacagccagagtcattcaaaacctcaagaagctccaagcaaaggctcaagatacccctggtgaaagtggacatgaaagaagagcccctagcagtcagcaagctcacacggacatcaggggagactacgcaaacacacacagagccaacaggagatagtaagagcatcaaagcgtttaaggagtctccaaagcagatcctggacccagcagcaagtgtaactggtagcaggaggcagctgagaactcgtaaggaaaaggcccgtgctctagaagacctggttgacttcaaagagctcttctcagcaccaggtcacactgaagagtcaatgactattgacaaaaacacaaaaattccctgcaaatctcccccaccagaactaacagacactgccacgagcacaaagagatgccccaagacacgtcccaggaaagaagtaaaagaggagctctcagcagttgagaggctcacgcaaacatcagggcaaagcacacacacacacaaagaaccagcaagcggtgatgagggcatcaaagtattgaagcaacgtgcaaagaagaaaccaaacccagtagaagaggaacccagcaggagaaggccaagagcacctaaggaaaaggcccaacccctggaagacctggccggcttcacagagctctctgaaacatcaggtcacactcaggaatcactgactgctggcaaagccactaaaataccctgcgaatctcccccactagaagtggtagacaccacagcaagcacaaagaggcatctcaggacacgtgtgcagaaggtacaagtaaaagaagagccttcagcagtcaagttcacacaaacatcaggggaaaccacggatgcagacaaagaaccagcaggtgaagataaaggcatcaaagcattgaaggaatctgcaaaacagacaccggctccagcagcaagtgtaactggcagcaggagacggccaagagcacccagggaaagtgcccaagccatagaagacctagctggcttcaaagacccagcagcaggtcacactgaagaatcaatgactgatgacaaaaccactaaaataccctgcaaatcatcaccagaactagaagacaccgcaacaagctcaaagagacggcccaggacacgtgcccagaaagtagaagtgaaggaggagctgttagcagttggcaagctcacacaaacctcaggggagaccacgcacaccgacaaagagccggtaggtgagggcaaaggcacgaaagcatttaagcaacctgcaaagcggaagctggacgcagaagatgtaattggcagcaggagacagccaagagcacctaaggaaaaggcccaacccctggaagatctggccagcttccaagagctctctcaaacaccaggccacactgaggaactggcaaatggtgctgctgatagctttacaagcgctccaaagcaaacacctgacagtggaaaacctctaaaaatatccagaagagttcttcgggcccctaaagtagaacccgtgggagacgtggtaagcaccagagaccctgtaaaatcacaaagcaaaagcaacacttccctgcccccactgcccttcaagaggggaggtggcaaagatggaagcgtcacgggaaccaagaggctgcgctgcatgccagcaccagaggaaattgtggaggagctgccagccagcaagaagcagagggttgctcccagggcaagaggcaaatcatccgaacccgtggtcatcatgaagagaagtttgaggacttctgcaaaaagaattgaacctgcggaagagctgaacagcaacgacatgaaaaccaacaaagaggaacacaaattacaagactcggtccctgaaaataagggaatatccctgcgctccagacgccaaaataagactgaggcagaacagcaaataactgaggtctttgtattagcagaaagaatagaaataaacagaaatgaaaagaagcccatgaagacctccccagagatggacattcagaatccagatgatggagcccggaaacccatacctagagacaaagtcactgagaacaaaaggtgcttgaggtctgctagacagaatgagagctcccagcctaaggtggcagaggagagcggagggcagaagagtgcgaaggttctcatgcagaatcagaaagggaaaggagaagcaggaaattcagactccatgtgcctgagatcaagaaagacaaaaagccagcctgcagcaagcactttggagagcaaatctgtgcagagagtaacgcggagtgtcaagaggtgtgcagaaaatccaaagaaggctgaggacaatgtgtgtgtcaagaaaataagaaccagaagtcatagggacagtgaagatatttgacagaaaaatcgaactgggaaaaatataataaagttagttttgtgataagttctagtgcagtttttgtcataaattacaagtgaattctgtaagtaaggctgtcagtctgcttaagggaagaaaactttggatttgctgggtctgaatcggcttcataaactccactgggagcactgctgggctcctggactgagaatagttgaacaccgggggctttgtgaaggagtctgggccaaggtttgccctcagctttgcagaatgaagccttgaggtctgtcaccacccacagccaccctacagcagccttaactgtgacacttgccacactgtgtcgtcgtttgtttgcctatgtcctccagggcacggtggcaggaacaactatcctcgtctgtcccaacactgagcaggcactcggtaaacacgaatgaatggatgagcgcacggatgaatggagcttacaagatctgtctttccaatggccgggggcatttggtccccaaattaaggctattggacatctgcacaggacagtcctatttttgatgtcctttcctttctgaaaataaagttttgtgctttggagaatgactcgtgagcacatctttagggaccaagagtgactttctgtaaggagtgactcgtggcttgccttggtctcttgggaatacttttctaactagggttgctctcacctgagacattctccacccgcggaatctcagggtcccaggctgtgggccatcacgacctcaaactggctcctaatctccagctttcctgtcattgaaagcttcggaagtttactggctctgctcccgcctgttttctttctgactctatctggcagcccgatgccacccagtacaggaagtgacaccagtactctgtaaagcatcatcatccttggagagactgagcactcagcaccttcagccacgatttcaggatcgcttccttgtgagccgctgcctccgaaatctcctttgaagcccagacatctttctccagcttcagacttgtagatataactcgttcatcttcatttactttccactttgccccctgtcctctctgtgttccccaaatcagagaatagcccgccatcccccaggtcacctgtctggattcctccccattcacccaccttgccaggtgcaggtgaggatggtgcaccagacagggtagctgtcccccaaaatgtgccctgtgcgggcagtgccctgtctccacgtttgtttccccagtgtctggcggggagccaggtgacatcataaatacttgctgaatgaatgcagaaatcagcggtactgacttgtactatattggctgccatgatagggttctcacagcgtcatccatgatcgtaagggagaatgacattctgcttgagggagggaatagaaaggggcagggaggggacatctgagggcttcacagggctgcaaagggtacagggattgcaccagggcagaacaggggagggtgttcaaggaagagtggctcttagcagaggcactttggaaggtgtgaggcataaatgcttccttctacgtaggccaacctcaaaactttcagtaggaatgttgctatgatcaagttgttctaacactttagacttagtagtaattatgaacctcacatagaaaaatttcatccagccatatgcctgtggagtggaatattctgtttagtagaaaaatcctttagagttcagctctaaccagaaatcttgctgaagtatgtcagcaccttttctcaccctggtaagtacagtatttcaagagcacgctaagggtggttttcattttacagggctgttgatgatgggttaaaaatgttcatttaagggctacccccgtgtttaatagatgaacaccacttctacacaaccctccttggtactgggggagggagagatctgacaaatactgcccattcccctaggctgactggatttgagaacaaatacccacccatttccaccatggtatggtaacttctctgagcttcagtttccaagtgaatttccatgtaataggacattcccattaaatacaagctgtttttactttttcgcctcccagggcctgtgggatctggtcccccagcctctcttgggctttcttacactaactctgtacctaccatctcctgcctcccttaggcaggcacctccaaccaccacacactccctgctgttttccctgcctggaactttccctcctgccccaccaagatcatttcatccagtcctgagctcagcttaagggaggcttcttgcctgtgggttccctcacccccatgcctgtcctccaggctggggcaggttcttagtttgcctggaattgttctgtacctctttgtagcacgtagtgttgtggaaactaagccactaattgagtttctggctcccctcctggggttgtaagttttgttcattcatgagggccgactgcatttcctggttactctatcccagtgaccagccacaggagatgtccaataaagtatgtgatgaaatggtcttaaaaaaaaaaaaaa

SEQ ID NO: 1103 - DNA, 6135 bp, HOMO SAPIENS
actgtctctccccatccggggcagcggggaatggctgagccaggggttcgccgcccccgccgccgccgccgccgccgccgccgccgccgccgcccgctttcggctcgggcctcaggaccgtagcatcctgagacattttgaattgacacttctcaagatttgactggatcagagttcatcatgtcaaagttgaaaagctcagagtcagtcagggtggtggttcgctgtcggcccatgaatggcaaggaaaaggctgcttcgtatgacaaagtggtggatgtggatgttaagctggggcaggtgtctgtgaagaaccccaaagggacggcccatgaaatgcccaagaccttcacctttgatgccgtctatgactggaatgccaagcagtttgaactgtacgatgagacgttccgaccacttgttgactctgtcctgcaaggtttcaatggaaccatttttgcctatggacaaactgggacaggaaaaacctacaccatggaaggaatccgtggtgaccctgaaaaaagaggagtcattcctaactcatttgaccatatcttcacccacatctctcgatcccagaatcaacaatacctggtcagggcttcttacttagagatctaccaggaggagatccgagatttgctctcaaaggatcagaccaaaaggcttgagctcaaagagaggcctgacacaggagtgtatgtgaaagacctgtcttcctttgtcaccaagagtgtgaaggagatagagcatgtgatgaatgtggggaaccagaaccgttctgtcggtgctaccaacatgaacgagcacagctcgcgttctcatgcaattttcgttatcactattgagtgcagcgaggtgggcctcgatggtgaaaaccacatccgtgtaggaaaattgaaccttgtagatcttgctggcagcgaacggcaagccaagaccggcgcacaaggggagagattaaaagaagctaccaagatcaacctctccctttccgctttgggtaatgtcatctctgctctagtggacggcaaaagcactcacattccatatcgggactcaaagcttaccaggctcctccaagattcccttggtggcaatgccaagactgtgatggtggccaacgtggggcctgcctcttacaacgtagaagagactctgaccactctgcgatatgccaaccgtgccaaaaacattaagaacaaaccaagggtcaatgaggaccccaaggatgccctccttcgagaattccaggaagagattgctcggctcaaggcccagctggaaaaacggtccattggtaggaggaagaggcgagagaagcggagggaaggtggtggcagtggtgggggtggggaagaggaggaggaggagggagaagagggtgaggaggaaggggatgataaggatgattactggcgggaacagcaagaaaaactggagattgagaagcgggccattgtagaggatcacagcttggttgcagaggagaagatgaggctgctgaaggagaaagagaaaaagatggaggacctgcggcgggagaaggatgctgccgagatgctgggcgccaagatcaaggccatggagagtaagttgcttgttggaggaaaaaatatagtagatcatacgaatgaacagcagaaaatcctggagcagaaacgacaggaaattgcagagcagaaacgtcgagaaagagaaatccagcaacagatggaaagtcgagatgaggagaccttggaacttaaagagacatacagctcattgcagcaagaggtggacatcaagaccaaaaaactcaaaaagctcttctccaagcttcaggcagtgaaggctgagatccatgacctccaagaagaacacatcaaggagcgccaagagctagagcagactcagaatgagctcaccagggagctgaaactcaagcatcttattatagaaaactttatccctctggaagaaaaaagtaaaattatgaatagagccttctttgatgaagaggaagatcattggaaactacatcctataaccagactggagaaccagcagatgatgaagcggccagtctcagccgtgggatataagagaccattgagccagcacgcaagaatgtccatgatgattcgtccagaggcccgatatagggcagaaaacattgtgctgttagagctggacatgcccagccggaccaccagagactatgagggtccagccattgcccccaaggtccaggctgcattggatgcggctctgcaggatgaagatgagatacaggtggatgcatcatcatttgaaagcactgcaaataagaaatccaaggccaggcctaaaagtggaaggaagtcgggatcctcctcctcttcctcaggaacccctgcatctcagctttatccacagtctcgggggctggttccaaagtaaagccagcttctcctctcccagggcggaaacagcatttgccttctgagagaagagactagcaaaaagctgcagagaggattcggcccaaactcagaactgttcccctgaggagaagcggtggcctctttgcagatcaaccaacttaatctggttgaacgtgctgttcctaatctggcactcagcccctctgggaaacatcttttaattagcatctcagaaatgcatgggtaaggtaaagtgcgatagttcaagtggaaagcaagagaatgaccagtgaccttgcttccttcccccttgccttcttctcccccttcccctgtgctccctttctctcctctctccttttctagcctgttctttacatggggctcccttcttgttgaacaatagggcagaatcaggagtcaccttagcaggaccacatctttggagcctcgggataaaatgacagtgaggttgaaaagtgaaaaccctagaacttgaataggtgcctgttcttgtagggagaaatgagaaatcgcatttggatccaggccccaggtgggcaccatcagcagtcttgcttccatgcacctcagtaagaagtggatctgcctttgggacctgctcagtgaggaaatctcttccaatttctgcttctgaatgattcaatgttgggagcaatagaaataacattccctttgccttctctgagtgtttagggaaatagcttctttaaaacctcaaaaccatgaccatcctgtcaaagacctaagtctgtaagctggtgccatgtccatacaccatgtcactttactcttcatttgtcaccatcttttcccatgcacgcatactctgaacatccttgtgtgggcccatcctctgcatccagagcatgctctgcagtgggcctgttttgtggaagaaaggaggctgtctctgccttctctgatgggactggagttgagggaaggagctgtattgtggcacttctgaattccccgttttgttccatattggtatagagagcagaagagtagctaggcagatgcagagatggagacatgagactcagtgcagtgggcagggaagacataacagatggaagcaaaggaatcctgcctgccttcagcagagaattcaccgaatcctagaactgtggctccctccaggcagagcctaagatgctggtgaagaatagctgtgtgattgaataggctcaaaggagagttcagaattcccatttacatattactagtttggtttgtaagttttagttccttgtattattgagattcagagcttcattttatgttggtcattaggtgaatattactcattttccctcaagagaagctcataagtgtgtgtgggtgtgagagcacgatggtgcctgtgttctgtgaatgtgtccatatgtgtctgtaagagagacagagaccaagaacttgcccaattttagaaatacactaatgtgcagttgttgccttttgtctgtattgaaggcccattgaatgactaatccaggctggaagcattcccatgtgggtgtctgagtccatgagccaagcctgaggggacagtgagtctccaggtctgccacactggtgcaccttgctggcacggtgcctcaggaaggtggcgactcaggtgggccttgagttatattttaactcagctgctcagttcccagggcacatttctggatcagaacccatgggaaacaggaggtactaagtgcaatgtcttagcattctgcaaaatggagatctgttgtccagcggcttatctcctttttagtaacccttctttctgaacccagggcccttttcagccttccctcatattttcttgagatcaaactttacttctttcttatttactaagaatttgcctgtttgaataagaacaaaacgctaaggtgggtagcctaagctgattttctgctggttacacgtgtctctcacaccacatttcctcaaagctaatctgaattctgtaggctaaaaatattcatgtagcaaatctgagaattgaaaactgcagataaccggccgggtatggtgactcatgcctgtaatcctagcactttgggaggccgaggtgggtggaccacctgaggttaggacttcaagaccagcctggccaacatggtgaaaccccatctgtactaaaaatacaaaaatttgcctggtgtggtggtgcatgcctctagtcctagctactcgggaggctgaggcacgagaatcacttgaacctgggaggcggaggttgcagtgagtcgagataacactactgcattccagcctgggtgacagagtgagactccccctcaaaaaaaaaaaaaaaaaaaaaaaaaacagaaagaaagaaaaagaaaactgcagataaccctatacattaatactggtatctcgaggtgactcttctgaccaagggtggttaagtgacacatagaacttttctaagagaagacagacaagttgacaggcatgccttgtactcagctgtgttcatgtggtggtctgtggaaagaaaagaagactcatttggaaatgaagctgtccctttccaagcagtctctggtgcttttcttctctcaaaatggatccgataaatatttgaatagagcagattgtagaatgtcgtgctgtcaccagaaagctgctgttttgggttctgcattgagccaaatatgtagaggacctaccaagcccactgagggactaggttttcatgtctctagtcatacctagaatgttctgagccgtctgagggccttcatgccggcagcagctagcaaagccagaaagcaagtctaacaggatctaagatgaccatcaggagaaggagtttgagactgtgtatgcaacccccaatagacccccttttactctgatctggagaatgtatctggcttcatattttcaagtcacatgtctctcagacccctggattcagaacccaaggccacaaatcataggcatgaagcactttcttaagactgacctaacgctggattatttcccgtccaatgcctgcatgctgcttgaattgctccacccacacctccatgaccaagggcgccagagtgctgcaactggggcgtgggccgctctctgcttttcctgtctgactctgacaagtcctccctcactgaatgtagaatcgttgccaagtttctgagaagtgtcgattccctgttaacatggatatcagttctgcctcacatttcccacttgaggttgaggcgtactggagacaacacctcagaccatctgaaccccatcagtggacgaaaatggggctgttaatatactctaaaagccatactaaaaatgctctgagggaactggctaagaatagtgggcctggtgattgtctatcacgcaaggctttgttttgtactgttcagaaatctgtcacctttctgcctgcccttgtttcctgaatgaaatgcttctggggttatttatgaaaggagtgatcctggggcaggcaggaggcagtgggcttcatggctccttgaagttattactgatcttgaccttctctttggctacctttagacaaagaatacgccaatcaatacttggggctctaagttttacaattgatatttatttgtatcatctctttgtctaggaatgtaaaagtgattctaaactaagatgtgtaataaaaatcaatcagatttattgtacctacaaaaaaaaaaaaaaaaaaaaaaaa

SEQ ID NO: 1104 - DNA, 1432 bp, HOMO SAPIENS
ttttactgaagttgctagaagtttacagaaaaggaagtgcaggaacatttcacaaatctacaatctgtgagtatcacatcctgtatagctgtaaacactggaataaggaagggctgatgactttcagaagatgaaggtaagtagaaaccgttgatgggactgagaaaccagagttaaaacctctttggagcttctgaggactcagctggaaccaacgggcacagttggcaacaccatcatgacatcacaacctgttcccaatgagaccatcatagtgctcccatcaaatgtcatcaacttctcccaagcagagaaacccgaacccaccaaccaggggcaggatagcctgaagaaacatctacacgcagaaatcaaagttattgggactatccagatcttgtgtggcatgatggtattgagcttggggatcattttggcatctgcttccttctctccaaattttacccaagtgacttctacactgttgaactctgcttacccattcataggaccctttttttttatcatctctggctctctatcaatcgccacagagaaaaggttaaccaagcttttggtgcatagcagcctggttggaagcattctgagtgctctgtctgccctggtgggtttcattatcctgtctgtcaaacaggccaccttaaatcctgcctcactgcagtgtgagttggacaaaaataatataccaacaagaagttatgtttcttacttttatcatgattcactttataccacggactgctatacagccaaagccagtctggctggaactctctctctgatgctgatttgcactctgctggaattctgcctagctgtgctcactgctgtgctgcggtggaaacaggcttactctgacttccctggggtgagtgtgctggccggcttcacttaaccttgcctagtgtatcttatccctgcactgtgttgagtatgtcaccaagagtggtagaaggaacaaccagccaatcacgagatacacatgggagggcatttgcattgtgatggaagacagagaagaaaagcagatggcaattgagtagctgataagctgaaaattcactggatatgaaaatagttaatcatgagaaatcaactgattcaatcttcctattttgtcagcgaagggaatgagactctgggaagttaaatgactggcctggcattatgctatgagtttgtgcctttgctgaggacactagaacctggcttgcctcccttataagcagaaacaatttctgccacaaccactagtctctttaatagtattgacttggtaaagggcatttacacacgtaactggatccagtgaatgtcttatgctctgcatttgcccctggtgatcttaaaattcgtttgcctttttaaagctatattaaaaatgtattgttgaatcaaaaaaaaaaaaaaa

SEQ ID NO: 1105 - DNA, 2709 bp, HOMO SAPIENS
acttccgggctcggcagctagactagcgggggcagcctcagagcgggtgagcttggggacgcacggagaggtgcagctgggccgtccagcatcaaacactagcctccacacgtggaaaagaccctgactcccacagtagactagtcttatgggagtcctggctcttgggccaggctgcattaggaaaatggaaaccagactgtcttcaaattcttctgcctagccttagccattagagagaggtcctgctaaagatggactgcaaatgcgcttgatggaaggagatgtcaattccactgaagtcctcatttctgctgagctacctgtgcaccctgcctccggctctcctgagcagagagatcctgatggctgactcagaagcactcccctcccttgctggggacccagtggctgtggaagccttgctccgggccgtgtttggggttgttgtggatgaggccattcagaaaggaaccagtgtctcccagaaggtctgtgagtggaaggagcctgaggagctgaagcagctgctggatttggagctgcggagccagggcgagtcacagaagcagatcctggagcggtgtcgggctgtgattcgctacagtgtcaagactggtcaccctcggttcttcaaccagctcttctctgggttggatccccatgctctggccgggcgcattatcactgagagcctcaacaccagccagtacacatatgaaatcgcccccgtgtttgtgctcatggaagaggaggtgctgaggaaactgcgggccctggtgggctggagctctggggacggaatcttctgccctggtggctccatctccaacatgtatgctgtaaatctggcccgctatcagcgctacccggattgcaagcagaggggcctccgcacactgccgcccctggccctattcacatcgaaggagtgtcactactccatccagaagggagctgcgtttctgggacttggcaccgacagtgtccgagtggtcaaggctgatgagagagggaaaatggtccccgaggatctggagaggcagattggtatggccgaggctgagggtgctgtgccgttcctggtcagtgccacctctggcaccactgtgctaggggcctttgaccccctggaggcaattgctgatgtgtgccagcgtcatgggctatggctgcatgtggatgctgcctggggtgggagcgtcctgctgtcacagacacacaggcatctcctggatgggatccagagggctgactctgtggcctggaatccccacaagctcctcgcagcaggcctgcaatgctctgcacttcttctccaggatacctcgaacctgctcaagcgctgccatgggtcccaggccagctaccttttccagcaggacaagttctacgatgtggctctggacacgggagacaaggtggtgcagtgtggccgccgtgtggactgtctgaagctgtggctcatgtggaaggcacagggcgatcaagggctggagcggcgcatcgaccaggcctttgtccttgcccggtacctggtggaggaaatgaagaagcgggaagggtttgagctagtcatggagcctgagtttgtcaatgtgtgtttctggttcgtaccccccagcctgcgagggaagcaggagagtccagattaccacgaaaggctgtcaaaggtggcccccgtgctcaaggagcgcatggtgaaggagggctccatgatgattggctaccagccccacgggacccggggcaacttcttccgtgtggttgtggccaactctgcactgacctgtgctgatatggacttcctcctcaacgagctggagcggctaggccaggacctgtgagccttctctgtcttgctgccggccttgataccacccctcacccgcagagtcactgcattccctcccagcctttgaggccgggtgcagtggctcacgcctgtaatcccagcactttgggaggccgaggcgggtggatcacttgaggtcaggagttcgagaccagcctggccaataaggtgaaaccctgtctctactaaaaatacaaaaattagccgagcatggtggcctgtgcctgtaaacccagctactcaggaggttggggcagaattgcttgaacccagggggcagaggttgcagtgagccgagattgcacccctgcactccaggctgggcaacagtacgagactctgttccaaaaaaaataaaaaagaacagcctttttaggccacagtgacctgcgcaatgtttatatgctttgacctactaactttctcctaactaaatatttgattttaggagagtgtttaaataaattacagtatgtctatatgatgaaatgttattttgccattaaaattttgtttacaaagataatttttattgacataaaaataactttaatgtaatttatgttgaaaaagctgaatacaagtctttatatagagtaatatttgagctgtgttcaaaaatacataggaaaagactgataaaatgaaatatggcaaaatgttaatagttttccctggaataggataataggcaattttaaaacagactcctttaaaaaaacaaacaaacaaaaaaaacatagacttctttatatcttttgagctccctcccttttattatgtaatgaatatgtgttgcttttgtaataggaaaataataaagttaaaatttcaactgcaaaaaaaaaaaaaaa

SEQ ID NO: 1106 - DNA, 8449 bp, HOMO SAPIENS
gcccgcgccggctgtgctgcacagggggaggagagggaaccccaggcgcgagcgggaagaggggacctgcagccacaacttctctggtcctctgcatcccttctgtccctccacccgtccccttccccaccctctggcccccaccttcttggaggcgacaacccccgggaggcattagaagggatttttcccgcaggttgcgaagggaagcaaacttggtggcaacttgcctcccggtgcgggcgtctctcccccaccgtctcaacatgcttaggggtccggggcccgggctgctgctgctggccgtccagtgcctggggacagcggtgccctccacgggagcctcgaagagcaagaggcaggctcagcaaatggttcagccccagtccccggtggctgtcagtcaaagcaagcccggttgttatgacaatggaaaacactatcagataaatcaacagtgggagcggacctacctaggcaatgcgttggtttgtacttgttatggaggaagccgaggttttaactgcgagagtaaacctgaagctgaagagacttgctttgacaagtacactgggaacacttaccgagtgggtgacacttatgagcgtcctaaagactccatgatctgggactgtacctgcatcggggctgggcgagggagaataagctgtaccatcgcaaaccgctgccatgaagggggtcagtcctacaagattggtgacacctggaggagaccacatgagactggtggttacatgttagagtgtgtgtgtcttggtaatggaaaaggagaatggacctgcaagcccatagctgagaagtgttttgatcatgctgctgggacttcctatgtggtcggagaaacgtgggagaagccctaccaaggctggatgatggtagattgtacttgcctgggagaaggcagcggacgcatcacttgcacttctagaaatagatgcaacgatcaggacacaaggacatcctatagaattggagacacctggagcaagaaggataatcgaggaaacctgctccagtgcatctgcacaggcaacggccgaggagagtggaagtgtgagaggcacacctctgtgcagaccacatcgagcggatctggccccttcaccgatgttcgtgcagctgtttaccaaccgcagcctcacccccagcctcctccctatggccactgtgtcacagacagtggtgtggtctactctgtggggatgcagtggctgaagacacaaggaaataagcaaatgctttgcacgtgcctgggcaacggagtcagctgccaagagacagctgtaacccagacttacggtggcaactcaaatggagagccatgtgtcttaccattcacctacaatggcaggacgttctactcctgcaccacagaagggcgacaggacggacatctttggtgcagcacaacttcgaattatgagcaggaccagaaatactctttctgcacagaccacactgttttggttcagactcgaggaggaaattccaatggtgccttgtgccacttccccttcctatacaacaaccacaattacactgattgcacttctgagggcagaagagacaacatgaagtggtgtgggaccacacagaactatgatgccgaccagaagtttgggttctgccccatggctgcccacgaggaaatctgcacaaccaatgaaggggtcatgtaccgcattggagatcagtgggataagcagcatgacatgggtcacatgatgaggtgcacgtgtgttgggaatggtcgtggggaatggacatgcattgcctactcgcagcttcgagatcagtgcattgttgatgacatcacttacaatgtgaacgacacattccacaagcgtcatgaagaggggcacatgctgaactgtacatgcttcggtcagggtcggggcaggtggaagtgtgatcccgtcgaccaatgccaggattcagagactgggacgttttatcaaattggagattcatgggagaagtatgtgcatggtgtcagataccagtgctactgctatggccgtggcattggggagtggcattgccaacctttacagacctatccaagctcaagtggtcctgtcgaagtatttatcactgagactccgagtcagcccaactcccaccccatccagtggaatgcaccacagccatctcacatttccaagtacattctcaggtggagacctaaaaattctgtaggccgttggaaggaagctaccataccaggccacttaaactcctacaccatcaaaggcctgaagcctggtgtggtatacgagggccagctcatcagcatccagcagtacggccaccaagaagtgactcgctttgacttcaccaccaccagcaccagcacacctgtgaccagcaacaccgtgacaggagagacgactcccttttctcctcttgtggccacttctgaatctgtgaccgaaatcacagccagtagctttgtggtctcctgggtctcagcttccgacaccgtgtcgggattccgggtggaatatgagctgagtgaggagggagatgagccacagtacctggatcttccaagcacagccacttctgtgaacatccctgacctgcttcctggccgaaaatacattgtaaatgtctatcagatatctgaggatggggagcagagtttgatcctgtctacttcacaaacaacagcgcctgatgcccctcctgacccgactgtggaccaagttgatgacacctcaattgttgttcgctggagcagaccccaggctcccatcacagggtacagaatagtctattcgccatcagtagaaggtagcagcacagaactcaaccttcctgaaactgcaaactccgtcaccctcagtgacttgcaacctggtgttcagtataacatcactatctatgctgtggaagaaaatcaagaaagtacacctgttgtcattcaacaagaaaccactggcaccccacgctcagatacagtgccctctcccagggacctgcagtttgtggaagtgacagacgtgaaggtcaccatcatgtggacaccgcctgagagtgcagtgaccggctaccgtgtggatgtgatccccgtcaacctgcctggcgagcacgggcagaggctgcccatcagcaggaacacctttgcagaagtcaccgggctgtcccctggggtcacctattacttcaaagtctttgcagtgagccatgggagggagagcaagcctctgactgctcaacagacaaccaaactggatgctcccactaacctccagtttgtcaatgaaactgattctactgtcctggtgagatggactccacctcgggcccagataacaggataccgactgaccgtgggccttacccgaagaggacagcccaggcagtacaatgtgggtccctctgtctccaagtacccactgaggaatctgcagcctgcatctgagtacaccgtatccctcgtggccataaagggcaaccaagagagccccaaagccactggagtctttaccacactgcagcctgggagctctattccaccttacaacaccgaggtgactgagaccaccattgtgatcacatggacgcctgctccaagaattggttttaagctgggtgtacgaccaagccagggaggagaggcaccacgagaagtgacttcagactcaggaagcatcgttgtgtccggcttgactccaggagtagaatacgtctacaccatccaagtcctgagagatggacaggaaagagatgcgccaattgtaaacaaagtggtgacaccattgtctccaccaacaaacttgcatctggaggcaaaccctgacactggagtgctcacagtctcctgggagaggagcaccaccccagacattactggttatagaattaccacaacccctacaaacggccagcagggaaattctttggaagaagtggtccatgctgatcagagctcctgcacttttgataacctgagtcccggcctggagtacaatgtcagtgtttacactgtcaaggatgacaaggaaagtgtccctatctctgataccatcatcccagctgttcctcctcccactgacctgcgattcaccaacattggtccagacaccatgcgtgtcacctgggctccacccccatccattgatttaaccaacttcctggtgcgttactcacctgtgaaaaatgaggaagatgttgcagagttgtcaatttctccttcagacaatgcagtggtcttaacaaatctcctgcctggtacagaatatgtagtgagtgtctccagtgtctacgaacaacatgagagcacacctcttagaggaagacagaaaacaggtcttgattccccaactggcattgacttttctgatattactgccaactcttttactgtgcactggattgctcctcgagccaccatcactggctacaggatccgccatcatcccgagcacttcagtgggagacctcgagaagatcgggtgccccactctcggaattccatcaccctcaccaacctcactccaggcacagagtatgtggtcagcatcgttgctcttaatggcagagaggaaagtcccttattgattggccaacaatcaacagtttctgatgttccgagggacctggaagttgttgctgcgacccccaccagcctactgatcagctgggatgctcctgctgtcacagtgagatattacaggatcacttacggagagacaggaggaaatagccctgtccaggagttcactgtgcctgggagcaagtctacagctaccatcagcggccttaaacctggagttgattataccatcactgtgtatgctgtcactggccgtggagacagccccgcaagcagcaagccaatttccattaattaccgaacagaaattgacaaaccatcccagatgcaagtgaccgatgttcaggacaacagcattagtgtcaagtggctgccttcaagttcccctgttactggttacagagtaaccaccactcccaaaaatggaccaggaccaacaaaaactaaaactgcaggtccagatcaaacagaaatgactattgaaggcttgcagcccacagtggagtatgtggttagtgtctatgctcagaatccaagcggagagagtcagcctctggttcagactgcagtaaccaacattgatcgccctaaaggactggcattcactgatgtggatgtcgattccatcaaaattgcttgggaaagcccacaggggcaagtttccaggtacagggtgacctactcgagccctgaggatggaatccatgagctattccctgcacctgatggtgaagaagacactgcagagctgcaaggcctcagaccgggttctgagtacacagtcagtgtggttgccttgcacgatgatatggagagccagcccctgattggaacccagtccacagctattcctgcaccaactgacctgaagttcactcaggtcacacccacaagcctgagcgcccagtggacaccacccaatgttcagctcactggatatcgagtgcgggtgacccccaaggagaagaccggaccaatgaaagaaatcaaccttgctcctgacagctcatccgtggttgtatcaggacttatggtggccaccaaatatgaagtgagtgtctatgctcttaaggacactttgacaagcagaccagctcagggagttgtcaccactctggagaatgtcagcccaccaagaagggctcgtgtgacagatgctactgagaccaccatcaccattagctggagaaccaagactgagacgatcactggcttccaagttgatgccgttccagccaatggccagactccaatccagagaaccatcaagccagatgtcagaagctacaccatcacaggtttacaaccaggcactgactacaagatctacctgtacaccttgaatgacaatgctcggagctcccctgtggtcatcgacgcctccactgccattgatgcaccatccaacctgcgtttcctggccaccacacccaattccttgctggtatcatggcagccgccacgtgccaggattaccggctacatcatcaagtatgagaagcctgggtctcctcccagagaagtggtccctcggccccgccctggtgtcacagaggctactattactggcctggaaccgggaaccgaatatacaatttatgtcattgccctgaagaataatcagaagagcgagcccctgattggaaggaaaaagacagacgagcttccccaactggtaacccttccacaccccaatcttcatggaccagagatcttggatgttccttccacagttcaaaagacccctttcgtcacccaccctgggtatgacactggaaatggtattcagcttcctggcacttctggtcagcaacccagtgttgggcaacaaatgatctttgaggaacatggttttaggcggaccacaccgcccacaacggccacccccataaggcataggccaagaccatacccgccgaatgtaggacaagaagctctctctcagacaaccatctcatgggccccattccaggacacttctgagtacatcatttcatgtcatcctgttggcactgatgaagaacccttacagttcagggttcctggaacttctaccagtgccactctgacaggcctcaccagaggtgccacctacaacatcatagtggaggcactgaaagaccagcagaggcataaggttcgggaagaggttgttaccgtgggcaactctgtcaacgaaggcttgaaccaacctacggatgactcgtgctttgacccctacacagtttcccattatgccgttggagatgagtgggaacgaatgtctgaatcaggctttaaactgttgtgccagtgcttaggctttggaagtggtcatttcagatgtgattcatctagatggtgccatgacaatggtgtgaactacaagattggagagaagtgggaccgtcagggagaaaatggccagatgatgagctgcacatgtcttgggaacggaaaaggagaattcaagtgtgaccctcatgaggcaacgtgttatgatgatgggaagacataccacgtaggagaacagtggcagaaggaatatctcggtgccatttgctcctgcacatgctttggaggccagcggggctggcgctgtgacaactgccgcagacctgggggtgaacccagtcccgaaggcactactggccagtcctacaaccagtattctcagagataccatcagagaacaaacactaatgttaattgcccaattgagtgcttcatgcctttagatgtacaggctgacagagaagattcccgagagtaaatcatctttccaatccagaggaacaagcatgtctctctgccaagatccatctaaactggagtgatgttagcagacccagcttagagttcttctttctttcttaagccctttgctctggaggaagttctccagcttcagctcaactcacagcttctccaagcatcaccctgggagtttcctgagggttttctcataaatgagggctgcacattgcctgttctgcttcgaagtattcaataccgctcagtattttaaatgaagtgattctaagatttggtttgggatcaataggaaagcatatgcagccaaccaagatgcaaatgttttgaaatgatatgaccaaaattttaagtaggaaagtcacccaaacacttctgctttcacttaagtgtctggcccgcaatactgtaggaacaagcatgatcttgttactgtgatattttaaatatccacagtactcactttttccaaatgatcctagtaattgcctagaaatatctttctcttacctgttatttatcaatttttcccagtatttttatacggaaaaaattgtattgaaaacacttagtatgcagttgataagaggaatttggtataattatggtgggtgattattttttatactgtatgtgccaaagctttactactgtggaaagacaactgttttaataaaagatttacattccacaacttgaagttcatctatttgatataagacaccttcgggggaaataattcctgtgaatattctttttcaattcagcaaacatttgaaaatctatgatgtgcaagtctaattgttgatttcagtacaagattttctaaatcagttgctacaaaaactgattggtttttgtcacttcatctcttcactaatggagatagctttacactttctgctttaatagatttaagtggaccccaatatttattaaaattgctagtttaccgttcagaagtataatagaaataatctttagttgctcttttctaaccattgtaattcttcccttcttccctccacctttccttcattgaataaacctctgttcaaagagattgcctgcaagggaaataaaaatgactaagatattaaaaaaaaaaaaaaaaaa

SEQ ID NO: 1107 - DNA, 1564 bp, HOMO SAPIENS
ggcgcggtgcacgctgggatatttaagtctcctccgcggcgcggagccgcgatgtctccggcggctgcggcggctggagcaggcgagcggcggcggccgatagcgagtgtcagggccggccggggcggcgcttctcggcctgtcgctggtcggcctcctactgtacctcgtgcctgctgcggctgcgctggcctggctggccgtggggactaccgcggcctggtggggactgagccgcgagccccgaggttcgcgccccttgtcctccttcgttcagaaggcgcgacatcggcgaacactgttcgcttcgcctccggccaagtcgacagccaacggaaacctcctagagccgcggaccctgctcgaaggacctgaccctgccgaactgctcctcatgggcagttacctgggcaagcccgggccgccgcagcccgcccccgctccggagggccaggacctgcggaataggcctggccgccgcccgcccgcccggcgccgcgctccacaccgccctccccgccgacccatcgcgttcaccacttttacccctctctccccactcctcttctccgaccctccgggaggccttccccacgggatcgtgggactttaccagatcggtttgtaataacacctcgaagacgctatccgatccatcaggcccagtattcctgtccgggggtacttcccacagtgtgctggaatggttatcacaagaaggctgtgctgtcccctcgcaactccaggatggtgtgtagcccagtgactctgaggatcgcccctcctgacagaagattttcgcgttctgcgataccagagcagataatcagctcaacactgtcctcaccatcaagtaatgccccagacccatgtgcaaaggagactgtactgagtgccctcaaagagaagaagaagaaaaggacagtggaggaagaagaccaaatattccttgatggccaggaaaataaaagaagctgtcttgtcgacggtctcactgatgcctcttctgcattcaaagttcctcgacccgggccagatacactccagttcacagtggatgtcttccactttgctaatgactccagaaacatgatatacatcacctgccacctgaaggtcaccctagctgagcaggacccagatgaactcaacaaggcctgttccttcagcaagccttccaacagctggttcccagtggaaggcctggctgacatctgtcaatgctgtaacaaaggtgactgtggcactccaagccattccaggaggcagcctcgtgtcgtgagccagtggtccacgtctgcttccctgtaaccgcaggcatgtgacagaagaagcagatgtcaccgtggggccactgatcttcctggacaggaggggtgaccatgaagtagagcagtgggctttgccttctgacacctcagtggtgctgctgggcgtaggcctggctgtggtggtgtccctgactctgactgctgttatcctggttctcaccaggaggtgtcgcactgcctcccaccctgtgtctgcttccgaataaaagaagaaagcaataaaaaaaaaaaaa

SEQ ID NO: 1108 - DNA, 1837 bp, HOMO SAPIENS
cgctgaggagactccggtcactgtcctcgccccgcctcccccttccctccccttggggaccaccgggcgccacgccgcgaacgtaatagctcttcaagtctgcaataaaaaatggcctccaacaaaactacattgcaaaaaatgggaaaaaaacagaatggaaagagtaaaaaagttgaagaggcagagcctgaagaatttgtcgtggaaaaagtactagatcgacgtgtagtgaatgggaaagtggaatatttcctgaagtggaagggatttacagatgctgacaatacttgggaacctgaagaaaatttagattgtccagaattgattgaagcgtttcttaactctcagaaagctggcaaagaaaaagatggtacaaaaagaaaatctttatctgacagtgaatctgatgacagcaaatcaaagaagaaaagagatgctgctgacaaaccaagaggatttgccagaggtcttgatcctgaaagaataattggtgccacagacagcagtggagaattgatgtttctcatgaaatggaaagattcagatgaggcagacttggtgctggcgaaagaggcaaatatgaagtgtcctcaaattgtaattgctttttatgaagagagactaacttggcattcttgtccagaagatgaagctcaataattgttcacattgttcttttatatatatttatatatatatataaaaattgggtcttagattttgatttactagtgtgacaaaataactacatcctaatgaaaatcaagtttgatatgtttgttttgaaagtagcgttggaagagttgttgggggttttttgcatccatagcactggttactttgaacaaataaataaaagctttctgtagttgcttcctttatcagaaaagaacatttgataccatggtatatcatttcctcttcattaaagaacagcttttctaaatgttgggggaaatgtccatagtcattactcagtcaaaacttgtgttctcatgagcctaaggaccattctagatttattacgtgttttttgtgtgtgtgtgtgtgtgtgtgtgtgtgtgtatccataaaatgcatatgtaaatttttttttgtttttaagcattcacccaaacaaaaaaatcacaggtaaacccatgtttctgagatgccattattccaagcaaaataagagataatcccttcaagttaaattgaaaattttcctgaaaccatacatttcaagtgaaataagtaattctagataggacaatttaaattggataattttaaagtgtctataattgcagtggtttatttgcaaaattcctaaaaggaaaaattttatcactgccatcacagcaggtttcctcatccagatgaggaaactagacaaatgctagtgtgttttaactagctaaacaaaactaagttaaatgaacatttaaaagtttccctagcgggccattccttagcaaaatgttggaatccctgttgctacattgactaaaaggtcatgatgaatggaatatgtaagacttggctcatagaaacctaatcagatggttagaggtgttggcagtttaggacctgctgtcataaatgtgtgaacaaccttttgtaacctaacctattgacctgcatgttttttctttaccccaattcattacatggaggctcaatcttgagtttgctttactggttcagcaaaagccaggaagaacaactttgtagtaatcaaaatgttatccaactgtatattgtttactttattgtaaatactggtgaacagtggttaataaatagttttatattcctttatgcaaaaaaaaaaaaaaaaaaaaaaaaaaaa

SEQ ID NO: 1109 - DNA, 2565 bp, HOMO SAPIENS
gtagcgcttgtgtcgacatcggcgcgcgccgagcccggaagaggcgcgggctaggaaaggagttggttcgcgcaggtgcggcgcctgggtccccatggcgctgtggcgcggctccgcgtacgcgggcttcctggcgctggccgtgggctgcgtcttcctgctggagccagagctgccaggctcggcgctgcgctctctctggagctcgctgtgtctggggcccgcgcctgcgcccccgggacccgtctcccccgagggccggttggcggcagcctgggacgcgcttatcgtgcggccagtccggcgctggcgccgcgtggcagtgggagtcaatgcatgtgttgatgtggtgctctcaggggtgaagctcttgcaggcacttggccttagtcctgggaatgggaaagatcacagcattctgcattcaaggaatgatctggaagaagccttcattcacttcatggggaagggagcagctgctgagcgcttcttcagtgataaggaaacttttcacgacattgcccaggttgcgtcagagttcccaggagcccagcactatgtaggaggaaatgcagctttaattggacagaaatttgcagccaactcagatttaaaggttcttctttgcggtccagttggtccaaagctacatgagcttcttgatgacaatgtctttgttccaccagagtcattgcaggaagtggatgagttccacctcattttagagtatcaagcaggggaggagtggggccagttaaaagctccccatgccaaccgattcatcttctctcacgacctctccaacggggccatgaatatgctggaggtgtttgtgtctagcctggaggagtttcagccagacctggtggtcctctctggattgcacatgatggagggacaaagcaaggagctccagaggaagagactcttggaggttgtaacctccatttctgacatccccactggtattccagttcacctagagctggccagtatgactaacagggagctcatgagcagcattgtccatcaggtctttcccgcggtgacttcccttgggctgaatgaacaggagctgttatttctcacccagtcagcctctggacctcactcttctctctcttcctggaacggtgttcctgatgtgggcatggtcagtgacatcctcttctggatcttgaaagaacatgggaggagtaaaagcagagcctcggatctcaccaggatccatttccacacgctggtctaccacatcctggcaactgtggatggacactgggccaaccagctggcagccgtggctgcaggagctcgtgtggctgggacacaggcctgcgccacagaaaccatagacaccagccgagtgtctctgagggcaccccaagagttcatgacttcccattcggaggcaggctccaggattgtattaaacccaaacaagccagtagtagaatggcacagagagggaatatccttccacttcacaccagtattggtgtgtaaagaccccattcgaactgtaggccttggagatgccatttcagccgaaggactcttctattcggaagtacaccctcactattaggaagattcttaggggtaatttttctgaggaaggagaactagccaacttaagaattacaggaagaaagtggtttggaagacagccaaagaaataaaagcagattaaactgtatcaggtacattccagcctgttggcaactccataaaaacatttcagattttaatccgaatttagctaatgagactggatttttgttttttatgttgtgtgtcacagagctaaaaactcagttcccaaatccccagtttatgcagcgccatcaggtattttaagctaaacttcttcacccctgagagcatgtcagctggagaaaagcagttcttccttgcccacttgagaagtgcacgcccactcacccaacatcctggtctctaggaaagcctcatgtgaggttcctctttctttcagctcagtgcccatgggcaaggatcatgatttccattccgtgttacaatgacaatatttaatgagcataaccttctcagtctcctgctctcaaatttaggacagagccgctaaggacaaaacaatccctcccgtgctttatgatggcagcaggggctggggagcctctgagggactctttcattctgcagttgtctggaagcctgggtggcgtcatgagctgaaggatcatgctttcctgtcctggctccataggttataggctggctggtgaaaggttcacgtggcccaggctgaacttcattgcctagctttggatgtgctttctgccataaagactgatttttgttcgttctgagccttcaaggaatttgttttttacaactggaatatgctcctgtgtgtgttaacagatcatggatgttttatgttttcactgatcatttaaagagtttgacctcagagctccaggatcatcagtaaatttgtcatgttatatatttatttttttataaatcaagacttctgtgtgctcttaaatatattaaaaacaatttacatttcaggaaaaaaaa

SEQ ID NO: 1110 - DNA, 6693 bp, HOMO SAPIENS
gtgtgctgccgcggcgcgggaggagagtgtgcgttgcgctttctcccgcgatcgccctgccggtcgctagctccgagggcgcgcactggatcccaggctcctccgagagtgcggcgacctcggggctccgccggcaccggaggtggctctgagggcagggacgtgttggacacgctgactttgtaggctccgccaagaggcgccgcaggaggtcgtccctgatggcccctggaggcgaagctcatcacaggatgaggaaaggacagaggcacagagaacccccaagaggagatggggctctgggagacggccaaggcctcggccattctctgactacggccagctggccagccgcagtttgtctattcctgaagactcggttgctgcagacccccagaaggaagaccgtgtggacgaggacccccaggcaagcatgacttctgccagccctgaagaccagaatgctccagtgggctgccccaaaggagcccggagaaggcgccccatttccgtgataggtggggtcagcttgtatgggaccaaccagacggaggaactggacaatcttctgacccaaccggcttccaggccgcccatgcctgctcaccaggtgccaccctacaaggctgtgtcggcccggttccggcccttcacattctcccagagcacccccattgggttggaccgtgtgggacgccggcggcagatgagagcatccaacgtttcttcagatggaggtactgagccctctgccttagtggatgacaacggtagtgaggaggacttcagctatgaagacctctgccaggccagccctcggtacctgcagcccggcggggagcagctggccatcaatgagctgatcagtgatggcaacgtggtctgcgcagaagccctgtgggaccatgtgaccatggatgaccaggaactgggcttcaaagccggggatgtcatccaggttctggaagcctccaacaaggactggtggtggggccgcagtgaagataaggaagcctggttccccgcgagcttcgtcagattgcgagtgaatcaggaagagctgtcggaaaactccagcagcacccccagtgaggagcaggacgaggaggccagccagagccgccacagacactgtgagaacaagcagcagatgcggaccaacgtcatccgggagatcatggacaccgagcgggtgtacatcaaacacctcagggacatctgtgagggctatatccgacagtgccgcaagcacacaggaatgttcaccgttgcgcagctagccactatttttggaaacattgaagatatttacaaattccaaagaaagtttctgaaagaccttgagaaacagtacaacaaagaggaacctcacttaagtgaaataggatcttgctttcttcaaaatcaagagggctttgccatctattccgagtactgcaacaaccacccgggcgcctgcctggagctcgccaacctcatgaagcagggcaagtacagacatttctttgaagcctgccgcctgctgcagcagatgattgacatcgccatcgacgggttcctgctcacaccagtgcagaagatctgcaaatacccgctgcagctggccgagctgctcaagtataccacacaggaacacggtgattacagcaacataaaggcagcatatgaggccatgaagaatgtggcctgtctgatcaacgagcgcaagcgcaagctggagagcatcgacaagatagctcgctggcaggtgtctatcgtgggctgggagggactggatatcttagaccgaagctcagaattgattcattctggggagctgaccaaaatcactaagcaaggcaaaagccagcagcggacgttcttcctgtttgaccaccagctggtgtcctgcaagaaggacctgctgcgcagggacatgctgtactacaagggccggctggacatggatgagatggagcttgtggacctgggggatgggcgcgacaaggactgcaacctcagcgtgaaaaatgccttcaagctcgtcagtaggaccacagacgaggtttatttgttttgtgccaaaaaacaagaagacaaggcgaggtggctgcaggcctgtgcagatgaaaggaggcgggtgcaagaggacaaggagatgggaatggaaatttcagaaaaccagaagaaacttgccatgttaaatgctcaaaaggcaggacatggaaagtcaaaaggctacaacaggtgccctgtggccccaccgcaccagggcctgcaccccatccaccagcgccacatcactatgcccacaagcgtcccccagcagcaggtctttggcctggcggaacccaagaggaagtcctcgctcttctggcacaccttcaacaggctcacccccttccggaaatgaaaacaggaggctgtgcttccatggagctgggtgtcaagagaagaactgtctttgtttcttgtgtgcttcaatccagggaaagtttcttggacccagtgataaaaacttccttttagggatcaatgaaggagagaaggtcttggaatcaccttcagtctttggagacccagctgcctttgtggaagggaggagacggtcatgacacaaagctttatcctacacagaaacacccgtgacccactatgagatggcccagatgtgggacccggtaccatgctctaaagcgagtgattaggcagcagctgaagccacccctgctgatgatgagcaagtgcctgctgcaggtccaaacacagcatccagggctttgcagttcctaaggagtgatgaggttagaggatcacttctgcatttgattttcaaggatgccgtcaagacggggttgacacaatgctgcacgtgtctggtcacacttagaaattgagctcttactctcttctgtaatactgggggacctacagctgccgtggggctgaccacggtgttccctggcatcgtctgtgtccacacagatgctaactggtagtgcaaatgtcatcctgcaaggttcctcttcctgcaagcaaagtggagagaaagaagatgcatctgtcaccttcatcagggtcctcagtgcagagcaacttacgcatcctcaagaatccactgcttttcaggcaaggagggagaaatcctgctgcacactggctttgtcccggagtcggattccctcctgcctgcacgccttcagtaactccgagcagaaatcacatcttgcccacatgctgtaacctaagaaactgctatgcaaggctgggtgctgtggctcatgcctgtaatcccagcactttgggaggccaaggcaggtggatcacctgaggtcaggagttcgagacaagcgtggccaatatggcaaagcccagtctctactaataatacaaaaattagctgggcatggtggcgcatgcctgtaatcccagctactgggaaggctgaggtaggagaatcttttgaatctgggaagcggaggttgcagtgagctgagatcgcaccactgcactccagcctgggagatacagcgagactgtctccaaaaacaaaaacaaaaacaaaaaacattcaaacaactgtttgcaatataaaaagctcatttactgtaatatttatgatacagtgaatatgaaaatgcactggtcagaaggcactctcaaagagccgcactgctcctgacatcgtccttagcaatgaagtcacaaagacagccaaagcagtcctgcttcttggaaatcagaagctgcctttatcacatataaagccaaacagggcataaccatgtcacgtgagcatgtcatcaggcttctgaggacttgttctttataaaaaaagaccttcacaaaatatcttggcttagagatagcagtctttattaacaaaggccacctaggctgacacctgcagataatcatctccttttctttgtctatgttgtacattttcatgatataacttttaactatgtctagagaaggcaggctctgcaagagaggtgccctttcaacccgctcagtgccctggacaggagatgctgtgttaaactgttaatggatatctatatgagaagctcatttttgtatgctatccctgcagtttttttttttctaacaggcccatgtttgagaataaacaagtctgtgatgtcagagacaaaggtgtattcttcagtctgcaggtgtgtggcacctcccttctcccctgcagccccccacatccagagccgttcctgagagtgacatcatgcatcaagaaaacataaccttggtcctcaggtgaacccttggaacattctgtgaccgcctgatgtccattctgagccaccttggcacacatgcttacaggcagcactgctaagggttcaggtgccccatggctgacagcccgagttgcttctgtggaccatcatgccgctcggcacgtcctgagacagaagttgctgcaggaaggagcttctggagaggtcctgtggcatgtgtgggggtgtgtgtgtgtatgtttccttcttgaacagacattccaactttagatgtgtttatagaactgacctttttactaacaaaatacaatgatatatgttggaaactacttaatatgcttttcctgcacaccttagcaataactgtaggggtctctgctagagttgtttgtatgtacagcaattttgaacaaattgttttaaatgtaatataagagaattagtttaaggaagtaaagagaatcatttgcttgtgttacattttcagtgaggattcagtttaagagtcattcttaggacttccatttcctaatatttattcatgggtaatgaagaaatggtttgcattttgtggccagtcctaatttattttccagctgagccctaacttccggctcccacctacctccacggacttcctaacagagacttatgaataccaggatgtgtttttgttaagtcaggttcaattcgttgcccctgtcagttttatagagtgtgagggtcactccattaaagatctctcctgggtggatcctacttggatgttcaggtgattttgaaaactgctaacatttttaaaaggctagaacatcctttgacttcttgaaaatctgcatgtctggcttgggttttattaccacatgcctgagttcttcaagaatggaaggctcaagtattctcatcttccatttgccaaacttccttcctgatttgagtcacgtgttccacttggaaagaaagggaacagagagcctcctccatggacagtgtatgaatttcattgggaatcttgctctctcccgcctctatgcctttctctctttttaaccttactttacataatattatagatgggccaagaaaagaaaagatgacataacattttgatgaatttcacctattccattcttcacgtttcagaattggtcgactttgttagaagataattgaagtagccttgggtcaaaagcaaccttttcaattgtgatcatacctaaaacatataaaaaccctgccgtagattaaaagcaattataaaatcataaaattgaatgtttgcagaatcctggagcagtagatttctttgtctttggcctgcggactagaaagagggcagcagtagtatgctggagcttccctgggataccagccacatggtttcttttcattagatctgatttttgtttcccactgtagatctgattttgtagttgaaaacatttcaccaccatcaaacactatttctgaatattgtgcctttttatacctagcctagatgaaaaccgatgccattcttattcagaaaatccccccatcctacatgactgttatctagacataaagcaaagtgcatttaattcaaaatttggttcacaatataagtattttgtaaaagccagctgaaccagcattttatcaggtggaaatctctgcaagccaaattgctgatactccttcatgcagatcaacttggtgtcccagtcagaatagaacagcataattacctggagttagggggagtatttctgcactattacttgtcagggagagaagaaacttagaattgtccctcaaaggagtgtcaagaagtatgaataaatgtcctttcaccagctcacaggccagaaatggaggacccaagtcaactaggtgaaactactagcagacccagctttcccataataacctaatctgcaaattgttctattaaagtctcattgttttcaggatgcaatgaaagtggatttcaaaaggctttggaaaaataagtggaacatgactgatcttgaaaaaaaaagcaaaagcttaaatatttgatacaagtttacttagctacaacatactttacattgttgcctttagttatctcacaggcactgacattttatatttagaaaatacttttaatctttctaatctttttttgtaaatattagtgtccattctgtatgactcgctaacctactttgcaaggctttgggcaacattttagctcattaacttcaagatgatgtgtcatctgtataggtcaaagaatgggacttctgaactgaggaatttgctgttgacagccaaagtatagtgtacaagattgatgtaacttgatatgtatttttgttgaagttttttgtaaaaaaaaattatttacaatgttatttgaatgatttttttaaatgctgtgaatctatatttgttgttttgtatattaaaattcatttgccaaactcgt

SEQ ID NO: 1111 - DNA, 3734 bp, HOMO SAPIENS
cctgttcctcttaccctgcccggctccagctgaccagggaaggggtgggctgaactgaggcgggggcaagggagtgcccgacatcttgtccgactccgcgggtgacacgagccggttctctctggactggtggcagcgcgcggccccgaaccgcgccccaggccggcaggcggggaaggagccggtgggggtagggggtgcggtggggggtggggaccctccggctcttgggggtcccagtccccgccggctgctgagcgggtggggtggtggaggagctgcagagatgtccggccagagcctgacggaccgaatcactgccgcccagcacagtgtcaccggctctgccgtatccaagacagtatgcaaggccacgacccacgagatcatggggcccaagaaaaagcacctggactacttaattcagtgcacaaatgagatgaatgtgaacatcccacagttggcagacagtttatttgaaagaactactaatagtagttgggtggtggtcttcaaatctctcattacaactcatcatttgatggtgtatggaaatgagcgttttattcagtatttggcttcaagaaacacgttgtttaacttaagcaattttttggataaaagtggattgcaaggatatgacatgtctacatttattaggcggtatagtagatatttaaatgagaaagcagtttcatacagacaagttgcatttgatttcacaaaagtgaagagaggggctgatggagttatgagaacaatgaacacagaaaaactcctaaaaactgtaccaattattcagaatcagatggatgcacttcttgattttaatgttaatagcaatgaacttacaaatggggtaataaatgctgccttcatgctcctgttcaaagatgccattagactgtttgcagcatacaatgaaggaattattaatttgttggaaaaatattttgatatgaaaaagaaccaatgcaaagaaggtcttgacatctataagaagttcctaactaggatgacaagaatctcagagttcctcaaagttgcagagcaagttggaattgacagaggtgatataccagacctttcacaggcccctagcagtcttcttgatgctttggaacaacatttagcttccttggaaggaaagaaaatcaaagattctacagctgcaagcagggcaactacactttccaatgcagtgtcttccctggcaagcactggtctatctctgaccaaagtggatgaaagggaaaagcaggcagcattagaggaagaacaggcacgtttgaaagctttaaaggaacagcgcctaaaagaacttgcaaagaaacctcatacctctttaacaactgcagcctctcctgtatccacctcagcaggagggataatgactgcaccagccattgacatattttctacccctagttcttctaacagcacatcaaagctgcccaatgatctgcttgatttgcagcagccaacttttcacccatctgtacatcctatgtcaactgcttctcaggtagcaagtacatggggaggattcactccttctccagttgcacagccacacccttcagctggccttaatgttgactttgaatctgtgtttggaaataaatctacaaatgttattgtagattctgggggctttgatgaactaggtggacttctcaaaccaacagtggcctctcagaaccagaaccttcctgttgccaaactcccacctagcaagttagtatctgatgacttggattcatctttagccaaccttgtgggcaatcttggcatcggaaatggaaccactaagaatgatgtaaattggagtcaaccaggtgaaaagaagttaactgggggatctaactggcaaccaaaggttgcaccaacaaccgcttggaatgctgcaacaatgaatggcatgcattttccacaatacgcaccccctgtaatggcctatcctgctactacaccaacaggcatgataggatatggaattcctccacaaatgggaagtgttcctgtaatgacgcaaccaaccttaatatacagccagcctgtcatgagacctccaaacccctttggccctgtatcaggagcacagatacagtttatgtaacttgatggaagaaaatggaattactccaaaaagacaagtgctcaagcagcaaaatccttacttccagcaaaatccaaactgctgtctcttaaatctcttaaactctcttcttccattagaatgctacaagtaactcagtgaaggcccatgaaggaaattgggactagtttataggagaacgtatcaatacagtttataaagccaagaattgctatgatttaagactaagatctgtctttttggtgactaacccttcaattctttcaactcctgttaatacccataatcagtaacctatcaagaaaagcccttatttggaaagtgtgaaatttgtatttggaaaagctgcctggagagaagaactgtgtcctttactgtatttcaacaggactcttttgggggatcaaaattaaaattcctaattatgcattatctttcttttctccagtcctcacaaatacagaaacaataactgaaattaacttttctttttttaaaaaaaattatattcagtttgcagtagacattccttaagtatttgtatttatttatgattatcaattttacataacattaatattgtatcagacctccttatgaaaatgagtatggatgtgcacagtatgtttgatttttatccacaagaatgaatctgattcagaatgcttttctcagctgacatacagagcactaaatattttaaggcaagtccataggtctgaatctcttaagaattctcggcctctgtgggatttagggaagcattataaatgcattaatccttatagtcaattctgtgcctaggattttgccagggaacagttcactgactaggaaaagcactacattttaaattcagcattagtgcattgggaaggatctttactgctttgtgcttggcatgtcattattttccatttgacattagggcctttccaaaatgaatgtgaggaattgctttcacttcaagactttccttcttttcactaaaactctagaaggtgttacaagggggagggaaggggggcaaagtccttgaacattttctttggctcgtgccatgttatgatcatataccttttaaataaggggaaatagtatctttaaagttaatgtctagccaagagtttagtaaacgaagaattaaactgcactgttgatcggtgctttgtgtaaatacatctttaacatttgggtggagaggggccttaagaaggacagttcattgtaggaaagcaattctgtacatgagtttaagcattcttgttgcattgtctctgcagattctatttttgtttacaatattaaaatgtatgttagcaaaatgggtggattttcaaataaaatgcagcttccacaaaagttttgttatggtattctggtctgagatgcattttcatttttcctttctctttttattatcaatattgtcatttttccctaataaaatatacccaggtgattatatttgttgatctaataacatggaaggtttgttttatatgaattttcaaaaagatgtctctttacactttttgttaccttgtagactcttattgataaatgcaactacttattaaaattgttcactttttgtcttttgaaaaaaaaaaaa

SEQ ID NO: 1112 - DNA, 458 bp, HOMO SAPIENS
  misc_feature (148)..(148): n is a, c, g, or t
  misc_feature (163)..(163): n is a, c, g, or t
  misc_feature (263)..(263): n is a, c, g, or t
actagtgtaggctgacaacccaaattaaggaagcaggagagatcaaacagaactgctgctgggtggttgtcaggagctgctacacggagaaccctggactattcgatcaagcagcaaggctatatgttcacttatgcagaaatggacnattgcagatgctaanctttgttgtgcaagcgaaggctcacttggaaggaaatactcagcccctctctgggcagcatttgagttccttatggatgccgagtcgcgaaacaagttantttttttaatgtatccttctttatgaggagaatgctacccaaaaatgtattaaaggaatattaagtcgtccagagactgtcttgctaccaagaactgtgcaatggaattctttttaccaacattagactcctacactagagttagataacgttttctcacattgagtttagaagatctgccttgtcagggaagcc

SEQ ID NO: 1113 - DNA, 4520 bp, HOMO SAPIENS
atctttgaagaggcactagcatcagacctcaaggcttttgtcccaccaaagatagtgggggagtttttgaacccttgtgggagcctggtccaggtgaattgtgttcctccccattggaatgcaaaaataggctgactcattggagctagcctgaagcagaaaaaggcaccttttaagtccaaacaggaaaaccaggcagcatgagcaggaatgtggctcgtcattgtatacgggttcaaaaactcccccactatctttgaagaggcactagcatcagacctcaaggcttttgtcccaccaaatgacaagtgtgtattgttacaatacattggtgatcttttgtttgcggcacctaccgaggaagattgcttccagggcaccaaagatctccttcgccttctatggaaggcaggttacaagatgtctaaggaaaaagctcaggtctgtgcaaaaagagtaagatatctaggtttcctagtagcccaagggcagcgtgaactcggcagtgggcagaaggaagccatatgtgcgctccccactcctgtcacccggcgacaagtaagggagtttttaggggcagcaggcttttgctgtacttcaatgccaaacttttcactcacggcaaagccattgtatgaagccacaaagtgggggagaaaaagagcccctcctctggggtaatgagcagaagaaggcctttaatgagatcaaaaaggccttaagccaagctcgagccctgggattgccagacctgactaagcctttctttttctatgtccatgaaagaaaaggaatgactacaggagtttcagttcaaacagtaggatcatggtattgaccagtagcctatttatcaaagcggttagaccttgtggccctgggtggcccccctgcttaaaagcattagctgccactgccatgctggcagaaaatgctggaagctgacactaggacaaaagctaataatacgggtgccacacacagtgatcaccttaatggagcaaagaggatatatcactggctatctaatccaagaatgttaagatatcaggggctcttatgtggaaatccatacgtaactttaaaaaccgcgaataccctcaacccggctaccctgttgcctgtagaaatgccgaagttgcaagaccggtttccccaacgctattgcgtagacgtagtagatgaggtgttctcaagccggaaagacttaagagaccaaccctttaaggacccagacgctgaatatttcacagagggaagcaggtttgtatcagaaggggtctgcagagccgggtatgcagggtgactctaaattcagtagccaaggcacaggccctccctaccaggacctcagcacaaaaagcagaatagctctaaatagagcactactagtagccaaaggaaggacagttaacatctatactgattcaaagtatgcttttgctacattacatgcccatggagccatttacaaagaaaggggactcttaactgctggagggaaagaaattaaagaagaaatcttacaactcttagaagctgtgtgggccccagacaaggtggccgttattcactgtaaaggacatcagacaagaggcggcatagaagcaaaaggaaataggaaggcagacagagaagccagacaagcagctatgtccaactcaagtactaaaaagaaaaccccaaccctgctgcttctactagaaccttccttacctgaaaccccaagctactctcccaatgaaaaagcttggtttgaacaagagagcggaagttacatacaaggaggcaggtggaagttctcagatgggaggctagctattccggaagcaatagccccccaatttatgaagcagtttcatcagggaacacacatgggaaagactgcattagaaactcttgtaggatggcatttctatgtgccatgccttactgccatcactcgagccgtttgtgagcaatgtttaacctgcgcccagaacaatccatggcaagtgccaactcagcccccagggattcaagagaccggagctacaccctgtgaaaacttgcttgtggactttaccgaactgccccgagcacggggttatcagtacatgctagtgtttgtttgcactttctcagggtgggtcgaggcattccctaccaggatagagaaagcccaagaagtaaccagactgttgctaaaagacattattcctaggtttggactgcctctaactttaggatcagataatggcccagcattcatggctgaagtagttcagcagctgtcgcagctgctaaagataaagtggaaactgcacatagtctaccacccacagagctcaggaaaggtacaatggatgaaccagacactaaaacatctgctgaagttttgtcaagaacctcatcttaggtgggatcaggtcttgcccatggcctttctccaagtcaggtgtacccttaccaaattgactgggctttcaccctgtgaaattgtgttcggccgaccacccccgattataaatcaggtaaaaggtgatctgtgggaactaggggaactaactttaaaaaggcaaatgcaagctttaggattagctatgcaaaagattcatggctgggtacgagaaaaattgcctataagcctaacagacccagttcacccctttacacctggggacttggtttgggttaagaaatggaacccaaccacactagggcccatatgggatgggcccacactgtaatcttgtctactcccactgctgttaaagttgcaggtatcacaccttggattcatcacagtcgactgaagctggctgcgcaggaccagtgaaccagtcaacaagactcagaccatccaacatgactaatcctgtggcaaaaccacgacaccactgagaaagtcaaccaccctgctgtgatcactctggaggctggtcagtctacgcacaactgaagcttgagaagtcaaaccctgctgtagtcacacactggaagctgactagtctacgcatggccaaagcttgaggagtcttcactagataagtaaatgtggatagaacttataagcctagtagtgatcttagtaatactgattatcttattattatgttactgtttttgttcaggaaaaggcctatattggatctgtggagcacaggcatatcagcaactgccagctaaatggacaagagcatgtgtattaggaacaatcaagccatccttctttctaattcctctaaagcaaggggaactcttaggataaccagtctataatgagaataaaagaactaaaaggagcatgatctcaaaaataaatataaatatcaaaaaagacatagacataggagactagaaaaataatcaatggcctcctgaaaaaatcattaaatagtatgggccagctacctaggcacaaaataggtaatggggataccacaccccaatttatatgctcaactgtatcataaggttacaggctgttcttgaaataataacctatgaaacatcaagagctttttgatgaacctatgaacatcaagatttactagctgtacaagctacacagataaggaatgccatatatcaaaacaggctggcactagattacctcctagcctcagaaggaggagtatgtgggaagtttaatctaacaaactgctgtttagacgtagacaataggcgagctgtcatgggaattactgccaggatgtggaagttagcccaagttccagttcaaacctggtcaggttggtctccagattctctctttgaaggatggttttcaacctttagtgggttcaaaaccttaataggtgggttcctgcttatcacaggtgcctgcctaattcttccttgtctcctacctcttctcatcagaagtgttcagtcaactatagaggcagttgtggccaaatacactactactcaaataatggcattgactaagtattgccccaagaataatatgtaccgactcaagaaaaaataaacaactgtggtgctattaaccaacatttatatagagcaccaaaggggggaatgaagtggaaaattaaaataggataatagcataagtaataatagtaaaattatagtaacagaaataatagctcatagaatgaattgctgtaccaaccaaggctaaaaagaatttaagtagcccccctgaagttagagttaaagaaggatattaactgccagtcccaagaaacattaaccatatctgcccttcaggtattttgtaggctctgtaagctcgtgttttcttccctccttgtacagctgcaaggtcacaagacagataagcataagctgcatactaagttttcccagagatgtaagacatgttgcaaaagtgtcacaagataattaatggactttgttcttgcttctgtaagcctgcttcctgcttcacgtaattcctgcctcaaaatgcttaaaagacattcgttttctttgatctatgcttagattttctggatgcaattccactgagccgatgtacacctaaaaataaaaactttcctgcatcc

SEQ ID NO: 1114 - DNA, 1567 bp, HOMO SAPIENS
cgccccacccgcgagccgcagccgcggccccacagcttctggggctggggccccggcagccgggcaggccggcctgacctcgacctccgccgtgcgggcccgaccggtgagtccagcccggcagtcgcaggacccggccgccagcctctccctccacctctccctgcccccagcgccaggcgcgggctgcgctcggtggcggcggcggggccctcaggcggccatggcggcaggcgccggggccgggtccgcgccgcgctggctgagggcgctgagcgagccgctgagcgcggcgcagctgcggcgactggaggagcaccgctacagcgcggcgggcgtctcgctgctcgagccgccgctgcagctctactggacctggctgctccagtggatcccgctctggatggcccccaactccatcaccctgctggggctcgccgtcaacgtggtcaccacgctcgtgctcatctcctactgtcccacggccaccgaagaggcaccatactggacataccttttatgtgcactgggactttttatttaccagtcactggatgctattgatgggaaacaagccagaagaacaaactcttgttcccctttaggggagctctttgaccatggctgtgactctctttccacagtatttatggcagtgggagcttcaattgccgctcgcttaggaacttatcctgactggttttttttctgctcttttattgggatgtttgtgttttattgcgctcattggcagacttatgtttcaggcatgttgagatttggaaaagtggatgtaactgaaattcagatagctttagtgattgtctttgtgttgtctgcatttggaggagcaacaatgtgggactatacgattcctattctagaaataaaattgaagatccttccagttcttggatttctaggtggagtaatattttcctgttcaaattatttccatgttatcctccatggtggtgttggcaagaatggatccactatagcaggcaccagtgtcttgtcacctggactccacataggactaattattatactggcaataatgatctataaaaagtcagcaactgatgtgtttgaaaagcatccttgtctttatatcctaatgtttggatgtgtctttgctaaagtctcacaaaaattagtggtagctcacatgaccaaaagtgaactatatcttcaagacactgtctttttggggccaggtcttttgtttttagaccagtactttaataactttatagacgaatatgttgttctatggatggcaatggtgatttcttcatttgatatggtgatatactttagtgctttgtgcctgcaaatttcaagacaccttcatctaaatatattcaagactgcatgtcatcaagcacctgaacaggttcaagttctttcttcaaagagtcatcagaataacatggattgaagagacttccgaacacttgctatctcttgctgctgctgtttcatggaaggagatattaaacatttgtttaatttttatttaagtgttatacctatttcagcaaataaaatatttcattgctta

SEQ ID NO: 1115 - DNA, 1372 bp, HOMO SAPIENS
cagccggtacggccccgggtttgggcaacctcgattacgggcggcctccagccccgccagcagcgccccgcgcccgcccgcccgcgcccctgccgccccccggttccggccgcggaccccactctctgccgttccggctgcggctccgctgccggtagcgccgtcccccgggaccacccttcggctggcgccctcccatgctctcggccacccggagggcttgccagctcctcctcctccacagcctctttcccgtcccgaggatgggcaactcggcctcgaacatcgtcagcccccaggaggccttgccgggccggaaggaacagacccctgtagcggccaaacatcatgtcaatggcaacagaacagtcgaacctttcccagagggaacacagatggctgtatttgaaaaaactggccatgcagaagtcgtccgagtggtgtaccagccagaacacatgagttttgaggaactgctcaaggtcttctgggagaatcacgacccgacccaaggtatgcgccaggggaacgaccatggcactcagtaccgctcggccatctacccgacctctgccaagcaaatggaggcagccctgagctccaaagagaactaccaaaaggttctttcagagcacggcttcggccccatcactaccgacatccgggagggacagactttctactatgcggaagactaccaccagcagtacctgagcaagaaccccaatggctactgcggccttgggggcaccggcgtgtcctgcccagtgggtattaaaaaataattgctccccacatggtgggcctttgaggttccagtaaaaatgctttcaacaaattgggcaatgcttgtgtgattcacaatcgtggcatttaaagtgcacaaagtacaaaggaatttatacagattgggtttaccgaagtataatctataggaggcgcgatggcaagttgataaaatgtgacttatctcctaataagttatggtgggagtggagctgtgcagtttcctgtgtcttctggggtctgagtgaagatagcagggatgctgtgttcacccttcttggtagaagctaaggtgtgagctgggaggttgctggacaggatgggggaccccagaagtcctttatctgtgctctctgcccgccagtgccttacaatttgcaaacgtgtatagcctcagtgactcattcgctgaaatccttcgctttaccaaatctagacatacataaggggctttctctcccttttcagccctctctgtgcagagaaaagatgtgagtccgcttgatgaattctaatgctttgcttagagctatgagaaatgtttgttttaataaaaacctacagtccaataatgccaaaaaaaaaa

SEQ ID NO: 1116 - DNA, 6836 bp, HOMO SAPIENS
gcggccgcggcccctttaaggagcagctctgcggtaacccgagcccgcagtccgggcgggcgcgacggccgccgcggtagctggagcctccgcgactgcacctccaagcggcccggaacccgcggcttccctggctcccgtgagcatctcaccgggcggcactggccagcgccagccctcgggccggcccggatgaccagactcctgtagacacccgccgccctctcccggctcggcgcagccgccgcccgcgcgcgactcgccccgggacccggcacaggttgaagaaatatggagatcaacacaaaactgctcatcagtgttacctgtatcagctttttcacctttcagcttcttttctactttgtaagttactggttttcagcaaaagtttctccaggtttcaatagtctcagcttcaaaaagaagattgaatggaactcaagggtagtatccacatgccattctttggtggttggtatttttggcctgtacattttcttattcgatgaggctactaaagctgatccactttggggtggtccatcacttgcaaacgtgaatattgctattgcctcaggctacctcatttctgatttgtccattataattttgtattggaaagtgattggtgacaaattttttataatgcatcattgtgcgtccctgtatgcatactaccttgtactgaaaaatggagtgctggcatacattgggaattttcgcctgcttgcagagctttccagcccgtttgtgaatcagcggtggttctttgaagctctgaagtatcccaagttttctaaagctatcgttatcaatggaatactcatgacagtagtattcttcatcgtgcggattgcctcaatgcttcctcattatggcttcatgtattccgtgtatggaacagaaccctacataaggcttggagttttaatccagttatcctgggtcattagttgtgttgttttggatgtgatgaatgtcatgtggatgatcaaaatttcaaaaggttgcatcaaagtcatctctcacatcagacaagagaaagccaaaaatagtcttcagaatggaaaacttgattaaaagagtgctaccgataagcaaacttcattactacccagcatatctgctgataggatgaattcttggcatgttcttgtgtacctttcttaattataattgttattcaggatttcagtgtcattttttttaaaccttagaaaagagaaggccgggcacggtggctcatgcctgtaatcccagcactttgggaggccaaggtgggtcgatcactgaggtcaggagttcgagactagcttggccaacatggtgaaacctcatctctactaaaaatacaaaaaaaagtagctgggcgtggtggttggcgcctgtaatcccagctactcgggaggctgaggcaggagaatcgcttgaacccgagagacggaggttgcagtgagctgatattgtgccactgcactccagcctgggcgacagagcaagactctgtctcaaaaaaaaaaaaaagagagaaactaaaattaaaatttagttttcatcccaagatgtcttttctgcctttcttttgccttatttacaagcatggataaaaatcttaaaggtttaaataaaaatgatcaatataatggtgaatcttttgagaaatctcttaactgcattggtattttttctctgtgaaagatgactatgataatctggtacaaatggttttatgtcaccaattttgctgcaagaatgggaactgcttttaaatctgtaaatagctcttaacatttgttgtatgcactcttttcttactatggctgtcaacacttgtgtagggtttaatttctaaattgttggcatgttctttttctcaggctattcagaagtaacaacatttttcatttcagacatgcaatcacctattaatgatgaaatattttaccactttgggaatatttaattagtttagtcatggagaatacttcccacattttaagattttttcaaatatcactgtcatttctattttagcattttatcaaattattgcttttttattttataataaggcttaagacagattatagacctccttaagagatgagtttcttcttctaaaaatgcatgttgatagaggactatttaggctaatcggaggaatcattaagaaagaaagttttaacactgtttatccctatctgctttccttgcactttttctgtgaaaaatattttctgtttgcaaaatcttccctgagttctgaacccagcaccatcagtaccaaagtcttatgcaatatgtatttattatgctcctgaaataggcctcttcttgatgagacccaaactattacaaaaatatcagtattcatattttactcacaattcatacccgtgcttacttagttggcattttagtgctttgaatttctatcttaaagcacagaaaaaaaaaggtaatttaatccaagtattctatcatcaaaattattgtctgattatatgaagataaatgactggcgactctggttgtgtgtgtatgtgttttgcttttactttaattcttgcaatccaaatatagaattatatatttatctattattgcctttattctttaagcacttgagtttaatgattattcttacctgagaaaggaagaaatttaattctaccagtgatgaatacttgaaattaattgaactcataccaaaagatgtaatccagtttctcagtttgaaggagaacgtttgactcactttcattgttcatgctagctgaatataatcaagacttttgatttgatttgcttttattattcaatgcagatagagcctgataagttttagaacatttaaagaagattgaaatctcagtcagtaactaaatgataaaatgagattgattggcttatactaggtacatttatttttgaaagaattaatgtaaaataatagttatttttaaagcagctaatattacactgataatttgttgctaaatttagtgctgtccacatcataggtgcttaaatatgtactggttaactagaggggggtaggaaagcaagcggttttatcttgttcttacctttttgcaggaaaagtggctttaaaaaaatttatataataaaactattttggaaattcattcttttagaaagagaccttgagataaatattttttgactctggatatttctatagttctgaacacagattttaaacccactatcaaaatgaaaacaatataaagctatattagtgagtctccatgtagcagtttgtttttatagttactgtttcatgcttaaaacttcattcttactttcattaatgttacccttcactggtatagccactcactaaataagtatatttaaaacatcaaaattttgaactaaagtttgtgattctcttattcagcaatccttatcttatgctggctgcatgagttaattcaacatccagattaaatatcctgaagtaggttctatatatttcctcatacaacagacatggaatggaaatgccactagaaactgccctgctacttttaagtctgacctttgcaggaggtacactttgctgttctatgattgtattcacctacctaaaatacaaatgaagacagaacatatcatttactgcacgatgaatttttcatttattaaatgaaaaacgtttgctagacattttaaatattaagtattttgactacacggattaatttaaatgattctatcaggcattctgatatttaacaactctattaaaatatttatagaaaaataaaagcaaattgatataaatttttgagcaattctatttttgtagaaaaaagataacctgtaattataaagatgttttttgaatgtgtagtatcctagaaaataaaagttcttgtgaaacttaaaaaatgaatgaaaaccaactaatagcatgcaagatcatagatcctgcattaaatttttatttgtgaaaatttgaaaattatgagctataacttataaagtttgccttcttatgtctaaaatcttttaaaggattatttgcatttatgtaaaactggaaatgaagttatatatgagtgcaaagaaattgacttctgctcaaatatgtgttgataccctacagtaaattgaattaaatttttatcccaactgtttgattttattatttcatggactagccttacgttaagtgaaatactatttatgttgttaccacccctaagagtgactctgatatattatggatgacccaggacggtcttaaaggtctagttttaaaaactgcctagtttgtaagtatttgaatccagttcttttctaaattttaataatttgactcaaaatttttgctacagggtcaacttttaaattgtatatttcctctgaggcacactgggcatttggagaatggttcttcactggtgtagagagccaggtttactgttggttgcaccatctgttatcaggcatgcagaaacatttttcttctggagaaacagaggggaaggtgttgttacagtgtacatgtttcctctgtgtcgtttttaagggaaataaacatgttccaaaagatgctgttaaaataaatatttgaacacgttttctgtttctaggttgctcttaattccaaacatttaaataaatgtgcatttgaatagctttaggtggtttagtctattagctgaaatggaaaagttcatgtattgacatcatcaataatacttcataaaggtttatgtatttttatgtgtttggattccataagaagttgaacttagataattttatcaagagtagcacagtgtttctcaggtgcgagccagcatacagcgagacccttcatgtgtctctggatgcacatatatcttcccaaccttaaacacagctcattgaaatacattaaagctactgaaagtgagttctgatgcaaaacacatgtgaggtgtgtaggaacaatgaaaagctagaggatctggagttagaggaggcattgagagtgcttttcccttaaacgccgtgatagtcctcccttgatctagaagtattctctttgaatccttccatctcttcctcctggtacaccagatgacttcatcagcatctccctcttttatgctaacacctttcgctgtcaacttttgagacctccccatgtatctataagcttcccagtctcttatggcaaatttaaaagtttacaaataggttctctcattgaaaaaaagcattgtagtaaagtttaaagtggagctcagacaaatcatgacttattaagagactacaggaagccattcagcatttaataataactgtttacaacatgaggcaaagctaataatgttatggttttattaagagatctgtcatctctgtttttcttaaactggtttaacagtcagagctttgtaatgtgtttcagctgaagatttattataggcttgtaaattatctaaatgttctttttagaccccatgacaggagcacagaggaactgagataactctgtgttatgagagggtggatgctggcttgtgccaaaattattttagagtcctgctctttagggaaaactttgctatggtaatgtttctttgaaaacaaatttaccagcaactgcgttacttggtgttttccaaagtacaacatccaaggcttgaaccttacccgtttctaggccagactaggccagcctctagttttgataataattcatacctttattggaatatattttggatagcagtgaagaattgaaagcagctcctaaagattggtttgtttgctttgaaaatgtttacacttattcactctaagcagtggaccattttgatatcaggccctatacataagaccaaaaccagaaatatttctaaatctcaaagatttataagtacagtacctctggctgaaaactcgttaaacatctttggatattttttctttatatctttatgtaattatttctgtaattaagtgtacattagggttatttgctacttaacaagcctaaaggtatagctgtatatagaatgtgctctgtgtttttctgtttcctgcttggtttgtttctggtatgactatgtctactttttatttaaggaattttgtgtagataatactctcactaacttgtaaataggataagttatgagattttttggtattagaatttgtaataataatgacttttagattttatttgaaaaagctacttggaaagcagtaaatagaactatagtgatatatatagatacatagatatatacttttttctgagaatgtataatatataattgtcaaagatttttggaagtctttcaaaatatacttaataccattttgagaacataccttctaatttatttccataaggctgaagaacttttatttacaaaatgtaagactagataatgtatgaatcagtgttactaggacttatcagtacttaaaatagcaacttggcattctttattttgtttcctggttgttttatttggagggataataaatgtctaagttatttccattaaaattttgaaatgtttgtatactttatgtgtgccattttaaagtatatgcaagttctaagcaataatctgcatgttatacaaggttgacatattttgtcctgaaatttttagttaacatttcaagaatgataaaatgaacaccctgtaaattacccttctccccctcccctccatgaaaaccttgggattttcttgtgctagaacactaccacaatgtggtgcaaagctttgtattttgtggaaaaaaacaataaaatcacaattatttagtgcaaaaaaaaaaaaaaaaaa

SEQ ID NO: 1117 - DNA, 224 bp, HOMO SAPIENS
ggctttgtgtggacttttcactactgatgtggccaggactaccaacacagtctggcttagcaggtagaacttagtgagcattcctgtctctgcccagccatctcctcttctgtttgttcctctccagcaacttctttgtccagtggaattggatcctctgtcttcatatcagctcttaatgtattttaggtaataagatttttatcaattgtgtctttttcttt

SEQ ID NO: 1118 - DNA, 9038 bp, HOMO SAPIENS
acaacttaccctgctgagctttctttgggaaatacgtccatcaagatttagatctgcctgtaaaatctatacaaagtatatgccactacaggtttgactcgccccctcccccgtttttttgttttgttttgttttgttttgttttgttttgtgttttctctgctgtgtcaaagaacaagacagaactatctctgtttctggctccactgcctgccagtgaaggagttttcattcagactttccgaagagaggtggagaaacctaaagactgaggagaagagatcctttgagccagatggggcattagttcttctgcttttctcagcatggataaaccatttcctcaaggattttctcatgtgccctgaaatccatgtaactacaagggctcctctttatcaccataagtgccaccctgacttaaaaccactcagagctaaaaaatcaaggcaaaatggatgctgcggtgacagatgattttcaacaaattctgcctattgaacagctgcgctctactcatgctagcaatgactacgtggaacggcctccagccccctgtaaacaggccctctccagcccttcccttattgtgcaaacccacaagtctgattggtctctggctaccatgcctacttctctcccccgcagtctcagccagtgccatcaactgcagcccttgcctcagcatctgagccaatctagcattgccagctcaatgtcccatagcaccactgcctctgatcaaaggctcttggccagcattacaccctcaccttcaggccaatccatcatccgaacccaacctggagcaggggtccacccaaaggctgatggtgctctgaagggagaagctgagcaatctgcagggcaccctagtgagcacctcttcatctgtgaggaatgtgggcgctgcaagtgcgtcccctgcacagcagctcgccctctcccctcctgctggctgtgcaaccagcgctgcctttgctctgctgagagcctcctcgattatggcacttgtctctgctgtgtcaagggcctcttctaccactgctccactgatgatgaagacaactgtgctgatgagccctgctcttgtgggcctagttcttgctttgtccgctgggcagccatgagcctcatctccctcttcctaccctgcctgtgctgctacctgcctacccgtggatgcctccatctgtgccaacagggctatgatagcctccggcgaccaggctgccgctgcaagaggcacaccaacactgtgtgcagaaagatctcttctggtagtgcacccttccccaaggcccaggaaaagtctgtatgaccttccaacaaggtggatccagagcttttctccttcgagtccccaacagcaaagcataggcctcatctttggagagggggaggagtgataaactagccaaagttagggcctctcttttgttcctgcagtgtcaggggaatgaccaagtacatcctggtgcaggatgccttgttctttctcacagtatctatcccactcctcttcagtctttacaccctgccagctcagcctttatggttgtcatggcaaattcaggtgatatatgggtatgaggtttgaacactgaggactgacagggccagcaacgtggaggtttaggggctccccaatgtaatacctctcgatgcaggctctgatcgtcactctgttttctgctgtgcctttggaagctttcttctaagatggttttcacaggtacatgtggaacagcgttcaaccttccagggaatacgaccccttctccctgttactgcccttctcttctttattcctctctcctctttcattattctgttctgtattcctttccccttcattctcaccctgtctgcttttactttttctctttcttcctccctttctccttctcccctccttctttttcagactgatcctttctctgcctgtatttctatctcatttgatctatatttgtctctctctacctgtccctttttctctaacatgtccaaaagtgctgtttttccatagatgtttccttagatgccaaactttgctatgctatactatttactaatttttattaagggaaatggattactgtaatgaactgatcactagcaatagtgtgtatcccgatgtgtgtgtgtgctcacaaccactctcacctgttcgtgagcgcatgaggcgaagttatcttatatttccaggtttaactagttggagtttttctccctttctcaataatcaacttatagtgctgacagattccactagcatgctgagtaggatagtaaatcaggatgctcataactttgtatgtctgacccaagtgccaaaggcagacgtgctttatagctaaatgaacaaagcaaaggatacagaggtatgttctctcttagaagctaacttccctgagactgcatggctcaggcgttaataatggacataaaaagtcataaaacgttagagctggaaggaatcttaactattaatctagttcaatgcccttattttacagatgggaaaactgaggcctggaggtaggaagggacttgcccccaaggccgcacactgagttaacagcagaattgagactggaatataggccttctgactcctagttcagtattcttacccctgtaccacattgagtcatgggactttttcctagggctctattaacagtgacagaaagccattcccattcaattacttttcaggaaccatgcctagttagtgtggtggtctttctccagtgcatggtgggtagctaattaactatcaggtgttgaggctgcccccagtggacatcacctttggctctgtcaccttgtagaagctcaagtgtggaaaagaaaagcttaaagaagccctaaccaagctgtatcttcgccattgcatctactctttgctgcacacactgtgcttgctcctggctttgtctgcaatggcagctgcctgagaacctaaatttcagcaacagtgaaaaactgagatgaaagatgtataatgtagagaactgacttctctcttaaaaagtacagagagcctgtgctgtgaacccccttcaatgggaaaaagctgcagtggtgatggcaggctcctaaagactgctgctaaaagacacaagaattatacagtttccctctataagtgaatccaaaattcactgacgaattcagagattgagggcacttgcttgaaatcaaggtgctccaacttagtttaagacctccagactctaactttatagatcatctcttctagagtgtgcatggatgtgtgttgcagggtggagaagtggggagaagtgtatagtagtacacggggggaagaggggacctccatgtccctttgttggatacatattacagaaatatgtgccactcactttttgttggttctgaatcttcctgaagtgtactgacatttgggctgcacagagccccacaccttcacttacacctcctcttctagaattgctttgctctatttttgtatatataaatatgttatgatgattattaataatgttaatgatattgctgcaaatggtgccatatataaggttaggcttcttggaacatttataaacccaaaccaatacctgtaacctcttatgttgctttcagatccttcaattttaagtaactttttaatcttacaagtctgcttgattgtactttacacttatctaccctgaaaagctctgcccagttctctgggtcaagctggatggtgatgagtagcaacacacacttctctgcttctgcctgaaatgtgcttagagctcagttatctaaggattctctgacactagtgcattgttcctggagctaaattattctatggatgtttgcttattagtttcaggccccaaaataacacgagcccctccaccttgatagctccttgatatcccaatcttgcagtcctaactcaggcaaattgtgcactgccagaggggccctgggttctgccatatacccagaggagcctttctcagtgtgtttctaaatggccttacacttggtagaagaaattgaagggttactcaaatacagttgcaatctgcaatctgctgttgagtcagggctttcacttgtgtccaagttggcctgatatggactgcatctgctttacgtatagatgggtcctgttgggatatgcgcatggacgtgtgagtgagtgtgcgtatgtatcccttctgtgattatatatattcacacatctctatatattttaatgtattgcacatgtatatttaaaatatatacgaaagaactctaaatcctgcagggaggctctgttttcattatttttctactttgtgtcatgtcctgtataaacaggaatatttagagggtgtttcctgcttagcatttttttgcagttaaatcatctgttagcccctaactctactgccttccacatattggttccttgatacatttcatatgatatcagccaagagttttcctgtggttccagcccatcttccctaatcacaatagcaataataaatatagtgaatacttacatagtgcttactatatgctaagcactatttttagcatgttatttatattagctcattcattcctcacaattctacaacataggtatcattccaacctctattttacagatgagaaaactgaagcacagagaagttaagtgacttgccaaaaggtaacaattgtaaatggtagagctaagatttgaacccagggtgtctgactcccaggtccatgctccagagtcagatatagaaggctggagcacagtgtaaaccattctggagtaacaagcctcaaatggtgaataattctttccctaactctggtccacctgcaacctaggagttaaaataagtatcttgctatgttaagagtaaagcaatagttacaggcatcatatattagctgtcttgctcccaaaatggtgacattacaaacttttccactattccctttgaaaacatgcttgcagccagttaccatttcttagcttatgatgtagagctattaagggagtattttcacttgtgccaaagagggtaagcgtttattagccttatctttattggccagggaaaactaattcaatttttttttgaacaaagtataactgagactatttttggagcttaagatttgttagagctgttaacattcaaccttattgattatattgagagcgctcttctgattcaaatgtaagcaaaccactgatgaccactggtccgtataacacattttaccaacagctccttcacactgaatcctttaacttggccaaaggacccttaaagaacatctagtccaatgtcaacattttatagctggagaaagggatgcacagagagggaaaataacctgtccaaagtcacacagttctgaaaattgagtggaattatgactttataccagagttcctaatttccaggtatcttagcctcagtttcttaaaaaatagagtttgaagcaaaagctatgtgcgatccagggtagtatgagtaaggaaagggttaatgagggagggaagaaagaagaacaaataaaaagcatgtcactgagttggccacggtctgttccttggcaagctaatttcgcaattttttgtgacagaccatataaaactactacatctccatacagcccacgtggtggaggaaaggaggtgaattcatctgctagctctcatctcattagtcaaattcttccccatgtgatatttacccttctacatttttgggtagtgcgtgatgggcacttaaatatgtaccttggcatttcatgcttcagcaataatgggaaggattgtggctccactataaacagtaaggcaagtatatgaatatagggagattaaatttaaagtgctacactagggtggtgcttttaccttatgtctttaatcacattccttcgaagtaagttagagataacctaccacctttaaagtaaataaagctttattgtggctcttagaactgtactatgtttgccttcctgagcctatttattctctagcttgctttaaagggcttcttttttatatggaaattaattccctgttcaattaaaggagtaacaaactctcaaaatatctttcttcttaatataaaaaggaatttcacattattgaactcctcaaaaagcatgtgtaagtcaaaatatgtatgtgaaggcacatatgttcttttaggttccatgagcataatagcaggaaaactggttaagtcaataaatgctggggaaaaaatggctaaacaaggtattctgtaacatgaaaataaagcaatgagttggttggctggctttttaaaaaatatttcagccactaattatgacacagacacattataagaattatgctaccttttattcacatatacaatagttccctgtgtcctatagatcattgtcacataaagcaaaagcattagtgccccatttggacctttggccgaaggtttgataagattttgtaggactgaaattcttggtccctttatcctagtttaggcccatatccttattttcactctcaaagataagatcatgacactaccagtgttgctgctgttaaaggccaggatggacaagataaggaaaggcattttgggaatgacactgactaatgttaggaatcttgctgtcattacaatccaagttatatatgtttgctcccatatgtatttgttggccaatctcctgaaaaagaagaaggtaattctaacccacacattgtcattcccaaactaacctggcaatccttttgaccataccaggtaatagtcatccctctgatggtaaaagacagagatgtcaaggctctggaagctcccaggtccttgaagaactaactaaactgctgaacacagaagtggtaatgtaggcaagccacaggtatgttctcttgtaacaagatggggttgaccatatgtgaaccctgaagagtcattttgaacctgtgtcctaaggcctagagtactttaatcctcatcttcaaagtcttaccactctgataacaaaaagaaacactacaaagaaactgcaaggaaagggacagtcattttttttaatatctaccaattatttagttattcatatatgcatttctttatatagaaaagtatttatatgaagtttccaaaagactctgatattcagctttatagtcttggatagaaaatcatgtgtccttggatggggattcgcacaccaaggcttaacagaattagtttggggaatactcatttttactctagagattagttggcttaaacaactttactcgtgaatttttttcttaatggaggtgaagacctcccaaagaggagaaggccccaggcctttcttaatatataaaccatattgaaagaaagaaagaaaaaagtaatgggaagtaatagtaaatgtggatccagaaagaaaaacaaaggttaagaaaatgatgtatgtgaaagaaaaaaagctctataatcagtgtgtttctctcacctaaaacaccatttactaactacttggttcagttgtaccctttaactctattttgtccttgacttatatcaacactcttcttttccaaactcctatagctctccatctggaatgattctatggggtggggggtcgggggaggagaaagggagacagcagaagaaagaaagagagagaaagatagagagagagagagagatgggtggagacttggcctctctcctagaggttcaaagttagaatatgccactaacactatctgcctttcaaactcccttctaggacatgctccatagtacttagatcttatatcaaatgacaaggtttctctccttcagagagaaataccagactggatttgtggtttccctggattggttttttctgagtcaaagtggtgttgtagaaatcacagtaccctgagaccaattaagtcagaatctttggaggtgttgaggaatggatttttaaagttcccagatgattataatatgcaaacagatttgagaaaattgaatcactttattccataaatgcagatagtgaggctaagagagggaaagtgacttactcataaccacaccgtgagttagtgaccaagtcaggataagaatccaggtctgctgactcctaggccagaattcttgtctttatactacactgcttctatctctaccctattccccctctgagcctttgcttttctcatctgtaaaatgacgataataaagcctagagagtgtatgagaatcattaaagcagaagcatttttcttaatgtacaaggttctatacaaatgcaagggaattaatgtataacatatatgtggggctaagtctctaaaacaacataataaaagttgtttttattttagtcaatcttttaggtattgtgtctacctgatagcatgtaacaagattgaacacttgtgtaggtcgtatgtgcctttaatctgaggttggcctcagtgacaatcaaaattagcagttgaggaaaaaggtcatacatttttctcttgcccttgctggaatagggatcaagaggaatataaaagcagtgggatatctggatttcttatactcagtcaaccacaacatggccttagtactgaactagcccagggtttcaatggaactcgtagatctcattcccaaggctggtcctggttgaagggagaaggtcaaaaaaggacgtgtcttctgaaaggcattacccatggaaagccaagggggagggttgcccactaggaggagcttcttttgtagaagccagaatggaggaaaggggctttctgacttggagcatctgaggaaatagattatttgaggatctagtactcccagaataatctgtaaccacaagaaacacatttcttgaactccagcgccccagaacaggatatccatatccaatcccatcgtatccatcctggatgttatgaatttccagagagggccacttctacccccctaggagtcatacatctggctacttatttgttaaaaataaaattctgtaccatttat

SEQ ID NO: 1119 - DNA, 1708 bp, HOMO SAPIENS
gaatagggttgcaccatcccagaagctgctgttagctcgccggtcctcggcacgccgcccgttcgcccctgcgctgtccgcccttcccctagcgttacttccggtccctcgctgagggggttcgtgcggctcccaggaggcgtgaaccgcggaccatgagcgtgggcttcatcggggccggccagctggcctatgctctggcgcggggcttcacggccgcaggcatcctgtcggctcacaagataatagccagctccccagaaatgaacctgcccacggtgtccgcgctcaggaagatgggtgtgaacctgacacgcagcaacaaggagacggtgaagcacagcgacgtcctgtttctggctgtgaagccacatatcatccccttcatcctggatgagattggggccgacgtgcaagccagacacatcgtggtctcctgtgcggctggtgtcaccatcagctctgtggagaagaagctgatggcattccagccagcccccaaagtgattcgctgcatgaccaacacacctgtggtagtgcaggaaggcgctacagtgtacgccacgggcacccatgccctggtggaggatgggcagctcctggagcagctcatgagcagcgtgggcttctgcactgaggtggaagaggacctcatcgatgccgtcacggggctcagtggcagcgggcctgcctatgcattcatggctctggacgcattggctgatggtggggtgaagatgggtttgccacggcgcctggcaatccaactcggggcccaggctttgctgggagctgccaagatgctgctggactcggagcagcatccatgccagcttaaggacaatgtctgctcccctgggggagccaccatccacgccctgcactttctagagagtgggggcttccgctctctgctcatcaatgcagttgaggcctcctgtatccgaacacgagagctacagtccatggccgaccaagaaaagatctccccagctgcccttaagaagaccctcttagacagagtgaagctggaatcccccacagtctccacactgaccccctccagcccagggaagctcctcacaagaagcctggccctgggaggcaagaaggactaaggcagcatctgtcccctctgtgattcagagcccttagttgagagcccctgccgcccctgccacccccctgccccgctcccaccattgcccctcctcagctgtgcaaggagaaagcatgcttaggaagttttcaggtccttgtgataaaacctccttaaatctgttcagaccaagcaatgcgagcttcctctcctgtcccatgttggaagttgctctgaaggggtggtagatgctggaagccagacacaaccctgcgtacgctgctcagttggtggagactggggctgggactggagtcagcccagctgggaggaggggctggggaggatctgcagctgaagcccgaggcagggttggtgtgatgccaaggcaaagtggtgaggagaaaacaggaaacgggctttctctgaattggtaaatgggaaagaagtgagcaacttaagattgtcacaattaatcacaagtgtacaggattagactgggtttatatttaactcttgcttcataggtgtaccatttaaagagtgttatttaatgctaagtttaactgctttaataaagtttatttttaaataaaaaaaaaaaaaaaa

SEQ ID NO: 1120 - DNA, 4020 bp, HOMO SAPIENS
caccccgtaggactggccgccctaaaaccgtgataaaggagctgctcgccacttctcacttccgcttccttccagtaaggagtcggggtcttccccagttttctcagccaggcggcggcggcgactggcaatgtttggcctcaaaagaaacgcggtaatcggactcaacctctactgtgggggggccggcttgggggccggcagcggcggcgccacccgcccgggagggcgacttttggctacggagaaggaggcctcggcccggcgagagatagggggaggggaggccggcgcggtgattggcggaagcgccggcgcaagccccccgtccaccctcacgccagactcccggagggtcgcgcggccgccgcccattggcgccgaggtccccgacgtcaccgcgacccccgcgaggctgcttttcttcgcgcccacccgccgcgcggcgccgcttgaggagatggaagccccggccgctgacgccatcatgtcgcccgaagaggagctggacgggtacgagccggagcctctcgggaagcggccggctgtcctgccgctgctggagttggtcggggaatctggtaataacaccagtacggacgggtcactaccctcgacgccgccgccagcagaggaggaggaggacgagttgtaccggcagtcgctggagattatctctcggtaccttcgggagcaggccaccggcgccaaggacacaaagccaatgggcaggtctggggccaccagcaggaaggcgctggagaccttacgacgggttggggatggcgtgcagcgcaaccacgagacggccttccaaggcatgcttcggaaactggacatcaaaaacgaagacgatgtgaaatcgttgtctcgagtgatgatccatgttttcagcgacggcgtaacaaactggggcaggattgtgactctcatttcttttggtgcctttgtggctaaacacttgaagaccataaaccaagaaagctgcatcgaaccattagcagaaagtatcacagacgttctcgtaaggacaaaacgggactggctagttaaacaaagaggctgggatgggtttgtggagttcttccatgtagaggacctagaaggtggcatcaggaatgtgctgctggcttttgcaggtgttgctggagtaggagctggtttggcatatctaataagatagccttactgtaagtgcaatagttgacttttaaccaaccaccaccaccaccaaaaccagtttatgcagttggactccaagctgtaacttcctagagttgcaccctagcaacctagccagaaaagcaagtggcaagaggattatggctaacaagaataaatacatgggaagagtgctccccattgattgaagagtcactgtctgaaagaagcaaagttcagtttcagcaacaaacaaactttgtttgggaagctatggaggaggacttttagatttagtgaagatggtagggtggaaagacttaatttccttgttgagaacaggaaagtggccagtagccaggcaagtcatagaattgattacccgccgaattcattaatttactgtagtgttaagagaagcactaagaatgccagtgacctgtgtaaaagttacaagtaatagaactatgactgtaagcctcagtactgtacaagggaagcttttcctctctctaattagctttcccagtatacttcttagaaagtccaagtgttcaggacttttatacctgttatactttggcttggtttccatgattcttactttattagcctagtttatcaccaataatacttgacggaaggctcagtaattagttatgaatatggatatcctcaattcttaagacagcttgtaaatgtatttgtaaaaattgtatatatttttacagaaagtctatttctttgaaacgaaggaagtatcgaatttacattagtttttttcatacccttttgaactttgcaacttccgtaattaggaacctgtttcttacagcttttctatgctaaactttgttctgttcagttctagagtgtatacagaacgaattgatgtgtaactgtatgcagactggttgtagtggaacaaatctgataactatgcaggtttaaattttcttatctgattttggtaagtattccttagataggtttttctttgaaaacctgggattgagaggttgatgaatggaaattctttcacttcattatatgcaagttttcaataattaggtctaagtggagttttaaggttactgatgacttacaaataatgggctctgattgggcaatactcatttgagttccttccatttgacctaatttaactggtgaaatttaaagtgaattcatgggctcatctttaaagcttttactaaaagattttcagctgaatggaactcattagctgtgtgcatataaaaagatcacatcaggtggatggagagacatttgatcccttgtttgcttaataaattataaaatgatggcttggaaaagcaggctagtctaaccatggtgctattattaggcttgcttgttacacacacaggtctaagcctagtatgtcaataaagcaaatacttactgttttgtttctattaatgattcccaaaccttgttgcaagtttttgcattggcatctttggatttcagtcttgatgtttgttctatcagacttaaccttttatttcctgtccttccttgaaattgctgattgttctgctccctctacagatatttatatcaattcctacagctttcccctgccatccctgaactctttctagcccttttagattttggcactgtgaaacccctgctggaaacctgagtgaccctccctccccaccaagagtccacagacctttcatctttcacgaacttgatcctgttagcaggtggtaataccatgggtgctgtgacactaacagtcattgagaggtgggaggaagtcccttttccttggactggtatcttttcaactattgttttatcctgtctttgggggcaatgtgtcaaaagtcccctcaggaattttcagaggaaagaacattttatgaggctttctctaaagtttcctttgtataggagtatgctcacttaaatttacagaaagaggtgagctgtgttaaacctcagagtttaaaagctactgataaactgaagaaagtgtctatattggaactagggtcatttgaaagcttcagtctcggaacatgacctttagtctgtggactccatttaaaaataggtatgaataagatgactaagaatgtaatggggaagaactgccctgcctgcccatctcagagccataaggtcatctttgctagagctatttttacctatgtatttatcgttcttgatcataagccgcttatttatatcatgtatctctaaggacctaaaagcactttatgtagtttttaattaatcttaagatctggttacggtaactaaaaaagcctgtctgccaaatccagtggaaacaagtgcatagatgtgaattggtttttaggggccccacttcccaattcattaggtatgactgtggaaatacagacaaggatcttagttgatattttgggcttggggcagtgagggcttaggacaccccaagtggtttgggaaaggaggaggggagtggtgggtttatagggggaggaggaggcaggtggtctaagtgctgactggctacgtagttcgggcaaatcctccaaaagggaaagggaggatttgcttagaaggatggcgctcccagtgactactttttgacttctgtttgtcttacgcttctctcagggaaaaacatgcagtcctctagtgtttcatgtacattctgtggggggtgaacaccttggttctggttaaacagctgtacttttgatagctgtgccaggaagggttaggaccaactacaaattaatgttggttgtcaaatgtagtgtgtttccctaactttctgtttttcctgagaaaaaaaaataaatcttttattcaaaaaaaaaaaaaaaaaaa

SEQ ID NO: 1121 - DNA, 3018 bp, HOMO SAPIENS
ataaaaccggcccggttctgtggaaagtgggcggcggagccagggtccctggaatggcggagactctgtcaggcctaggtgattctggagcggcgggcgcggcggctctgagctccgcctcgtcagagaccgggacgcggcgcctcagcgacctgcgagtgatcgatctgcgggcggagctgaggaaacggaatgtggactcgagcggcaacaagagcgttttgatggagcggctgaagaaggcaattgaagatgaaggtggtaatcctgacgaaattgaaattacctccgagggaaacaagaaaacatcaaagaggtctagcaaagggcgcaaaccagaagaagagggtgtggaagataacgggctggaggaaaactctggggatggacaggaggatgttgagaccagtctggagaacttgcaggacatcgacatcatggatatcagtgtgttggatgaagcagaaattgataatggaagcgttgcagattgtgtcgaagacgatgatgctgataacctccaggagtccctgtcggatagtagagagctagtcgagggggaaatgaaagagcttccggagcagcttcaggaacatgctatagaggacaaagaaactataaacaatttagatacttcatcatctgacttcactatattacaggaaattgaagagccatccctggagccagaaaatgagaaaatactcgacattttgggggaaacttgtaaatctgagccagtaaaagaagaaagttccgagctggagcagccatttgcacaggacacaagtagcgtggggccagacagaaagcttgcggaggaagaggacctatttgacagcgcccatccggaagagggtgatttagatttggccagcgagtcaacagcacacgctcagtcgagcaaggcagacagcctgttagcggtagtgaaaagggagcccgcggagcagccaggcgatggcgagaggacggactgtgagcctgtagggctagagccggcagttgagcagagtagtgcggcctccgagctcgcggaggcctctagcgaggagctcgcagaagcacccacggaagccccaagcccagaagccagagatagcaaagaagacgggaggaagtttgattttgacgcttgtaatgaagtccctccggctcctaaagagtcctcaaccagtgagggcgctgatcagaaaatgagttctcccgaagatgactcggatacaaaaaggctttccaaagaggaaaagggtcgcagcagttgtggtagaaatttctgggttagtggactctcttctacaaccagagctacagatttgaagaatcttttcagcaaatatgggaaggtggtgggcgccaaggttgtgacaaatgcccggagtcctggagctcgctgttacggttttgtcacgatgtccacagcagaagaggccacaaaatgcattaaccacctgcacaagacggagctccacggaaagatgatctccgtggagaaagccaaaaatgaacctgtgggaaagaaaacctctgacaaaagagacagtgacgggaaaaaggagaagtcgagcaacagtgacagatctacaaaccttaagagggatgataaatgtgacagaaaagatgatgctaagaagggtgacgacggaagtggagaaaagagtaaggaccaagatgatcagaaacctggcccctcagagcgatctcgagccacaaagtcaggaagtcgagggaccgaacggactgtagtaatggataaatccaaaggggtgcctgtgattagtgtaaaaacgtccgggtccaaagagagagcttccaaaagccaggatcgcaaatcagccagcagagagaagcggtccgtcgtgtcctttgataaggtcaaggagcctcggaagtcaagagactcagagtcccatagcagggtgcgtgaacgcagtgaacgcgaacaacgcatgcaggcgcagtgggagcgcgaggagcgtgagcggctggagattgcccgagagaggctggccttccagcgccagcggctggagcgggagcgcatggagcgggaacggctggagcgcgaacgcatgcacgtggagcacgagcgcaggcgcgagcaggagcgcatccaccgtgagcgcgaggagctgaggcgccagcaggaactgcgctatgagcaggagcggcggcccgcggtgcggcggccctacgacctggaccggcgagatgatgcctattggccggaagccaagcgggccgccctggatgagcgctaccattctgactttaaccgccaggaccgcttccacgactttgaccacagggaccgcggccgctaccccgaccactcggtggacaggagagaaggttcaaggtcaatgatgggagaacgagaaggacagcattacccagaacgccatggaggaccagagcgccacggccgggactcccgcgatggctgggggggctatggctctgacaagaggatgagcgagggccgggggctgcctcctccccccagacgtgactggggggaccatggccgaagagaggatgaccggtcatggcagggcacggccgacgggggcatgatggacagggatcacaagaggtggcaaggtggcgagagaagcatgtccggtcactccgggcctggccacatgatgaaccgaggaggaatgtcagggcgcggcagctttgccccaggcggggcctcccggggccaccccatcccacacggtggcatgcagggcgggtttggaggccagagccgggggagcaggcccagcgatgcccgcttcactcgccgctactgagtacttggaatcctgtgtcctgtctcgtggcaacaaggctatgttctgttaggagttaccttaaactgtgtaaaaatatttttttttaatctgctgccatattgtagctcaatacaatgtgaatttgtttttcgttttggggttttttttttttgtaataaatgtgtttccgttcacataccctttaaaaaaaaaaaaaaaaaaaaaaaaaaaaaaa

SEQ ID NO: 1122 - DNA, 2767 bp, HOMO SAPIENS
gcggccgcgtcccttcctgcggtccgctgctcgggcggctccagcaccagcgccggctgcgttccgggcctccggtcgcccgtccagcccctcggctaccgccgccgcctcccccgctcggcgccatggccgctgcggccggggacggcacggtgaagccgctgcagagcgccatgaagcttgccaacggggccatcgagctggacaccggcaaccggccccgggaggcatacacggaatacctgaggagcatccactatatctcccaggtgttactagaagaagtggaaaccactaaagaagctggggaaactgtgccccccgacacctccaagatgctgaagctagcacagcagtgtctggagagggcccagtcgacggccgccaagcttgggaaaacacgcctgaagccaaccatgcctgcagctgctcccattccccagcctgccggccgacaccgccgtgtatactccgatgaaggaggaaagctctctccttttctgccacccgagatcttccagaagcttcagggggcagagtcacaaagctgtaagaaagagctgacgccactggaggaggcctccctgcagaatcagaagctgaaggctgcgtatgaggcccgaatggcgcggctagaccccagccaggccatgcagaagacatccctgaccctctctctacagcggcagatgatggagaacctagtgattgccaaagcccgggaggagacactccagagaaagatggaggagcgccggctgcggctccaggaggccgccaacaggaggttttgcagccaagtcgccctgaccccggaggaacgggagcagcgggccctttacgccgccatcctggagtacgaacaggaccatgactggccgaagcactggaaggccaagctcaagaggaatccgggggacctgtcactcgtgaccagcctggtctcacacctgctcagcctccccgaccacccgatcgcgcagctcctgaggcggctgcagtgctccgtgtacagcgccctgtatcccgccgtgagcagagcagccgcgccagccccaggctgctgccccccgacccccaaccccggaagccgacggctgcggccctcgcagagcctccattgcatgctgtccccgcccgagcccagcgcagccccgcggccccaggacagtccccccacgcccccactccaacccggccccgtggggtctccctcacccctgggggacaccgcatctggattgccagacaaggacagctcgttcgaggacctggagcagttcctggggacgtctgagcggcagggccggggccgtggggtacagccggagccccagctgcagcagctgaagaccgcggtggaggagatccacaatgccgtagacaggctgctctcgctgacccttctggccttcgaaggcctaaacacagctgcctccaaggaccgctgcctggcctgcattgaggaaccctttttctccccgctgtggcctctgctgctggccctgtacaggagcgtgcaccgagcccgggaggctgccctgagcaggagcatggagctctacaggaatgcaccccccaccgccattggcatccccaccaagctcctcccccagaaccctgaggccaagggggccactggctacccctactgcgcggcggcccaggagctcggactgctggtcctggagagctgcccccagaagaagctggagtgcatagtgcggaccctgcggatcatctgtgtctgtgcggaagactactgccccaccccagaggccacaccccaggccgggcccccgcccatcgctgcagctgccattggtgccgatgacctgctgcccatcctgtccttcgtggtgctgaggagcggcctccctcagctggtgtcggagtgcgcggccctggaggagttcatccacgaggggtacctgatcggagaggagggctactgcctcacatcactgcagagtgccctgagctacgtggagctgctgccccggggaggcctggccaagtagtacagctagagcccagggtccctgcagggcctggcctcgcctcccagggctgtctctcctacacctggagccatgggatctactgaggaccatcctggagcctcacgctgctctgcacatggtgggggcttgtccactgtggtgtgctctccagctcttcaccttcctcacctcacatctgaccctggagcttggggttggcacctctgccccgacagaatggggctgaatcagctccaggaggaaccaggccctgctctcctgtgtaggcctcagagaggccaagaagggaagctttgggcttcggtgggtgcaggctcagcgatgaacatctggctggggcagctcctggggagcatcagggaagagggggccatgagccggccagcagtggagacggcagtccagtttctctcccctctgacccctagaaggggagttgtagccccatgaactagtttcttgtctgggtcaggaacaagggccggctggggcctggggtgcagctggtgtcagggtatgctgtttgctgatgggcagggacacccctgcagggtctcgggctctgagcccaggacattccctgccccttactcaccttggctgtgggctgtgaacattccgggaccctgggcatcttatctaggtccgtgcagcccaagggtcagccctcttgactgtcacatgctgcccccacccagcctaaaataaagagctcactgctgtgcaaaaaaaaaaaaaaaaaa

SEQ ID NO: 1123 - DNA, 2087 bp, HOMO SAPIENS
aggatgggtcctcggccggctcgactagaagactaagggggcgtctccccggcttcctgcggcgtcggtggcgagctgaggtggaggcaggctgcggcagacggcgacagtggcggcggcgccatggcagggcttgcaggatccctgctgccttggtgatcccgggctgacagccagagagcacagcggctcagctcctggagagtgagggttgaagaaagcggagggcagccgcctgcgcccgctggctcccattaggtcggttcctgcagcggtgcccggcagccttggtgaaggccctgcccggcagagatcatgtattgcctccagtggctgctgcccgtcctcctcatccccaagcccctcaaccccgccctgtggttcagccactccatgttcatgggcttctacctgctcagcttcctcctggaacggaagccttgcacaatttgtgccttggttttcctggcagccctgttccttatctgctatagctgctggggaaactgtttcctgtaccactgctccgattccccgcttccagaatcggcgcatgatcccggcgttgtgggcacctaacggcctgccctgttagctttccaaggaagcagaagacgggaggggaggcattgacataggtcataaagcattggagtttcaaatcccgcagcctcgcgggtgtcacattcctgacggcgcctttttggcctgtgatgttttatccttacaatgtgaataatggcactgaccggtgcttttattgtaaagtcctatagtcgtgggtggtcttgtggttgtgtgtgttctgtccccatctaggtcctggctggccgcatgaccacccctctcgcctcattactgtgaggagtctgggtccatcctggtcagctgccccaatgtgacctggggcagataaaatgccagtctcattgtcacctctgtgacccctccttgtcagggtctccttccttcccagaatgttactgactcctcagtccctcttctggtttccctttatttctcttctacccttttccttttttggggagtacctgtccaagacagggctcatttttgcacttatctcgaatttgaagagattgctgacgcccgagagcctcgctttttcatccttctttccttgttcagcaggctagacagaaacatgtcttgactgttagttgtccacaaatcttcagtattttctccacttcatttttaagaaaggaagcaacagatagatgttgctctttcacctgggtgtctgggctcaagctttcccgcccagcctcacttcctttgcccttcctcctgcctttctcaactgtcccaaggagggggcctcattgtgtctcccgtgcatgctctgcagcattgaagtatggtgtgttcacgtagttctagcagtccccagctgagtgagtgggagagtacctgtgtgtttcgtaacggccttgatccccttgatagatgtttggatattttttggtgtgccctgtgtgtgtgtgtgtacaaatacatgtgtatattccttttaaagaagctttatcgaacgtggtctgattttgaggtttagcaatagctagctatatatggtaggtgccgctacagtttttatttagcatggggattgcagagtgaccagcacactggactccgaggtggttcagacaagacagaggggagcagtggccatcatcctcccgccaggagcttcttcgttcctgcgcatatagactgtacattatgaagaatacccaggaagactttgtgactgtcacttgctgctttttctgcgcttcagtaacaagtgttggcaaacgagactttctcctggcccctgcctgctggagatcagcatgcctgtcctttcagtctgatccatccatctctctcttgcctgaggggaaagagagatgggccaggcagagaacagaactggaggcagtccatctagggaatgggactgtgaggccatacttgtgaaacgtctggactgctattctagagcttttatttggtgtgttcgttgcacagctgtttgaaatgtttaataaagctttataaactttaaaaaaaaaaaaaaa

SEQ ID NO: 1124 - DNA, 7528 bp, HOMO SAPIENS
actcagatcgcttcttgttggtatgtgtagcggcagtggccgccggcggagcagtctgagcccgacgatgaggccggggacgggagctgagcgtggaggcctcatgatggggcaccctggcatgcattatgccccaatgggaatgcaccctatgggtcagagagcgaatatgcctcctgtacctcatggaatgatgccgcagatgatgccccctatgggagggccaccaatgggacaaatgcctggaatgatgtcgtcagtaatgcctggaatgatgatgtctcatatgtctcaggcttccatgcagcctgccttaccgccaggagtaaatagtatggatgtagcagcaggtacagcatctggtgcaaaatcaatgtggactgaacataaatcacctgatggaaggacttactactacaacactgaaaccaaacagtctacctgggagaaaccagatgatcttaaaacacctgctgagcaactcttatctaaatgcccctggaaggaatacaaatcagattctggaaagccttactattataattctcaaacaaaagaatctcgctgggccaaacctaaagaacttgaggatcttgaaggataccagaataccattgttgctggaagtcttattacaaaatcaaacctgcatgcaatgatcaaagctgaagaaagcagtaagcaagaagagtgcaccacaacatcaacagccccagtccctacaacagaaattccgaccacaatgagcaccatggctgctgccgaagcagcagctgctgttgttgcagcagcagcagcggcagcagcagcagcagctgcagccaatgctaatgcttccacttctgcttctaatactgtcagtggaactgttccagttgttcctgagcctgaagttacttccattgttgctactgttgtagataatgagaatacagtaactatttcaactgaggaacaagcacaacttactagtacccctgctattcaggatcaaagtgtggaagtatccagtaatactggagaagaaacatctaagcaagaaactgtagctgattttactcccaaaaaagaagaggaggagagccaaccagcaaagaaaacatacacttggaatacaaaggaagaggcaaagcaagcttttaaagaattattgaaagaaaagcgggtaccatcgaatgcttcatgggagcaggctatgaaaatgattattaatgatccacgatacagtgctttggcaaagttaagtgaaaaaaagcaagcctttaatgcctataaagtccagacagaaaaagaagaaaaagaagaagcaagatcaaagtacaaagaggctaaggaatcctttcagcgttttcttgaaaatcatgagaaaatgacttctacaaccagatacaaaaaagcagagcaaatgtttggagagatggaagtttggaatgcaatatcagaacgtgatcgtcttgaaatctatgaagatgttttgttctttctttcaaaaaaagaaaaggaacaagcaaagcagttgcgaaagagaaattgggaagccttaaaaaacatacttgacaacatggctaatgtaacatactctaccacttggtctgaagcccagcagtatctgatggataatccaacttttgcagaagatgaggagttacaaaatatggacaaagaagatgcattaatttgctttgaagaacacattcgggctttagaaaaggaggaagaagaagaaaaacagaagagtttgctgagagaaaggagacgacagcgaaaaaatagggaatctttccagatatttttagatgaattacatgaacatggacaactgcattctatgtcatcttggatggaattgtatccaactattagttctgatattagattcactaatatgcttggtcagcctggatcaactgcacttgatcttttcaagttttatgttgaggatcttaaagcacgttatcatgacgagaagaagataataaaagacattctaaaggataaaggatttgtagttgaagtaaacactacttttgaagattttgtggcgataatcagttcaactaaaagatcaactacattagatgctggaaatatcaaattggctttcaatagtttactagaaaaggcagaagcccgtgaacgtgaaagagaaaaagaagaggctcggaagatgaaacgaaaagaatctgcatttaagagtatgttaaaacaagctgctcctccgatagaattggatgctgtctgggaagatatccgtgagagatttgtaaaagagccagcatttgaggacataactctagaatctgaaagaaaacgaatatttaaagattttatgcatgtgcttgagcatgaatgtcagcatcatcattcaaagaacaagaaacattctaagaaatctaaaaaacatcataggaaacgttcccgctctcgatcggggtcagattcagatgatgatgatagccattcaaagaaaaaaagacagcgatcagagtctcgttctgcttcagaacattcttctagtgcagagtctgagagaagttataaaaagtcaaaaaagcataagaagaaaagtaagaagaggagacataaatctgactctccagaatccgatgctgagcgagagaaggataaaaaagaaaaagatcgggaaagtgaaaaagacagaactagacaaagatcagaatcaaaacacaaatcgcctaagaaaaagactggaaaggattctggtaattgggatacttctggcagcgaactgagtgaaggggaattggaaaagcgcagaagaacccttttggagcaactggatgatgatcaataaattataccaaatatatgtttacagtatgatttaaagtctgattcagaccagggactctattttaagttcaactgaaataacactgggttttaattatatcacaggaaaaaaaaagtgcatttaagtattgttatcgtggactttataaaagcaaaggaaattgaaagtaacttttgattctgtatcaagaatcatattttcatacagtcataactgtctttctgtgaccctttcacagggcactgtaggatggattaaaggtggcaatttactgataactgcagatgtctctactttgttctaaaatctaagtcatgaggtgatttgatttactttatagaagctggattttgaagatctaatgaaaaattttttgataatatagtagtacaaaaaaagcaccagcaactgataaaaattgcttttttgtgcgctacccaactggttaaagccaatgtgatcttttatggtgaaactcctaagaaacaggtggttttgctggaaacttggtagacccttaattatagtggtgctaatgagcactactgtaatataaagccaccattattttttatcaaacatctgaatacattttacaaaggctattgtgagggcattattttgagcatctattttgaggtgatgtttaaaaaaactttaacatcaaatcaaattgtaaattaatttaaatatattgccttaaggacctactaaagaatgtgccaccagactttaagtgatagttgcaatatccttgtctaaaaaaaaaaaaaaagttgacttaaacattttctttaacagttgtcttttttttctaaattcagtctttctcttgcttttttttccctgctattgaggaagtattttgccttccctactcactgagaagtattgacttcgtggtacacattctaaagcatttctgatttgaatatttttgtacatttttatcaattattaaaccttctcttctagtgtgtactagtatttatttctacttaaactgctcagctctaaagaaattgtatgatcactttaaaggtactaaatccctgaaattttgcttcatcttacccacaccgctagtttactttccttttttaatatttaagaatattataaatcagtgcatttgaggtccctagatttgtttttcacctatgaattttttacagactattttagagaggctgtggtttgaagacagaatactctttacatgctaacttttgaaggttggtaatgtaatttatactattttccttcagtgcaggagattttttaagtaaataagtaaattttagcacctattcttcggtattatctgtgttattcttttaatgtgtacacttgaagagatcctatttcaaagttgggattttgaagaacaaaaagtttttttcttacccatcctagtgagttttgaaagtgggcctgaccagaatgtctctttcccattttgccccgtttgaattaaatataatgtctactctttaaaggctgaaggggtgggtgaggggattgtttctcattttgtctcccaagtcatttttctgctgtgaaatatgaccaggcttgtaggaagactcatcttggagaaaatgtgaagtaatcaaattgcttgagattagtctcctattgtatattagagccaaaacacataataactttggcaacagggagttgtctagactcaattttcagaggtcccattgtagtgagttaatattgctaatcatgtcaatcacttgacatggaagtcagtggcaaatctttaaagtatgcatttgatactggcaaatatatactactgatgtttcacaaaagaatcttagaatctgtagaaaacattaattacttccatgaattatttctaaagtataactttaaagttttgatttttctatttaaataaaaagctattgatgtgttttagcatgtcctcaaaatagattcctgtatttcttacagagataatcttactataaccgcaaatccctacaacacagtataaagtttccctgtagttcacccatgaaaattatttgacttaaaaacaaccatagtagtaagccaattgcaattcaaaatgcaacatccttgccataaaagatgtaacttaagtgactgtgatcctttgtctacctttcaggatcccatcaaatgggatttagttgctagaaagatacttgacagtctgaaggcacaggtgataagattttgttctctgtgaatatttttaaactaataggttatgtttttaaatcttcaatttggtaaaaaactgaaacgtcttggaatattggttctattagagttaaatatggtaaaacaggaaagcgtgtttattttcagataaggggaatttatacttttcattaaagtcttggagtcttaggaaaatgttgagggtttgtcttcccccagtgtcattaatactaatgaactattagatcaaattcacttatacatttaatatcatagttattcaaaatcaggactttaaatatttttttctcccagttcatatttctttgtgcgaaaattgaatttgtatgaaaagttagataattaagctaatcaagtatgaagtatacactcttcctaagtgaatttaaataatgtaatgcttttaaataaaagcagtggtcccaccacatttttttcagcatagtagctggcattttgttatcattagccagagtagcttcagcatataagttattgatgttttccaacttcaaaagtgcattttatgcctcccagtaaatttgataatgatttgtcacagctttgtcatcttttgacttttgcttatgggcctcacttcgtacaactataacatgaaaaaggattgtcctaaagtaagggaatcagttaatggtaggatgaagaaactgtaaaaactcctagaaaaaaacctgtgtgcatttttctggaaagttttcaaactgtgtaattcagttttcattcaattatataatttggttatatgctttaaaaaacatttgtctaaatgttcccggttttcttctggtcttagagtcagctgagtgctggctatgcagccactcgtatttttgcatccagaaaggagtaactccctttatatgaagatttttttttttaagcttagatgctatgtaagagaaaactatttgtaatcacatagtacccagggaggagtgatgaatgcttttttaaaaaaggatatttaagtatattatgtaatttaaatataaattatcaaactaaaaaacttcagcttttaaaactttctaaacaaaatgaagcaaagtacattaattccttctatcttaaatctgagactttttattttcccttgggtatatatttctctcagtgttaggtagatgttaattcaaccatcctacattctctatataaaattacactcattttacatgaaagcaaaataatgtcgttactttcatggaactgtgttctaacaggcttataatctcattctgtgcttctggtaatggcgtataccagtctgatgattcttaccatccttattcttacattactcttccaattgttttgattttaactggtggtcatgtaagttcctcggtggcagggatttatctggttcatttactgttatatatccttgtggaataggacagtgcctggcatataataggcacttttggaatgaatgtaaaatactagttgaaatatgtattcatctggcatccatggtacccatcatctgtattaaagggcttaaaaaagcatcattgcaataaaccatactaacccaccactaaagtcacagtcataattgaagtgcacccaaaataaggtccagtgactgtaccttagcttttacttcagacatgtccaaaacttgtgagaacatacaatttaaagttgaaaactcatcattttgggctatttttgaatagggctgaaatatggtgacatgtcaggcactcagttttttggagctgtcttaaaggtgaggtggaaagtgagagatgattttgctctaattacccacacattctccctaaccctccattttaagacacttagctataatagcttaagactatcaaaactgcttttgtgattctcagtaggatctagttcaaagccatctcagtgctagtgattggtaattgttaatttgatggtaattaccctacttgtaaagttgacattcatactggctaatcctccctgcccctagtcgtggacaatgaaacagtgagtggctggtgaattagatcagattcaaactaagccattccttgatgctattcttcactgctgttccttagggtatctaaatgtgttatttataaacatttttgggggctcctgcctgcaaacttcggtaggtgttggtcttccccacctctacaactgagccaaggacttgttctgaaaggtgagtaataaataagggaacaaggtttctattttctgtgtttgtaattaccagattttcacctctgtttatatattattctgatgtaaaagaacctcatagttatataaaattagaccttttgtaaataaatataatttattagaaaaaatggtatcttttactaaattggatttgtgtcagttttttcctttaagcaccactcaggcagcaagctctatgctgtgagagttgctggaggcccacgttatgttttctcagtgtaattcctctttttcttgataaaaaga

SEQ ID NO: 1125 - DNA, 5982 bp, HOMO SAPIENS
gtcccgcgccgcaagttctcctggggcgaccggaggctgctcccccgaccccctggtgtccccggagtggctgcgcggacgtcgagttggcatttcttcgcttcctcctgggccggcgcgcggcgcggcacaccaggctcccctgggctcggggacccggccatgggccgaggcgcgggccgcccgcccgctgggagccacggcttagcagccgaccgctagctgcgccgccgcccggggaccggcatgaggaccgccgcggggggacgtctgcggcccgcgtcggcgctggggacaaagaagccatgcagtgacacccgctaagacttgttggtagccatgtcggagccccacagggtccagttcacctctctcccaggttccctgaatcctgcgtttttgaagaagtcccggaaggaggaggctggggcaggagaacagcatcaggactgtgagccggctgcagcagctgttcggattacactcaccctctttgaaccagatcacaaacgctgcccagagttcttctacccagagctggtgaagaatatccgagggaaggtaaaaggccttcagcctggagataagaagaaagatctgtcagatcctttcaatgacgaagaaaaggaaaggcataaagtagaggcccttgcccgaaaatttgaagaaaaatacggtggaaagaaacgtagaaaagaccgaatacaggacttgatcgatatggggtatggttatgatgaatccgactccttcatcgataactctgaggcgtatgatgagcttgttcctgcttctttgactacgaagtatggaggattttacattaactcgggaaccctgcagtttagacaagcatcagagtctgaagatgacttcattaaagaaaagaagaaaaaatctccaaagaagcggaagttgaaggaaggtggtgagaagataaagaagaagaaaaaagatgacacttatgacaaggagaagaaatcgaaaaagtccaagttttccaaagccggcttcacagccctcaatgccagtaaggagaagaagaagaagaaatattctggggctttaagcgttaaagagatgctaaagaaatttcagaaagagaaagaggctcagaaaaaaagggaggaggagcataagcctgttgcggtcccatcagcggaagctcagggcctgcgggaactggagggtgcctctgaccccttgctctcactctttggctctacttctgacaacgacttgctccaggcggccactgccatggactcgctgacggatttggacttggagcatctgctcagtgagtctccagaaggaagtcccttccgagatatggatgatggaagtgattcccttggggtgggattggaccaggaattcaggcagccctcttctctccccgaaggcctgccagcacccctggagaagcgcgttaaggagctggctcaggctgccagagctgctgagggggagagcagacagaagttcttcacccaggatattaatggaatcctattagacatagaggcgcagactcgggagctgagcagtcaggtccgctctggggtgtatgcctatcttgcgtcattcctgccctgcagcaaggatgccctgctcaagcgtgctcggaaacttcacctctatgaacaggggggccgtctgaaggagcctctccagaagctcaaggaagccattggcagggcgatgccagagcagatggccaagtaccaggacgaatgccaggcacacacgcaggcaaaggttgccaagatgctggaagaggagaaagacaaggagcagagggaccggatttgttcggatgaggaagaagatgaagaaaaagggggcaggaggataatgggacctcggaagaagttccaatggaatgatgagatcagggagctactgtgccaggtggtgaagatcaaactggagagccaggacctggagaggaacaacaaagcccaggcttgggaggactgtgtgaagggctttctggatgcggaagtcaagcccctctggcccaaaggctggatgcaggccagaactctgtttaaggagagcagacgaggccatgggcacctgacttcaatcctggccaagaagaaagttatggccccttctaaaatcaaggtgaaggaatcgtctacgaagcctgataaaaaggtttctgtcccatcaggacagattggtggccccattgctttgccctcagatcaccaaacaggaggcctgagtattggggcctcgagcagggagctcccatcccaggcatcgggcggccttgctaaccctcctcctgtcaacctggaggactcattggatgaagacttgatccgcaatccagcctcctcggtggaagccgtgtccaaggaattggctgcattgaatagcagagcagctgggaactctgaattcacactgcctgcaccctcaaaagcacctgcagaaaaagttggaggcgttttatgtacagaagaaaaaaggaactttgcgaagcctagtccttctgctccaccaccagctagctctctgcagtcacccctcaattttctggcagaacaggctctggcactggggcagtcctctcaggagaaaaaaccagagagttctggctacaaagagctgtcctgccaggctcccctcaataagggcctgccagaagtacatcagtccaaagctaagcaccacagcttgccacggacgtctcacgggccccaagtggcagttcctgtgcctggcccccaggtcaaagtctttcatgccggcactcagcagcagaaaaacttcacgcccccatctccatttgccaataagctccaaggcccaaaggcttctcccacacagtgtcatcgttccctcctgcagttagtgaagacagcggccaaaggccagggcttccatccctctgcaccagccacctcaggaggcctgtcagcctccagcagcagctctcacaagaccccagcctcgtcctcttctgccctgagccatccagcaaagccacattcagtcagctctgcaggctcatcttacaagaataatccctttgccagctcaatctccaaacatggggtttcttctggcagctcttcctcgggaggaacaccagtccagagttctgtttctgggagcctggtccctggcatacagcctccctccgtgggacaggccaccagccgacccgtcccaagttcagcagggaaaaaaatgcctgtttcccagaagttgactctggtagcccctccaggcggtccaaacggagattccagtggtgggacccagggagtggcaaagttgctgacctcgccgtccctaaagccctctgcagttagtagtgtgacatcgtctacctccttgtcaaaaggagcgagtgggactgtgctgctggccggctcctctttgatggcttcaccctacaaatccagcagcccaaagctgtctggggccatgagctcgaactccttgggaattataacccctgtccctattcctgtccatgtgctctccttcagcgctgactcctctgccaaagcaggggtctccaaggatgccatcgtcacaggccctgcccccgggtccttccaccatggccttggccacagtcttctggctggcttgcactccagcccgccccatgcagcgcctctcccacacgctgcggtgcccacccatatcccgcagagtctgccaggtgcttctcagcttcacgggaaagggcctgctgtaccacggaaattgtgaccgcttcagaggcaaggcttgccacttgggtctgggtggaatcagaacgtgcaggtctcccaggatgtacactcactgcgccctttctgctgcttggtgttcttctggaggagcgtgagttctcagcggagcgcttctcggcacttctgatgtgcctcccatggagggagccgggcccttgctgctcaggaggtgcagactgccccgtgctctgggccttgcagctctgtcgctagacggttgttagaggggcagctctaggctggggcttgcgctgggccgtggtgggaggcacagtgtttacaggctctggtggcagagcagttggcacacctgtgggtgaatctgcctgatcccctggcatttggtcagagtacctcagagcaccccactgctcaggggctccttctggctgcagtaagctccctggatggtcacagtgccgccccatccccaggctgtgtgctcaaagcggacaaaactcaggccagagccacagctgggagacctgcactgtccctgcgaaatactaagaacacctagggtgtgctcactgtgggggccagtttctcctcggaacatgacaatgaagctcttttagagaaaagacctttgtagattcaacaattatgataggatttttacagacacctattttgggctcagttttcatcattaccattaaatgcattggatagaaggggactgttcttcacacatcatattataggaagacataattccagtgcctttatggtggagcagaattcgacaacacatgtccattcagccctctgaatggatctgagacgaagacctttttaaagatatgtctgtattgaagagaaagccagttttgagttttttacacttgcacatcattatctgtgccgtcctgactagaaggttgtctgggcccccaaattccaagtcccagtatagccagggctcccattttgtttttccagagttcgtggaggtggactgcagagcccagagcccttcatctctctgagggtcaaggataccaggggtcccaagtcacagatagacattccagtttgtattcttaggaatcattcttaggcagtgcggcagaagcaggcctctgtgaagtgtctgccgggtagaaataggccttgaagtcctggggctctccaggcagtggggttatgtgtcgactgaagggtgatgtgcagaagagcttggagagtggatcagagagactaggacagttactgcagagctcctaagtcaccactcaaccagtggctgtttcacaaggatttgagggcacttgcctgtcttgtgaggtctgtgccacaaggtgagtctgaactgactgctccagctaagtgatcaggcacgttgagagtatacggtgtcctcagcacatacacctgtgggaaaacggaccgctcttggctcctgactcccagggtacagcgcccagtaactcatccttcattcagaggtttgctggccttcccggtttcccaaggagcaagacctctgtccgccctttggcccggcctctgctctgactcctttttttacataagaaccaatctgtgtttcacattgggctaagtggattccttatccctttgttatatatattttttgcaacttggatttccagtttgtttacagagtagtcttaggtagtagcaaaagagccaaagaagagatttgtattgctgagctcaaagccaagcagaggccggcagtggaggctgagcagggactctccaggcttctctgcccataaacacccgggtcccaggccctccttcctttccctttggtgctccctcctccccacgtaccattgcgcgtgcagctggagcagaataccctcatttttaggaatctagtgatgcctcttgcctcagggaaacgtttctttgatggggagtttgagatttcttttccttgtttatgctttatttgtggtaatgaaagagcgaatgactgaacagccatggcaaggcagacctacaggcgaggccgcagcagagggtggggcagagcagcctcggggtctgggggctgcaggggtttccctggcgcagcgaaagtctctgagcacttaccgggcgtgaccgtttcttaggtgtgagaggggctgtggcttttgtgcagcgactatgttggtgttaggggtggtgtggagattgttaatcttgtataaagcaattcaataaattgtttcaaggtttccaaaacaaaaaaaaa

SEQ ID NO: 1126 - DNA, 4224 bp, HOMO SAPIENS
agggtgccccgcgcggcgtggactcgggccgctgccgccatcccgctggagagagggagagagaggcccgcccgctcgccggccgggccagtgtgagccagtgcgtgagggcgcggggggccgtgtcagcgagacgcagagcgcagccgccaccaccaaacggacatgttgaagaccagcgctgccgccgcctccttttcctcatcctgcgaacgggactgagagggggcccgccacctctccgcctctgcctcggccgcccgcctcgccgcttcgggcgcagcctcttcctgcccgggcctcggactccgccgctcgtcgcctccccccggccaccaggcccggctggtttcccagccccgctccgccgcggcgcgaggtctatgtgaccggcgggcccggagcagccgccgccgcagcgcgaacatggacgccgtcaacgccttcaaccaggagctcttttcgcttatggatatgaaacctcccatctctagagccaagatgattctcatcactaaagctgctattaaagctattaagtgtaaaccagaatacaaggttccgggattatatgtaattgactcaattgtgcgacagtctcgtcatcagtttggaactgataaagatgtttttgggccaagattctctaaaaacataactgccacattccaatatttatatctttgtccatctgaagataagagtaaaatagttcgtgtgctgaacctttggcaaaaaaatggagtgttcaaaattgaaattattcaacctcttttggacatggcagcgggaaccagtaatgcagccccagtagcagaaaatgttaccaataatgaaggctcacctccacctccagtaaaagtttcttctgaacctcccacacaagccactccaaactccgtcccagctgtaccacagttgcccagctctgatgcttttgctgctgtggctcagctgtttcagacaactcaaggccaacagcttcagcagatccttcagacttttcaacagcctccaaaaccacagtctcctgcccttgacaatgctgtgatggctcaggttcaggctatcacagctcagttaaagacaactcctacacaaccatctgaacaaaaagctgctttccccccacctgaacagaaaactgcatttgacaagaagttgcttgatagatttgactatgatgatgagccagaagctgtggaagaatcaaagaaagaggataccactgccgtcaccacgacagcacctgctgccgcagtaccccctgcacccaccgccaccgtgcctgctgctgctgcacccgctgctgcctctcctcctcctccacaggcaccatttggctttcctggagatggcatgcagcagccagcatacacacagcatcaaaatatggatcagtttcagccacgaatgatgggaatacaacaggatccaatgcaccatcaggttccacttcctcctaatggacaaatgccaggatttggacttcttcctacacctccatttcctcccatggctcagcctgtgattcctccaactccaccagtgcagcagcctttccaagcttcttttcaggcacaaaatgaaccacttacacagaagccgcatcagcaggaaatggaagtagaacaaccttgtattcaagaggttaagcgacatatgtctgataacagaaagtcaagatctaggtcagcatccaggtcaccaaaaaggaggcgatctagatctggttctagatctcgaaggtctcggcatcgacgttctcgatctcggtccagggatagacgccgacattctccccgatctcgatctcaagaaagacgggatcgagaaaaagagagagaacgtcgacaaaaaggcctccctcaagtgaaaccggaaactgcaagtgtttgcagtactaccctctgggtggggcagctggacaaaagaactactcagcaggatgttgccagtctcttggaagagtttggtccaattgaatcaattaatatgattcctcccaggggttgtgcctatattgttatggttcataggcaagatgcctatcgtgccctgcagaaactgagccgaggaaactataaagtgaaccagaaatccataaagattgcctgggccttaaacaaaggaataaaggcagattataagcagtattgggatgtagaacttggtgttacttatattccatgggacaaagtcaagcctgaggaactggagagtttttgtgaaggaggaatgttggacagtgacacacttaacccagattggaaaggaattcctaagaagcctgaaaatgaagttgctcaaaatggaggtgctgaaacctcacacacagaaccagtatcacccatacctaaaccattacctgtgcctgtccctcctattcctgttcctgcacctataacagtgccacctccacaggtcccaccacatcaaccgggtccacctgtagttggtgctctccagccgcctgctttcacgcctcctctgggaataccgcctccaggctttggtcctggtgttcctcctccccctcctcctccaccatttttgcgcccaggattcaacccaatgcatttaccaccaggttttctgcctcctggacccccacctcctataactccaccagtatccattcctcctcctcacactccaccaataagcatcccaaactctactatcgctggtataaatgaagacactacaaaagacttatctattggaaatcccattccaacagtggtgtctggggctagaggaaacgccgagtctggtgacagcgtgaaaatgtatggctctgccgtgccacctgctgcacccacgaatctgcccacccctcctgtaacccagcctgtttcacttcttggcactcaaggagttgcccctggtcctgtaattggacttcaggcaccatctactggtcttcttggcgcccggcccggtctcatcccactccagcgccctccaggaatgcccccacctcacttacagcggttccctttgatgccgccccgtcccatgccaccgcacatgatgcacagaggcccaccgccaggaccagggggctttgcgatgcctccacctcatggaatgaaaggtcccttcccaccgcatggcccctttgttaggcctggtggaatgccagggctcgggggcccagggccaggcccagggggtcctgaagacagagacggaaggcaacagccgccgcagcagccacagcagcagccacagccgcaggcgccccagcaaccacagcagcagcagcagcagcagccaccaccatcacaacagcctccaccaacacagcagcagccacagcagtttagaaatgataacaggcagcagttcaattcaggtagagaccaagaaaggtttggaagaagatcttttggaaatagggtggaaaatgaccgggaacggtatgggaaccgtaatgatgatagagataatagtaaccgtgacaggagagagtggggaaggaggagccctgaccgggacaggcacagagacttggaagagagaaatagacgctctagtgggcatcgagacagagagagagattctagagatagagagtctcgtagagagaaggaagaagcccgaggaaaggaaaagcctgaggtgacagacagggcaggtggtaacaaaaccgttgaacctcccattagccaagtgggaaatgtagacactgcttcagaacttgagaagggggtgtctgaggctgcagtcctaaagccttctgaagagttacctgctgaggctacctcatccgttgaacccgaaaaggattctggctcagcagcagaggctcctcgttagagactggaatttgtgaaaatgtgacagtgacacttcctggagtgtagagcttgaggtgtacagatgctgtattatatccgctcccgctgtactgcagccccgcgccagctggtggggaactgtaagcaatttgattgcttcccttctatttaaaaatagccacaaaataacaaaaaatactgaaaatatgaataaatattaccctttttgctgtaactttttaaaagttttgactttaaaaagtttacaaatcgtaattagaagtgctctctatttttttttttttttttaatttaagacaaggtaacggtgaaagctcctcaaaacaatagggatgtttttaataaactctattttcgtaacaaactttaatgtgtgctattcttcctacactgcatt

SEQ ID NO: 1127 - DNA, 321 bp, HOMO SAPIENS
caccctagtcctgatcctgttgggaagtctggaaagtcaaggatttcatggagttagggatccttgactaattggtgcttcatatgttctcattacttgctttgggtaagtcttgtacaggcaggagccaccatgcccagcccccaaatatattaaatagggtctgttaccatctcagtgactgtcttaaaacaacctacaaacttccagcaccatttcctagcatgctggctcagcagactgttactccgtgtaaatcaccagactgcaattctcaagggcgaccaatgcttgtctcctttccattacagcaactctttt

SEQ ID NO: 1128 - DNA, 2370 bp, HOMO SAPIENS
gcggcggcggcagcggcggagaagggagcgggaccggaagggtcgcagcgccccggcgcccctcacacccactgcggcggcggcggcggcggcggcggcggggcggagcggagcggggcgggccggcggcggagccggggccgcggagccaggagtgactagcacgcagcgccgccagtccgcccgcccgccctctccccgtggcgcggcggcggggaggcgagggatctgaaacttgcccacccttcgggatattgcaggacgctgcatcatgagcgacagtaaatgtgacagtcagttttatagtgtgcaagtggcagactcaaccttcactgtcctaaaacgttaccagcagctgaaaccaattggctctggggcccaagggattgtttgtgctgcatttgatacagttcttgggataaatgttgcagtcaagaaactaagccgtccttttcagaaccaaactcatgcaaagagagcttatcgtgaacttgtcctcttaaaatgtgtcaatcataaaaatataattagtttgttaaatgtgtttacaccacaaaaaactctagaagaatttcaagatgtgtatttggttatggaattaatggatgctaacttatgtcaggttattcacatggagctggatcatgaaagaatgtcctaccttctttaccagatgctttgtggtattaaacatctgcattcagctggtataattcatagagatttgaagcctagcaacattgttgtgaaatcagactgcaccctgaagatccttgactttggcctggcccggacagcgtgcactaacttcatgatgaccccttacgtggtgacacggtactaccgggcgcccgaagtcatcctgggtatgggctacaaagagaacgttgatatctggtcagtgggttgcatcatgggagagctggtgaaaggttgtgtgatattccaaggcactgaccgtatccttccccgcgaccttggccccgccatgctttcttaatgcctcaggcagcatgaccacctgcttacacgagcgctcacgaggacaaagtcgtaaaatccactccagactgtgttctaaggggggctttactgtatttgttaattagtgtcacaagccaagtggttcaatttcattctttatttttaacttgactacctgtgatgactttgagacttagagttcagttaaaccgattatattagctcttaattttgccaaaaatagctggacacatagaagaaattatttactctttgataagtatattctgatatttaaatgaaaatactgtattatttagtttattccgttaatttaactaggaaagatgctatctaaatttaataggctagtgtgcttgtgtgctttaattaagtactattttgttagttactggtatgcattgaaatattttcccccaaagtaagaactgaagcacattacaaaggacctaagtgaaagagattaaaatgaaaattttgtgaggaacaatatgttaaactttcttgtttgttactgtgctgacattttgtagaattttttttaaaaatctgtctagtgggttattttgtgacacactggggaagtcaaaataaatgtaaaatgaaagagataaactcatactgtagtcagcaagtcatgttagagatacagcagaaaggagaataactactctaattgttacaatagccttctttcctcatttgccattcttccatcctcagtattttttaccctaacatggttcttcacatcttccctttttcatttgtgttttaaccacttagtttttcattagtctttgactttgttttcgttatgaaagtttaaattggtctccatccttgggcagattgatggttgcttttaaggaaatcaagctccatagtcagtgttttgtatgtatcttaggaaaataatttcagattttaataattttatcaaagtggtctccttataaattcttcacagtgcaaacttaaagtgaaaatatttttatttctctcattttatttacctttctttacattttctatatcatagattatataatatgtcaagttattttatttgttctactaaattttctagcagtttccatagcctcatctcagattcacttgttgcaacctataaataaggacgtctttattttgcaagtaaacttaattaaaaagggaaaagttgaaaaattaaaagactaataatttagaaatatctacttaatgttcagtttgtctcaattcttactcattttgtgccattccttgttttattacaaaatgttttcttcaaaaagtacaaaaatgaaaaatgtgagtactttttggtgcattttagtaagtaaaattaaaattcctgctata

SEQ ID NO: 1129 - DNA, 1870 bp, HOMO SAPIENS
ctccgagacgggtggggccggagctccaagctggtttgaacaagccctgggcatgtttggcgggaagttggcttagctcggctacctgtggccccgcagttttgtagtccccgccttgtttctccccagaggcctctcaatcctccctccatgatcttcgcatagagcacagtaccccttcacacggaggacgcgatggctcccaagaaacgcccagaaacccagaagacctccgagattgtattacgccccaggaacaagaggagcaggagtcccctggagctggagcccgaggccaagaagctctgtgcgaagggctccggtcctagcagaagatgtgactcagactgcctctgggtggggctggctggcccacagatcctgccaccatgccgcagcatcgtcaggaccctccaccagcataagctgggcagagcttcctggccatctgtccagcaggggctccagcagtcctttttgcacactctggattcttaccggatattacaaaaggctgccccctttgacaggagggctacatccttggcgtggcacccaactcaccccagcaccgtggctgtgggttccaaagggggagatatcatgctctggaattttggcatcaaggacaaacccaccttcatcaaagggattggagctggagggagcatcactgggctgaagtttaaccctctcaataccaaccagttttacgcctcctcaatggagggaacaactaggctgcaagactttaaaggcaacattctacgagtttttgccagctcagacaccatcaacatctggttttgtagcctggatgtgtctgctagtagccgaatggtggtcacaggagacaacgtggggaacgtgatcctgctgaacatggacggcaaagagctttggaatctcagaatgcacaaaaagaaagtgacgcatgtggccctgaacccatgctgtgattggttcctggccacagcctccgtagatcaaacagtgaaaatttgggacctgcgccaggttagagggaaagccagcttcctctactcgctgccgcacaggcatcctgtcaacgcagcttgtttcagtcccgatggagcccggctcctgaccacggaccagaagagcgagatccgagtttactctgcttcccagtgggactgccccctgggcctgatcccgcaccctcaccgtcacttccagcacctcacacccatcaaggcagcctggcatcctcgctacaacctcattgttgtgggccgatacccagatcctaatttcaaaagttgtaccccttatgaattgaggacgatcgacgtgttcgatggaaactcagggaagatgatgtgtcagctctatgacccagaatcttctggcatcagttcgcttaatgaattcaatcccatgggggacacgctggcctctgcaatgggttaccacattctcatctggagccaggaggaagccaggacacggaagtgagagacactaaagaaggtgtgggccagacaaggccttggagcccacacatgggatcaagtcctgcaagcagaggtggcgatttgttaaagggccaaaagtatccaaggttagggttggagcaggggtgctgggacctggggcactgtgggactgggacacttttatgttaatgctctggacttgcctccagagactgctccagagttggtgacacagctgtcccaagggcccctctgtatctagcctggaaccaaggttatcttggaactaaatgacttttctcctctcagtgggtggtagcagagggatcaagcagttatttgatttgtgctcacttttgatatggccaataaaaccataccgactgagaaaaaaaaaaaaaaaaaaaaaa

SEQ ID NO: 1130 - DNA, 2787 bp, HOMO SAPIENS; identical to SEQ ID NO: 75

SEQ ID NO: 1131 - DNA, 7391 bp, HOMO SAPIENS
atgacctcacggacaaagcgaaggcagaaagttaaaatcagcatatcgaaaataaatcactctagttaccgaaaagaacataggccgttttgggagcaccagccacctccacaccagaactgggctgtcgggggccgctgcggcgcaggggctcgtccgggactgagtcagcgccggggccgagaagttcggcgggaggcgcagggcggggcttcctcccgccgactccgagcccggctctacttttctgagtccacgtctcttcctttggacaggcgtggcagcccgggcccgctcggcccagcccctcacggactgcggcgcgcggctccccggggcccggcccgccgaacgcctcgctctacagccctcacctcgcggcgccgagcgcagcgtccgcggcatggagaccggctccgactcaggtcagaggcccgcccccgggccgcgggggactggccctgcgcgcgcggcggcgcggttaggccgggccgcccgcacaggccgccgcgtgtcgagtccgcgcggggagcgcacgcggggcgggcggcgacagatcagcttgaacgggtctttttacgacttggccatgctgaaacagatgaacaattacagaatattatatctaaattccttcctcctgttttgctcaaactctctagcacccaagaaggagtacgtaaaaaggtaatggaactgctggtccatctgaataaacgtataaaaagccgccccaaaatacaacttccagtagagacactgttggttcagtaccaggaccctgctgcagtttcctttgtcacaaattttactataatttatgttaaaatgggctatcctcgcctaccagtggaaaaacaatgtgaactggcccctacgcttcttactgccatggaagggaagcctcagccacagcaggatagcttaatgcatcttttaataccaaccctttttcacatgaaataccctgttgaatcatcaaaatcagcttctccatttaatcttgctgagaaaccaaagactgtgcagctgcttttggacttcatgctagatgtccttctgatgccttatggttacgtgttaaatgaatcccagagtcgccaaaattcatcttcagcacagggttcttcttcaaacagtggcggaggttctggaatcccacagcctcctccgggaatgagcttttatgcagccaaacgagttattggtgataacccatggacacctgaacaattggaacagtgcaaattgggaatcgtgaaattcatagaagctgaacaggtgcctgaacttgaagctgttctccacttggtgattgcctctagtgatacacgccacagtgtggcaacggcagcagacctggaattgaaaagcaaacagagcttaattgactggaataatcctgccatcattaataagatgtacaaggtgtaccttggagatataccactgaagacaaaagagggtgcagttctgaagccagagttgaaaagggaccctgtcagtacaagagtcaagttaaagattgtcccccatctcctccgctctagacaagctgctgaaacgttcccagccaacattcaggtggtgtatgatggactttttggtacaaatacaaattcaaagttaagaacattatccctgcaatttgtgcatcatatttgtataacctgtccagaaatcaagattaagccattaggtccaatgcttttgaatggcctcaccaagctaatcaatgaatacaaagaggaccctaaactactgtcaatggcatattcagctgttggaaaactctccagtcggatgccacatttattcactaaggatatagcgcttgtgcagcagctttttgaagccctttgcaaggaagagcctgagactcgacttgctattcaagaagctttatctatgatggttggagcgtatagtactttggaaggggcacagcgaactctcatggaggcacttgtggcttcgtacttaataaagcctgaagttcaagttcgacaagtggctgtgaaatttgccagtacggtgtttccctcagatcatatcccttccagatatttgctgctactggctgcaggagatccacgtgaagaagttcatggagaagcacaacgcgtattaaggtgtcttccaggtagaaacagaaaagaaagtacttctgagcagatgccttccttcccagaaatggtttattacatccaagaaaaggcttctcatcgaatgaaaactccagtcaagtacatgaccgggaccactgtccttccatttaacccagcagcctttggagagatcgttctgtacttgcgcatgtgccttgcgcacagtgcgggggtggtgcccacctctcagagtttggctgatatgcaggatcatgccccagccattgggcgctacatacggactttaatgtcaagcgggcagatggcaccctcatcatctaacaagagtggggagactaaccctgtccagatctacattggcctgcttcagcagctgttagcaggtgttggaggtttgccggttatgtactgtctattggaagctgtgtcagtgtatccagaaaagctggctaccaaatttgtagacaaaacagaatggataaagagtctgatgaataacagtaaagaagaaatgcgcgaactggcagcgttgttttattctgtagtggtatcaacagtgtcggggaatgagttgaaatcaatgatagaacagcttataaagactacaaaagacaatcacagcccggagatacagcatggatccttgcttgcattgggattcacggtgggaaggtatttggctaaaaagaaaatgagaatgtcagagcaacaagacctggagagaaatgctgacaccctccctgatcaagaggaactcattcagagtgctacagaaacaataggctcatttttggacagtacatcacccctcctggcaattgctgcctgcacagccctgggtgaaattggcagaaatggtccacttccaatccccagtgagggatctggctttaccaaattgcatcttgtagaaagcttactaagtagaataccttccagtaaagaaacaaataagatgaaagaacgagcaatccaaacactgggatattttccagttggggatggagattttcctcaccagaaactcctcttgcaaggtctgatggattctgtggaggccaagcagatagaacttcagttcactattggcgaagccattaccagtgctgcaataggaactagttctgtggctgcccgagatgcctggcaaatgactgaagaggaatatactccacctgctggagccaaagtgaatgatgtggttccatgggtgttggatgtgattttaaataaacatatcatcagccccaacccacacgtgaggcaagcagcctgcatctggctcctttcccttgtcaggaagctaagtacccacaaagaagtgaagtctcatcttaaagaaattcaaagtgcatttgtttcagttctatcagaaaatgatgaacttagccaagatgttgcatcaaagggccttgggttggtttatgaactaggcaatgaacaagatcaacaggaattggtttctacacttgtggaaacacttatgactggcaaaagagttaaacatgaagtttctggagagacagtggtatttcaagggggagctcttggcaaaacaccagatggtcagggcctttctacttacaaggaactttgttctctggcaagtgatcttagccagccagatctggtgtataaatttatgaatttagccaaccatcatgcaatgtggaactctaggaagggtgctgcttttggttttaatgtaattgctaccagagctggagagcagctggctccttttctgcctcagctagttcctcgactttatcgttaccagtttgatcccaaccttggcattcgacaggccatgacaagtatttggaatgcgttggtcactgacaaatccatggtggataaatatttgaaagaaattcttcaagatttggttaagaaccttacaagcaatatgtggcgagttcgagaatccagctgtttagctttgaatgatttattgagaggaagacccttagatgacatcattgataaacttccagaaatttgggaaacgctttttagagtacaagatgatatcaaggaatctgtacgaaaagcggcagaactagctctgaaaactctgagcaaggtctgtgtgaaaatgtgtgaccctgccaaaggagcagctggccagagaaccatcgctgcccttctgccttgccttctggacaaaggaatgatgagcaccgtgacggaagttcgagccctcagcattaacacccttgtgaagatcagcaaaagtgcaggagccatgttgaaaccgcatgcaccaaaactcattccagctctgctagagtccttaagtgtattggagccccaagttctcaattatttgagcctccgggcgacagagcaagaaaaggctgcgatggatagtgctcggcttagtgctgccaaatcttctccaatgatggaaacaatcaacatgtgcctgcaataccttgatgtgtcagtgctgggcgagctagttcctaggttgtgtgaactgatcagaagtggtgtaggtcttggaactaagggtggctgtgccagtgtcattgtgtcattaactactcagtgtcctcaggacctaacaccttactcaggtaaacttatgagtgctttgctgagtggcctgacagatcggaacagtgtgattcagaaatcttgtgcatttgctatgggccatttagttcggacctcacgggatagcagcactgaaaaactcctgcagaagctcaatgggtggtatatggagaaagaagaacctatctacaagacctcttgtgctttgactattcatgctattggacgatacagccctgatgtattaaagaatcatgcaaaagaagtcctgcctctggcatttttaggcatgcatgaaattgctgatgaggagaaatccgaaaaagaagaatgtaatttatggaccgaagtgtggcaggaaaacgtacctggatcctttggtggcattcgattatacctgcaggagttaattactattacccagaaggctttgcagtctcagtcctggaaaatgaaagcccagggtgcaattgccatggcatcaattgcaaaacagactagctctctagtacctccatatctcggaatgatactgaccgcattgctgcaaggcctggctggaagaacgtgggcaggaaaggaggagctattgaaagccattgcctgtgtggtgacagcttgcagtgcagagctggaaaagtctgtgcccaatcaacccagcacaaatgaaattcttcaagctgttctgaaggaatgtagcaaagagaatgtcaaatacaagattgtagcaatcagctgtgcagctgatatcttgaaggccaccaaagaggacagattccaggagttctctaacattgtcatacctctcatcaagaagaactcacttgaaagcagtggggtccggacaaccaaaaatgaagaggagaatgaaaaggaaaaggagctccagctggaatatctgctgggtgcctttgaaagcctgggcaaagcctggccgcgaaacgcggagacccaacgttgttatcgtcaggagctgtgcaaactgatgtgtgaacggctaaaactcagcacgtggaaagtgcagctaggagtcctgcaatcaatgaatgccttttttcaggggttaatgcttttggaagaagaacatgccgatcctgaggctttggctgaaattctgcttgaaacttgtaaatcaatcacatattctttagaaaataagacctactcatctgtgagaacagaagctttatctgtgatagaattgctgcttaaaaaacttgaagaatctaaacagtgggaatgtttgacatctgaatgcagagtgctcctaattgagtctttagctactatggagccagacagcagacctgaactgcaggagaaagcagcgttactgaagaaaacacttgaaaatctggaataaattagaaggggaagaaacaaacaagtgccatgttcattgggggttgaagtggtggtgttctttgaaaaaccaagtgggaaaaagtaaagattaatctgtagcatgcatcattccttggctgaaataaaaagaaaaagccttaaattttgttccttattagctttattttactttatgtttttaaagtatctgggctgagtgagcttaatggaaccttggatgtttgaggggtggttgtaaaggaaactggcagaaatagttactaaaagagttcaagctgttattaaaggaattaatagacagagttgcagagcaagctggataaaaatcttagaactgcattcaaattagttatttcaggaaggggccctataaataacttattttaacctccctcttacacctgaagaaataggaagctgtgtcatctcagaggctttctgaggcctgtgccaaagtcagaacccaggtgtttaatgtctggccctggatactttcttttatggccatctgccaaatcagtgctaaccccggcttacccaagaaacttccaagatgaggtacgtttagggtggcacacagcagtctttgtgccagaactaaactgacccttaccattgggtttctgaaagccagaagctaaacattgtcttgtcatgtgtttaggtggttgatttggagaaaatgattgtttagcatctttacagatggagaggacagagtcagtctccttcggataattccaatcgtcttccttttacaggtggataaagtagattaggacaagatcacacattctatctgtgtctgtggctgcatattttgcaaaaccagaaacaaaatcgcagactgccgtggtttagaccatttataatgtcaaaactgtaatgacaaatttctgttcacttttatgctaccagtatgactttataggggagaaggaaagccttttaattagccacctgggaattactcttttaaaaaatgccttttctcaaaagaacatgataccactccaagtaaatcattgccactaggggttttcctccttccttctgttgcccatgcccctgcctgaaagtgtagggtaagaggaaaaacaagtaaaaccttagtgttgatggtaaactgagaactctgtagcttaccttggattccagagcagaagactggtttacattcagtactcatccttattgacgttaacaccaggaatctccatgtttattatttttcgtggaaactccatgtttattatttttggtggtctctattgaccaatgtatttcaaacttttttgactgcaagtcataataaaaataactttttacatcacg

SEQ ID NO: 1132 - DNA, 3087 bp, HOMO SAPIENS
ccgggcgggagtagctggtggaccccgttgagctgccgaacttccgggactcccccgcgaccccttcccagcttcccgtccgctccgccgcagcgattgtctcggtgggttgattcggcacaaaccgcccgacccaggggccggtgcgcgtgtggaaggggaagcactcccctcgtggtcgcctggaggtgcgctggaggagggggtgacataaccagggactcgaggtccgccgtgggaatgatccacgaactgctcttggctctgagcgggtaccctgggtccattttcacctggaacaagcggagtggcctgcaggtatcgcaggacttccctttcctccaccccagtgagaccagtgtcctgaatcgactctgccggctcggcacagactatattcgcttcactgagttcattgaacagtacacgggccatgtgcaacagcaggatcaccatccatctcaacagggccaaggtgggttacatggaatctacctgcgggccttctgcacagggctggattctgttttgcagccttatcgccaagcactgcttgatttggaacaagagttcctgggtgatccccatctctccatatcacatgtcaactacttcctagaccagttccagcttctttttccctctgtgatggttgtagtagaacaaattaaaagtcaaaagattcatggttgtcaaatcctggaaacagtctacaaacacagctgtggggggttgcctcctgttcgaagtgcactggaaaaaatcctggccgtttgtcatggggtcatgtataaacagctctcagcctggatgctccatggactcctcttggaccagcatgaagaattctttatcaaacaggggccatcttctggtaatgtcagtgcccagccagaagaggacgaggaggatctgggcattgggggactgacaggaaaacaactgagagaactgcaggacttgcgcctgattgaggaagagaacatgctggcaccatctctgaagcagttttccctacgagtggagattttgccatcctacattccagtgagggttgctgaaaaaatcctatttgttggagaatctgtccagatgtttgagaatcaaaatgtgaacctgactagaaaaggatccattttgaaaaaccaggaagacacttttgctgcagagctgcaccgtctcaagcagcagccactcttcagcttggtggactttgaacaggtggtggatcgcattcgcagcactgtggctgagcatctctggaagttgatggtagaagaatccgatttactgggtcagctgaagatcattaaagacttttaccttctgggacgtggagaactgtttcaggccttcattgacacagctcaacacatgttgaaaacaccacccactgcagtaactgagcatgatgtgaatgtggcctttcaacagtcagcacacaaggtattgctagatgatgacaaccttctccctctgttgcacttgacaatcgagtatcacggaaaggagcacaaagatgctactcaggcaagagaagggccttctcgggaaacttctccccgggaagcccctgcatctggctgggcagccctaggtctttcctacaaagtacagtggccactacatattctcttcaccccagctgtcctggaaaagtacaatgttgtttttaagtacttactgagtgtgcgccgggtgcaagctgagctgcagcactgctgggccctacaaatgcagcgcaagcacctcaagtcgaaccagactgatgcaatcaagtggcgcctaagaaatcacatggcatttttggtggataatcttcagtactatctccaggtagatgtgttggagtctcagttctcccagctgcttcatcagatcaattctacccgagactttgaaagcatccgattggctcatgaccacttcctgagcaatttgctggctcaatcctttatcctattgaaacctgtgtttcactgcctgaatgaaatcctagatctctgtcacagtttttgttcgctggtcagtcagaacctaggcccactggatgagcgtggagccgcccagctgagcattctcgtgaagggctttagccgccagtcttcactcctgttcaagattctctccagtgttcggaatcatcagatcaactcagatttggctcaactactgttacgactagattataacaaatactatacccaggctggtggaactctgggcagtttcgggatgtgaaaatttctggctcataaattgaaataacagccacgttcccaaggttgtaacagaagattcaaaacatcccattctagccacacacaaataaatatctgcggcttagtgataggactctaccttttctcctagaagcagttactgaacatccaggagtacaactccttcccatcattcccatgtggaagggtctctcccatcaaggagaacatgtggcatctctgatcctttacattgagaacatttgttggatatgttcatttattcaatagtcatttattgagcacctactacgtaccttggtactgttcaagctgtgggagatacagcggtaaacaaacaatatagagcagaaagttaaatattttatggttcatatgtgaaaaagtaattatgtttataaatagactaactgctggatgttaccaccaagtaagaaagcaacaggtaagataggctttctctctccctataccaagtaatttatacctacacagattgggcaattctagctaatgaaaatatacttaaaagtatttcttaggccgggcatggtggctcacacctgtaatcccagcactttgggaggccgaggcgggcggatcacctgaagtcaggagtttgagaccagcctgaccaacatgatgaaacctcgattctactaaaaatacaaaaattagccaggtgtggtggcatgtgcctgtaatcccagctactcaggaggctgagacaggagaattgcttgaacctgggaagcagacgctgcagtgagctgagattgtgccattgcattccagcccgggcaacaagagcgaaattccgtctcaaaaaaaaaaaaaaaaaaaa

SEQ ID NO: 1133 - DNA, 1510 bp, HOMO SAPIENS
gactataccactcccataccctataactttgtttgttctatttcacacatataattttccgagacaagatgttctcatttaagcaacaagaagattcgtctctcgctattactgtaactgctgtttatatcgtcatgtcccggaaaggtccctgtcttccctgaatggtctctaccaacttcacctccggttctaggtgtcatggctgccccaagagtctaggtaagagtttgttcccgtggtgcggagggtcaaggcccacacccggaaacctagcgaggtaaagttgcgtcttggttgtagagacgacaacttctccgcttcctcggcgatggcggcgtccgggagcggtatggcccagaaaacctgggaactggccaacaacatgcaggaagctcagagtatcgatgaaatctacaaatacgacaagaaacagcagcaagaaatcctggcggcgaagccctggactaaggatcaccattactttaagtactgcaaaatctcagcattggctctgctgaagatggtgatgcatgccagatcgggaggcaacttggaagtgatgggtctgatgctaggaaaggtggatggtgaaaccatgatcattatggacagttttgctttgcctgtggagggcactgaaacccgagtaaatgctcaggctgctgcatatgaatacatggctgcatacatagaaaatgcaaaacaggttggccgccttgaaaatgcaatcgggtggtatcatagccaccctggctatggctgctggctttctgggattgatgttagtactcagatgctcaatcagcagttccaggaaccatttgtagcagtggtgattgatccaacaagaacaatatccgcagggaaagtgaatcttggcgcctttaggacatacccaaagggctacaaacctcctgatgaaggaccttctgagtaccagactattccacttaataaaatagaagattttggtgtacactgcaaacaatattatgccttagaagtctcatatttcaaatcctctttggatcgcaaattgcttgagctgttgtggaataaatactgggtgaatacgttgagttcttctagcttgcttactaatgcagactataccactggtcaggtctttgatttgtctgaaaagttagagcagtcagaagcccagctgggacgagggagtttcatgttgggtttagaaacgcatgaccgaaaatcagaagacaaacttgccaaagctacaagagacagctgtaaaactaccatagaagctatccatggattgatgtctcaggttattaaggataaactgtttaatcaaattaacatctcttaaacagtctctgagaagtactttacctgaaagacagtatgagaaaaatattcaagtaacactttaaaaccagttacccaaaatctgattagaagtataaggtgctctgaagtgtcctaaatattaatatcctgtaataaagctctttaaaatgaaaaaaaaaaaaaaaaaaaaaaa

SEQ ID NO: 1134 - DNA, 2696 bp, HOMO SAPIENS
agcagacgagggcttgtgcgagagggggccgggcggctgcagggaaggcggagtccaaggggaaaacgaaactgagaaccagctctcccgaagccgcgggtctccggccggcggcggcggcggcggcggcggcggcgcagtttctggagcaaattcagtttgccttcctggatttgtaaattgtaatgacctcaaaactttagcagttcttccatctgactcaggtttgcttctctggcggtcttcagaatcaacatccacacttccgtgattatctgcgtgcattttggacaaagcttccaaccaggatacgggaagaagaaatggctggtgatctttcagcaggtttcttcatggaggaacttaatacataccgtcagaagcagggagtagtacttaaatatcaagaactgcctaattcaggacctccacatgataggaggtttacatttcaagttataatagatggaagagaatttccagaaggtgaaggtagatcaaagaaggaagcaaaaaatgccgcagccaaattagctgttgagatacttaataaggaaaagaaggcagttagtcctttattattgacaacaacgaattcttcagaaggattatccatggggaattacataggccttatcaatagaattgcccagaagaaaagactaactgtaaattatgaacagtgtgcatcgggggtgcatgggccagaaggatttcattataaatgcaaaatgggacagaaagaatatagtattggtacaggttctactaaacaggaagcaaaacaattggccgctaaacttgcatatcttcagatattatcagaagaaacctcagtgaaatctgactacctgtcctctggttcttttgctactacgtgtgagtcccaaagcaactctttagtgaccagcacactcgcttctgaatcatcatctgaaggtgacttctcagcagatacatcagagataaattctaacagtgacagtttaaacagttcttcgttgcttatgaatggtctcagaaataatcaaaggaaggcaaaaagatctttggcacccagatttgaccttcctgacatgaaagaaacaaagtatactgtggacaagaggtttggcatggattttaaagaaatagaattaattggctcaggtggatttggccaagttttcaaagcaaaacacagaattgacggaaagacttacgttattaaacgtgttaaatataataacgagaaggcggagcgtgaagtaaaagcattggcaaaacttgatcatgtaaatattgttcactacaatggctgttgggatggatttgattatgatcctgagaccagtgatgattctcttgagagcagtgattatgatcctgagaacagcaaaaatagttcaaggtcaaagactaagtgccttttcatccaaatggaattctgtgataaagggaccttggaacaatggattgaaaaaagaagaggcgagaaactagacaaagttttggctttggaactctttgaacaaataacaaaaggggtggattatatacattcaaaaaaattaattcatagagatcttaagccaagtaatatattcttagtagatacaaaacaagtaaagattggagactttggacttgtaacatctctgaaaaatgatggaaagcgaacaaggagtaagggaactttgcgatacatgagcccagaacagatttcttcgcaagactatggaaaggaagtggacctctacgctttggggctaattcttgctgaacttcttcatgtatgtgacactgcttttgaaacatcaaagtttttcacagacctacgggatggcatcatctcagatatatttgataaaaaagaaaaaactcttctacagaaattactctcaaagaaacctgaggatcgacctaacacatctgaaatactaaggaccttgactgtgtggaagaaaagcccagagaaaaatgaacgacacacatgttagagcccttctgaaaaagtatcctgcttctgatatgcagttttccttaaattatctaaaatctgctagggaatatcaatagatatttaccttttattttaatgtttcctttaattttttactatttttactaatctttctgcagaaacagaaaggttttcttctttttgcttcaaaaacattcttacattttactttttcctggctcatctctttattctttttttttttttaaagacagagtctcgctctgttgcccaggctggagtgcaatgacacagtcttggctcactgcaacttctgcctcttgggttcaagtgattctcctgcctcagcctcctgagtagctggattacaggcatgtgccacccacccaactaatttttgtgtttttaataaagacagggtttcaccatgttggccaggctggtctcaaactcctgacctcaagtaatccacctgcctcggcctcccaaagtgctgggattacagggatgagccaccgcgcccagcctcatctctttgttctaaagatggaaaaaccacccccaaattttctttttatactattaatgaatcaatcaattcatatctatttattaaatttctaccgcttttaggccaaaaaaatgtaagatcgttctctgcctcacatagcttacaagccagctggagaaatatggtactcattaaaaaaaaaaaaaaaagtgatgtacaacc

SEQ ID NO: 1135 - DNA, 2479 bp, HOMO SAPIENS
agatcccgcctccacggcgatcaggttagtgtgcgccgcgggtgctgggggctcgagaaccgagcggagctggttgagccttcaaagtcctaaaacgcgcggccgtgggttcggggtttattgattgaattccgccggcgcgggagcctctgcagagagagagcgcgagagatggagatgggcagacggattcatttagagctgcggaacaggacgccctctgatgtgaaagaacttgtcctggacaacagtcggtcgaatgaaggcaaactcgaaggcctcacagatgaatttgaagaactggaattcttaagtacaatcaacgtaggcctcacctcaatcgcaaacttaccaaagttaaacaaacttaagaagcttgaactaagcgataacagagtctcagggggcctggaagtattggcagaaaagtgtccgaacctcacgcatctaaatttaagtggcaacaaaattaaagacctcagcacaatagagccactgaaaaagttagaaaacctcaagagcttagaccttttcaattgcgaggtaaccaacctgaacgactaccgagaaaatgtgttcaagctcctcccgcaactcacatatctcgacggctatgaccgggacgacaaggaggcccctgactcggatgctgagggctacgtggagggcctggatgatgaggaggaggatgaggatgaggaggagtatgatgaagatgctcaggtagtggaagacgaggaggacgaggatgaggaggaggaaggtgaagaggaggacgtgagtggagaggaggaggaggatgaagaaggttataacgatggagaggtagatgacgaggaagatgaagaagagcttggtgaagaagaaaggggtcagaagcgaaaacgagaacctgaagatgagggagaagatgatgactaagtggaataacctattttgaaaaattcctattgtgatttgactgtttttacccatatcccctctcccccccccctccaatcctgccccctgaaacttatttttttctgattgtaacgttgctgtgggaacgagaggggaagagtgtactgggggttgcggggggagggatggcgggtgggggtggaataaaatactatttttactgccactctttatttttttcccctactttttctttgtgtccggtttttgtccctgtaaatgcgatagctaagtacacactaagtgagcatttgttcctgactctcaaagaggatggtttggagttctcttacgtttcctggtatttcccaagtctcttgggttggttggaaggctgtggctggtctcagtttggttactcaatgcccaggaggggctgagcaccagccatatcttttgctttggttcacatgatgatacctgcttttctcaggcctgctagaggcatccaacgccctggtttgtaaatagcaacctaaaggcgtattttggcactggtctggggacattccccatctctcatcccttttcccccttcacagatggtggtgggcttcgctctacaaagaggactctgatgttactcttgagcttatgagccagagagctgaaaaccgcaggcttgttgtgttaagttacaaggaaaatggatttggtaattaaaattagaagaaacacaccttcaaacttcaacttctttaaaagaaaaaaaaaactgtcctatcttgttctgtaaaatattagaacgctttgttttacaaaaaatgatgagagaattcttccacatgtacttctgtgcttagaacatttttacggacctaagcgctggagacgttgctgcatgtcggctgggttttttttttcatacacccgagcacggaaaaactaacgcaaaattgtattttcttacctagtggaaatctgaaatgactgcaaattcctagtgaatgtacaggtttgctttcgtgtccctcttctggttgctttagaagtgacgtgtaatttctgaacccatgtttcatctgtataaaagaacatctgcaccagtttttctcctgcccctcagaagagccaaactttgagttttatgtctgtttgtcattgataaatttcaataaatctttttatacaatttttttggggatggcttctttgagtccaacaggccattgatcttttcaagatgcattccagatgaactgctaggtgagggggaagcttcatttttgttacctgatagaatagcttttcttatgagatatatataatgtgatactatgtttggatatttttggtcttaaagcaagactcagtggtgtatcttcattaaaagcttcctttaaaaaagttacagagttactaaaaaaacaagtacccaaacaatcaagttgggccaaccttggaaccttgttttgaatatctttcattgttttgtttgtcgtattgtaaaaagaatgtatggttgaaaactcaggaatgtttataaaacaaattatttcacaaaaaaaaaaaaaaa

SEQ ID NO: 1136 - DNA, 472 bp, HOMO SAPIENS
ttattgatatcattggttctcaaactttttttggtctcagggcctctttatactctaaaaaaattattgaggatccccagagagcttttgtttatatgggttataattatcaatactaacagtagaaattaaaacaaatttctaaaatgacttttctaaaaaagctgagaagagtagcattttacatttttacagatattcaacatgtgtcttaaggcaattttacttaaacacatttgattgctgtggcggatcattttggtggaggtatatgaagacaatccaaagtcacaaatagatgaaaaaagggggccttacacaaccccctcccaaaaaggactctggaatccccagtgaatccgtagaccacattttgagagccactggtttatattaagtactttctagcgcagggggtccaatcttttggcagccctgggccacattaggagaattgtcgagggctacacat

SEQ ID NO: 1137 - DNA, 1893 bp, HOMO SAPIENS
aaccgtcactctctgttcttgctatctaatggccgctgcttccgccatggctgaggcttcctctgagacaacctcggaggaaggccagagcatccaggagcccaaagaggccaactccacgaaggcccagaagcagaagaggcgagggtgccgaggctcccgcaggcgccacgccaaccgccgtggggacagcttcggggacagcttcaccccctatttcccccgggtgctgaagcaggttcaccagggcctcagcctttcccaggaggccgtgagtgtcatggattctatgatccatgacatattggaccgcatcgccaccgaggctggtcagctggcccattacaccaagcgcgtgaccatcacctcccgggacatccagatggccgtgcgactgctgctgccggggaagatgggcaagctcgccgaggcccagggcacgaatgccgccctcagaacttcattatgtgcgatatggcaacagagaaagtgaatatgctgatacaagaagcaagaaaccttccttacttccaggtgtgtgtcagtaggattacggagtgtccacggaaacagctcatgccctagtgtacagtggtacagccaatgagtgacctgcagtctatgagcaacagtcattgacccaatgtggggggagtgacccaagctgaacccacagcagccttcctgttatattcaacctggtgtttaaaggaacggcagtgtgattctttacctgatgtttttgtttgcattgcttgtaatcatgatcttttagggatatgaatccaaagctaagattagaatatgtaccttgtccctaacatcaagttatacagaacattggcaaccattagtagaagtcagataaggcttatttcctcaaaagattagcatatttatattcatgttaatattaatataggctacctttcattgtgctctcttctgggtcccaagtcttggcattttaagcatttttttctataagtgtattgctgaatttcagagcaggtgctcactttcccattgctttccttttccattgatttccagtcgcccgagtatgtggacaagagaacatactctgggactgcaacccacaggaatttattatgttgtgccttgaagctcaacatgtggccatttttgttaaatgtttcccgtaaattttgaaacatctcataaacaacccttctccttcatatgtagaaaccagtaaaggatggcactctcagtcaaaccatgaaacaaaagctggataaatgacaaaaatcaaaattttcttgagcccatcagaagtgggaaagaaccaccccagagggcccaacacatagccacatagattattccaccatttaaagaggaccccttggtcaagagggaaacagggtcagggcaagatggtagccagagcttccctgagtagtgcagatgggaagaggggaaggtcacctccagagctccacttgggatccatagagaaatgatatagaaccaagaagtccactcattgggatctgttactttctgtttttccagattattagaaaaatattacagaaatagctgaagagaaatgttatgaaaatagttgaagttgtgcttattgcacgaggagaccaagaaaaaccccacaaaatcagctgcaagtaaatccttctggatggtgccaccaaatgttcctacaagtccggaacaacccttgccaaaccaaagacccttgccagaaccctgcttcttcccagagacagagctgtgtacctgacaaaacaccacatctcactcagtgacttatttctcattatgctaattgttttgctgtaaaatgccaatgtttctgtgaattaagacatacgaataaatttctgaagttacccttgcaaaaaaaaaaaa

SEQ ID NO: 1138 - DNA, 323 bp, HOMO SAPIENS
gaggggaaagaaccagggctgagctgtggagtgaaggggagccatttctctccaccgactgcaacctccgtgctcacagctcacggttcaccagaatccaggggcttggtcggcctaggaatccacaatgctggatattttcatcctgatgttctttgccatcataggcctggtcattctgtcctacattatctatctgctctagtggcctggagctgcggccggagcctgctggagaacagctcagaaggaaggatggagctgaatggccgagtgccctgcttgctgacgcaccggtggatttttgcttctgctgttatctc

SEQ ID NO: 1139 - DNA, 3390 bp, HOMO SAPIENS
agcgcatgacgttattacgactctgtcacgccgcggtgcgactgaggcgtggcgtctgctggggcacctgaaggagacttgggggcacccgcgtcgtgcctcctgggttgtgaggagtcgccgctgccgccactgcctgtgcttcatgaggaagatgctcgccgccgtctcccgcgtgctgtctggcgcttctcagaagccggcaagcagagtgctggtagcatcccgtaattttgcaaatgatgctacatttgaaattaagaaatgtgaccttcaccggctggaagaaggccctcctgtcacaacagtgctcaccagggaggatgggctcaaatactacaggatgatgcagactgtacgccgaatggagttgaaagcagatcagctgtataaacagaaaattattcgtggtttctgtcacttgtgtgatggtcaggaagcttgctgtgtgggcctggaggccggcatcaaccccacagaccatctcatcacagcctaccgggctcacggctttactttcacccggggcctttccgtccgagaaattctcgcagagcttacaggacgaaaaggaggttgtgctaaagggaaaggaggatcgatgcacatgtatgccaagaacttctacgggggcaatggcatcgtgggagcgcaggtgcccctgggcgctgggattgctctagcctgtaagtataatggaaaagatgaggtctgcctgactttatatggcgatggtgctgctaaccagggccagatattcgaagcttacaacatggcagctttgtggaaattaccttgtattttcatctgtgagaataatcgctatggaatgggaacgtctgttgagagagcggcagccagcactgattactacaagagaggcgatttcattcctgggctgagagtggatggaatggatatcctgtgcgtccgagaggcaacaaggtttgctgctgcctattgtagatctgggaaggggcccatcctgatggagctgcagacttaccgttaccacggacacagtatgagtgaccctggagtcagttaccgtacacgagaagaaattcaggaagtaagaagtaagagtgaccctattatgcttctcaaggacaggatggtgaacagcaatcttgccagtgtggaagaactaaaggaaattgatgtggaagtgaggaaggagattgaggatgctgcccagtttgccacggccgatcctgagccacctttggaagagctgggctaccacatctactccagcgacccaccttttgaagttcgtggtgccaatcagtggatcaagtttaagtcagtcagttaaggggaggagaaggagaggttataccttcagggggctaccagacagtgttctcaacttggttaaggaggaagaaaacccagtcaatgaaattcaatgaaattcttggaaacttccattaagtgtgtagattgagcaggtagtaattgcatgcagtttgtacattagtgcattaaaagatgaattattgagtgcttaaagattatttttgacttaaaatagtatactttgaacaaatactctaattatgaaaaggaagaacaattccttgtatgcctgtttcccctgcccccagccacctttttgggaggagaccattatggcggggcccctcacagcattctaccaaccatagcacccaccccgagcagcgctggtgctgcagcctgttcgcgctgaccatttctctacaagatacaatatttattatcaggcaagaggacagttccattttaaaataagacttttgtaatcattccaattttgtaatcatttcaaaggccacataacttagttttctctacttacacattcagtataaatatgaagctattttctgttcatatcaaacattaactacaaggcacattcgtatcagttttgtgtttctcaaattgaagtaccataccagttctgaggcagtgtcccagcttccatgtttgttaaataccccttgtttgtttcaccattccagcaagtgctgaagggtgtactttttttgagacagggtcgggctctgttgcccaggctggagtgcagtggtgtgatcatggctcactgcagcctccacacctcctgggctcaagcaatcctcccacctcagcctcctgcatagctgggactacaagtgaatttcctaatattccgggaggtcaaaaccaaggctcactgttttcacaatacacacagttctatgtttataaataacaggtttcaaaagaaactcaggacagtatttaaaacaagttcttaaactattaattgaacaatggcatttttaaatatgtaaacacagcggaattcgtgtatacactaacagaagctttaacaaaacatgtagcgtggtgggacactctgccacagcttagctgattggtatcaagccttgtctttggtttctgaggcctcctgagcccttctgtactgggagaccgcactccagagtctgcagaggagaccacccctgggaaacaaacacagctgtcttcagagtcagtgcttcaagccaacagagcttaaaactgcagtccctaatttaaaaacctaatgaaaataaaaacattctcctcacatatggaggtgacgctcgtgtcccagcagtagtaggacatggccttagaggtacgtacctgcagagagctggctatttcaaatgactcgggaacaagaaggcaggctgcagtttaaagaagggggtgggtccagcgtgcaggcacgcttgccatgtgcctccacccactcccagccaggcattaatggcaggagattggccagctcttctctgtcacattcctatttctgacttctgcctggctttcagtttctgccccaccttggctttttcccagcttgaacctaatagaactccagagtttggggggaggcccagccctttgttttctgctcttgaagcatattcacacataaaaagttgtattctcttatacaaactgttttgaggctcttaccgtagtcgaaggtatcttagatcttccttagtgatctcattaagaatatccgaaagtgtataaccctcttcaacaatctgaaacaaagatcagatccttaagagctgagcagctgtgtaacaacagcataagaatttctttgttgtaaatttaccttttcaattgtctttgcatcagctccttgcagccgcaaccagtctataagctctttatctgttctctgcccgtaggggcctgctgggttctctgtaatacctgtaacgattggcaatttgttatatattagtctaaccataaaactcttcaaaagtaaccagttggattaataaatgattccagaatgtaaatgtgatgtgaaaaagagatgaaaaaaaaaaaaaaaaaaaa

SEQ ID NO: 1140 - DNA, 408 bp, HOMO SAPIENS
  misc_feature (349)..(349): n is a, c, g, or t
gacagggttgtacaggctgttgcacaggctgtattgcggtggtgtgatcatagctcactgcaaccttgaactcctgggttcaagtgatcctcctgcctcagcctcctaccaccccctgctaatttttgttattgttgttgttgttagagaatggggtctggctatgttgcccaggttggtcttgacctaagggcctcaagtgatcctcccacctcagcctcctaaagcactgtgaatttcaggcatgagcttgagttcttattaactgtcagcctgactggctctttcctagctaggctagtcagctcggctgaggagtcaagggaggacaggcttattactatggaangcacttccaaaacattaaaatgtttctctttaaagagtgtttatcaatgctcaaacctg

SEQ ID NO: 1141 - DNA, 4957 bp, HOMO SAPIENS
ccgcgcccgcgcccccgccgccgccatgggcgtgcagggcttccaggactacatcgagaagcactgcccgagcgccgtggtgccggtggagctgcagaagctggcccggggcagcctggtgggcggcgggcggcagcggcccccgcagaccccgctgcgcctgctggtggacgccgacaactgcctgcaccgcctctacggcggcttctacaccgactgggtcagcggcggccagtggaaccacatgcttggctacctggcggcgctggccaaggcctgcttcggcggcaacatcgagctcttcgtcttcttcaacggcgcgctcgagaaggcccggctgcacgagtgggtcaagcggcagggcaacgagcgccagacggcacagcagatcgtcagccatgtccagaacaagggcaccccgccgccaaaggtctggttcctgccgcccgtctgcatggcccactgcatccgcctggcgctcatccgcttccacgtcaaggttgcacagagcattgaggatcaccatcaggaagtgattggtttctgcagagagaatggtttccatggcttggttgcgtatgactctgattatgcactgtgcaacatcccctactatttcagtgcccatgccctaaaactgagccggaacgggaaaagtctcaccacaagccaatatctgatgcatgaagttgccaagcaactggacctgaatccaaatcgttttcctatttttgctgctctcttaggaaatcacattctgcctgatgaagatctggcttcctttcactggagtttacttggtccagaacatccactagcctcactaaaggtccgggcccaccagctggtcttgccaccttgcgacgtagtgatcaaagccgttgctgactatgtacgcaacattcaggacacctctgacttggatgccatagctaaagatgttttccagcattcacagtctagaacagatgacaaagttattcgatttaagagagcaattggatattattcagcgactagtaagcctatgtcatttcatccaccacattacttagcagccagacccggtccgtttggaatgcctgggatggtgccgccgcatgttcctcctcagatgctcaacattccgcagacctctctgcaagcaaagcccgtggccccacaggtgcccagcccagggggcgccccgggccagggtccatacccgtacagcctctctgagccagcacctctcactttggacacgagcgggaagaatctgacggagcagaacagctacagcaacattcctcacgaagggaagcacacgccgctgtatgagcggtcctcgcccatcaacccggcccagagcggcagccccaaccacgtggattccgcctacttccctggctcttctacatcgtcatcttccgacaacgacgagggcagcggaggggcgacaaaccatatcagcgggaacaagattggctgggagaagacgggaagccactcagagcctcaggcacgaggagacccaggagaccaaacaaaggcagaaggctcgtccactgcctcttcaggaagccaactagccgaaggcaagggaagccagatgggcactgtccagccaatcccgtgcctcctgtcgatgcccaccaggaaccacatggacatcaccacacctcccctgccccccgtcgcacctgaggtgctgagagtggccgagcacaggcacaagaaggggctgatgtacccctacatcttccatgtcctgacgaagggtgaaatcaaaattgctgtttctattgaagatgaagccaacaaggacctgcctccggccgctctgctctataggccagttcgtcagtatgtttacggagtcctgtttagtttggcagaaagcagaaagaaaactgagagacttgcttttagaaagaacagacttccaccagaattttcaccagtgatcattaaagaatgggcagcttacaaaggaaagtctcctcaaaccccggaactggttgaagctcttgccttcagggagtggacctgccccaacctgaagaggctgtggttgggtaaggcggtagaggacaagaaccgcaggatgagggccttcctggcctgcatgaggtcggacaccccagccatgctcaaccctgccaacgtgcccactcacctcatggtgctctgctgcgtcttacggtacatggtgcagtggccgggagcacgcatccttcggcgtcaggagctagatgccttcctggctcaggcgctgtcccccaaactctacgagcctgatcagctccaggagctcaagattgagaacctagatccccgaggaattcagctatcagctctcttcatgagtggagtagacatggccttgtttgcaaatgatgcatgcggacagccaatcccctgggaacactgttgtccttggatgtattttgatgggaagctcttccaatccaaactcctcaaagccagccgggaaaagaccccactcattgacctctgtgatggtcaggctgatcaggctgccaaggtagagaagatgcgccagagcgtcctcgaggggctcagcttctccaggcagagccacacgctccctttcccgccgccacctgccctgcccttctaccctgcctctgcgtacccccggcactttgggcctgtcccaccctctcagggcaggggcagaggctttgcaggcgtctgtggctttggaggcccctatggggaaacggtagcaacaggcccttaccgtgccttccgtgtggcggcagcatcgggacactgcggagccttctcaggcagtgacagcagcaggactagcaagtcccagggcggagtccaacctataccttctcagggaggcaaactagaaatagctggcactgtggttggccattgggctgggagcaggcggggccgtgggggccgggggcctttccccctgcaggtggtttctgtcggaggaccagctagagggcgtccaagaggagttatttccaccccagtgattagaacatttggaagaggtggaaggtactatggcagaggttacaaaaaccaggcagcaattcagggcagacctccttatgctgcttcagcagaagaagtggccaaagaacttaagtcaaaatctggggaatcgaagtcctctgctatgtcttcagacgggtccctggctgaaaacggagtgatggccgaggagaagccggctccccagatgaacgggagcacgggtgacgccagggcccccagccactctgaaagtgccttgaataatgactctaaaacgtgcaatacaaatcctcatttaaatgcactaagtacagacagcgcttgccgcagagaagctgctctggaggcagctgtcttaaataaagaagagtaaacttattttttatagagggtgaaggatgctggaagggtaaggatttaggaatatctggagagaaagagagcctgcagttatgtacattttgtcctttccgtaagagaaaaatgaggactttggaaattcagatccctctttgatatcagagatttaaacaacacatttttagttttaaccagttgtagtcaaaatgctacaataaaacaaaaaagagaaagaaaatgaagagcatttgactcccgcacttaaaatgaagtacacataaagtttaaactggttatgacaaaagcctttagttgtgtttcttgaactataaagaaaacaaattttggcagtctttaagtatatatagcttaaaatataatttttagcatttggcaccatatgtatgccattatatttgattttgcattactgtttcacaatgaagctttctttaaggctttgatttttatgattatgaaagaaataaggcacaaccacagtttttctttcttaaatttcatcactgttgatgtggttcttttgtgttaaaaaaaaaaagtgcaactatcaaaactaaaaaattatagagtaatattgccgttctgctgattttaaatatacaatacatcatacatactttacaagcaagttaaatggagataaagttgaaatcatagaagatgcaaatgacctttcaaaatcaacacaatgtgttctgaaactttcgtgactaataccatgcatctgtgatcaatgaactatgtggttttgaatcggatgtagaccattagtactactacttgagctaaacttctgcatggttcataatttttaaagtgtgtagttaatatgcatgttatcgtcctttcttccattcttaacagtatgtgcccatttgcaaaacaaaaatgctaataatcagtaatagtcctataaaagatgttaactctgtttagtcattgactgatcttgctctaaccttaaaattttgtgattattgacctctgttgcatttattctaaagccccccaaaaattatctagccgtttcgaatatcaacattaccctggtgtattcactgctgtatgcattattgttctttgttgctgttttatgccttcatattagcaaatatgaaattctgtgaaaaaaaaccctttgatcttaaaaaaaaaaaaaccaccccccccttctgtagcaggaaacaaattgcttgttcttgagaactttcccatcaagaatttagtagaagcaggtatacttctatcattttgatgtttttgttaatgtttccaaacaatgtactttgaaatcagaatcacttcttatcgttttcatatacttctgatgctcttcatcacattagtgatcagaaatgaggtgtaattccccaacccctgcccgcaagagctaagtaggatcttactgtaagttgaagggagttttgccctaactcatggattgtgcaagaatgaactgctgttgggtttgattgactgtcgatggattgtggtgtggtgtatctgaaggctattgaatgcaacttacaatgcttaataaaaatctttattcttttagtataaagta

SEQ ID NO: 1142 - DNA, 2240 bp, HOMO SAPIENS
ggagggcagccagcagcttccccttctctgccctgctccaggcaccaggctctttccccttcagtgtctcagaggaggggacggcagcaccatggacccccgcttgtccactgtccgccagacctgctgctgcttcaatgtccgcatcgcaaccaccgccctggccatctaccatgtgatcatgagcgtcttgttgttcatcgagcactcagtagaggtggcccatggcaaggcgtcctgcaagctctcccagatgggctacctcaggatcgctgacctgatctccagcttcctgctcatcaccatgctcttcatcatcagcctgagcctactgatcggcgtagtcaagaaccgggagaagtacctgctgcccttcctgtccctgcaaatcatggactatctcctgtgcctgctcaccctgctgggctcctacattgagctgcccgcctacctcaagttggcctcccggagccgtgctagctcctccaagttccccctgatgacgctgcagctgctggacttctgcctgagcatcctgaccctctgcagctcctacatggaagtgcccacctatctcaacttcaagtccatgaaccacatgaattacctccccagccaggaggatatgcctcataaccagttcatcaagatgatgatcatcttttccatcgccttcatcactgtccttatcttcaaggtctacatgttcaagtgcgtgtggcggtgctacagattgatcaagtgcatgaactcggtggaggagaagagaaactccaagatgctccagaaggtggtcctgccgtcctacgaggaagccctgtctttgccatcgaagaccccagaggggggcccagcaccacccccatactcagaggtgtgaccctcgccaggccccagccccagtgctgggaggggtggagctgcctcataatctgcttttttgctttggtggcccctgtggcctgggtgggccctcccgcccctccctggcaggacaatctgcttgtgtctccctcgctggcctgctcctcctgcagggcctgtgagctgctcacaactgggtcaacgctttaggctgagtcactcctcgggtctctccataattcagcccaacaatgcttggtttatttcaatcagctctgacacttgtttagacgattggccattctaaagttggtgagtttgtcaagcaactatcgacttgatcagttcagccaagcaactgacaaatcaaaaacccacttgtcagttcagtaaaataatttggtcaaacaacagtctattgcattgatttataaatagttgtcagttcacatagcaatttaatcaagtaatcattaattagttaccccctatatataaatatatgtaatcaatttcttcaaatagcttgcttacatgataatcaattagccaaccatgagtcatttagaatagtgataaatagaatacacagaatagtgatgaaattcaatttaaaaaatcacgttagcctccaaaccatttaattcaaatgaacccatcaactggatgccaactctggcgaatgtaggacctctgagtggctgtataattgttaattcaaatgaaattcatttaaacagttgacaaactgtcattcaacaattagctccaggaaataacagttatttcatcataaaacagtcccttcaaacacacaattgttctgctgaagagttgtcatcaacaatccaatgctcacctattcagttgctctgtggtcagtgtggctgcataacagtggattccatgaaaggagtcattttagtgatgagctgccagtccattcccaggccaggctgtcgctggccatccattcagtcgattcagtcataggcgaatctgttctgcccgaggcttgtggtcaagcaaaaattcagccctgaaatcaggcacatctgttcgttggactaaacccacaggttagttcagtcaaagcaggcaacccccttgtgggcactgaccctgccactggggtcatggcggttgtggcagctggggaggtttggccccaacagccctcctgtgcctgcttccctgtgtgtcggggtcctccagggagctgacccagaggtggaggccacggaggcagggtctctggggactgtcggggggtacagagggagaaggctctgcaagagctccctggcaatacccccttgtgtaattgctttgtgtgcgacagggaggaagtttcaataaagcagcaacaagcttct

SEQ ID NO: 1143 - DNA, 1685 bp, HOMO SAPIENS
gtgtgcgtcacgccgacgacgcgcgaagggcacacatcttaggacccggaggacgtccggcctctgtgagccgcaacctttccaagggagtggttgtgtgatcgccatcttagggaaaagatgttctcgtccgtggcgcacctggcgcgggcgaaccccttcaacacgccacatctgcagctggtgcacgatggtctcggggacctccgcagcagctccccagggcccacgggccagccccgccgccctcgcaacctggcagccgccgccgtggaagagtacagttgtgaatttggctccgcgaagtattatgcactgtgtggctttggtggggtcttaagttgtggtctgacacacactgctgtggttcccctggatttagtgaaatgccgtatgcaggtggacccccaaaagtacaagggcatatttaacggattctcagttacacttaaagaggatggtgttcgtggtttggctaaaggatgggctccgactttccttggctactccatgcagggactctgcaagtttggcttttatgaagtctttaaagtcttgtatagcaatatgcttggagaggagaatacttatctctggcgcacatcactatatttggctgcctctgccagtgctgaattctttgctgacattgccctggctcctatggaagctgctaaggttcgaattcaaacccagccaggttatgccaacactttgagggatgcagctcccaaaatgtataaggaagaaggcctaaaagcattctacaagggggttgctcctctctggatgagacagataccatacaccatgatgaagttcgcctgctttgaacgtactgttgaagcactgtacaagtttgtggttcctaagccccgcagtgaatgttcaaagccagagcagctggttgtaacatttgtagcaggttacatagctggagtcttttgtgcaattgtttctcaccctgctgattctgtggtatctgtgttgaataaagaaaaaggtagcagtgcttctctggtcctcaagagacttggatttaaaggtgtatggaagggactgtttgcccgtatcatcatgattggtaccctgactgcactacagtggtttatctatgactccgtgaaggtctacttcagacttcctcgccctcctccacccgagatgccagagtctctgaagaagaagcttgggttaactcagtagttagatcaaagcaaatgtggactgaatctgcttgttgatcagtgttgaagaaagtgcaaaaggaacttttatatatttgacagtgtaggaaattgtctattcctgatataattactgtagtactcttgcttaaggcaagagtttcagatttactgttgaaataaacccaactcttcatgatttgcctgtgacttatttttaaaacttttttaaaaaagatttagctttaaaatagttggaaagaatgaagtatataagttaaggaaaaaatacaaaactgaccatgaccattgttggttgaatattccagttgctattcagaaattgtcatatgtctcaagttttatcacacaaagttcctgtatttctagggaagcagactttaaatttctaaaaacttgatttaattatagttaaatatgtgtagtcatttgtggttattttggcaagtaaatgtcagtgtatacttacaaaaaaaa

SEQ ID NO: 1144 - DNA, 534 bp, HOMO SAPIENS
  misc_feature (300)..(300): n is a, c, g, or t
  misc_feature (308)..(308): n is a, c, g, or t
  misc_feature (312)..(312): n is a, c, g, or t
  misc_feature (314)..(314): n is a, c, g, or t
  misc_feature (318)..(318): n is a, c, g, or t
  misc_feature (326)..(326): n is a, c, g, or t
  misc_feature (331)..(331): n is a, c, g, or t
  misc_feature (355)..(355): n is a, c, g, or t
caattaaacttttctgcttgctctctgcaaaatatgctaatgatctggtctgctggaaggtggacatatgcagtgctgtttcactgctgtcagacgctgctgccctggaaggtccccctggagaaggtgtggcatcaccaggatggtcaggtgggcagtgggttgagcgtgcagcctcgtacccagcctcctgtgtcctggctggctgttccaggacttgcaccttttcagcagttatctagacctggccgcagtggcctgagttgcagtgattcgtattcactcattctttgatgttcntagatccnaccnantcantcgttgcngttanttttctgggatgatgaagctaccnagggttttgtgcgtgttgtttcagcatatgacacgtggcaccagctgtacactgcccttctggttagtgttgttcttggtcaagggctccaggctgtcttccatgctatcttcatgagtgggtggcagcacgtgcccaacgctgcccactgggagaagcattgatactgtggccactca

SEQ ID NO: 1145 - DNA, 536 bp, HOMO SAPIENS
  misc_feature (32)..(32): n is a, c, g, or t
  misc_feature (45)..(45): n is a, c, g, or t
  misc_feature (53)..(53): n is a, c, g, or t
  misc_feature (61)..(61): n is a, c, g, or t
  misc_feature (75)..(75): n is a, c, g, or t
  misc_feature (117)..(117): n is a, c, g, or t
  misc_feature (176)..(176): n is a, c, g, or t
  misc_feature (189)..(189): n is a, c, g, or t
  misc_feature (193)..(193): n is a, c, g, or t
ctggggttttaggagccctcgatcgccatggngtcccagaagttnagccaccnaggactcnagccatttccaccntgaaaccagttttgcacctattgttttgattttgaactgtcnttcgaggggaggagggagcccggcgtactggggagaatatgtggtgggaggtgggatgngaggaggagctgnctgngcttggtctcggcctcaggatgccccctgttaacccctgtaggataggggaaagaggtgcagcgagttgcaccttccctaaagggccagagattcgtttatagcttgcgaatctctgctttttcagcctcggtaaaggggtatcatttgtggttggtttggttcgtcccttaacaacattcttggtgaggaatccccaggtgaatctgccacggagtgaagcagcccacttgagctgttggctacccccggcccccgcaacgcccgttggcttttgtgacacgttacacgttagtgttggtagagcctagccgtcagaggtacctgtaccataagcatctcta

SEQ ID NO: 1146 - DNA, 4128 bp, HOMO SAPIENS
gaccagcggagcgctgggtgtcagtgagcagcgaggagccgcgcgcccccgtgcccgcgtctgtccgtgcgcccgagcgcccactcccgggtctgaggtctgcccggcgcgccgcttgcagagcatactcagggccgcgcacctgccccgcgcacctgcccgccgcccgctcggcgctccgggcttcgctagccagcctccctgcgacagcgcgggggctccggccgtgcctccgcgtccgccccgcgcctcagccgggcccgggcgcagcgctgcggagggcgagggccgcccggagtccggccagggccggcgcggcgatgatgaacaggttccgaaagtggctctacaaacccaagaggtcggatccgcagctgcttgcccggttctactatgccgacgaggagctgaaccaggtggccgcggagctggacagcctggatgggcggaaggacccccagcggtgcacgctgctggtcagccagttccgctcctgtcaggacaatgtgttgaacatcattaaccagatcatggatgagtgcatcccccaggaccgcgcccccagagatttctgcgtcaagttccctgaggagatccggcacgacaacctggccggccagctgtggttcggtgccgagtgcctggccgccggctccatcatcatgaaccgggagctggagagcatggccatgcgcccgctggccaaggagctgacgcgcagcctggaggacgtgcggggcgccctccgtgaccaggcgctgcgggacctgaacacctacacagagaagatgagggaagcgctgaggcacttcgacgtcctgttcgcagagtttgagctcagctacgtctcggccatggtgcctgtgaagtcccccagggagtactacgtgcagcaggaggtcatcgtgctcttctgcgagacggtggagagggccctggacttcgggtacctgactcaggacatgattgatgactacgagccggccctcatgttcagcatccccaggctggccatcgtgtgtggcctcgtggtctatgcggacggacctctgaacttggaccgcaaggtggaagacatgtccgagctgttccggcccttccacacgttgctgcggaaaataagggatttgctgcagacgctgacggaggaggagctgcacacgctggaacggaacctctgcatttcccaagacgtggagttccccatccgcgcagacgtgcagggacccgctgccctggcgcctgccctctctgcccctctcccccctgaggggccactctcagctaaggccaaagacccggatgcagagctggcctgctccatgcagtacgacgaccaggagctggagcagctcagccgcatggtccacagggcgggggacgagatgtcctctttgctttcaccgcccattgcctgccagtccccagctcacaggccaggagcggagggcagcccaggcggggaggcctctccaggtagaccgcgcctgcggtcaggcagtgacgaggaggagcgcgtgttcttcatggatgacgtggaggggacggcagaagccctggccaggcccgagtccccagctggcccatttgggtgggcaggcagtacctgggccgacccccaggagaaagggcagggtgggccaggcggagcggcggggatcagcttgcccgcctcggaaaaggaggaggacttgagcaacaacaatctcgaggccgagggcacagatggggccagcctcgcgggcaccagctcctgcagctgcctggactcgcggctgcacctggacggctgggaggtgggtgcggatgacgcagagacggctgagatgatcgcccaccggacagggggcatgaagctctcagccacggtcatcttcaaccccaaatcgcccacttccctggactctgcggtcgccacccaggaggccgcctcggagcccgtggccgaggggatggatggcggcccccacaagcttagcactggggccaccaactgccttctgcattcctgcgtgtgctgtgggagctgcggggacagcagggaggacgtggtggagcgtctgcgggagaagtgcagcccgggaggcgtcattggtgcctcgtacgctgccggcttagccaaggccagcgacagggcccctgagagacaggaggaggcgcccccaccctcagaagatgcctccaacgggcgggagcccaaagcccccacttccgacaagtgcctgcctcacacctcaggttcccaggtggacacagcgagtgggctgcaaggagaggctggggttgcaggtcagcaggagccagaggccagagagctgcatgctgggagcccctcggctcacgaggcgcctcaggccctgtcgggctccagcagctccacagctgggtcctgctcctcagacaagatggggccagaggcggccccagcagccacgcatgctgccccacaggccacaagagagaagatccggtccaggttccacggcagccacgacctcatccaccgcctgttcgtctgcatttcaggtgtggctgaccagctgcagacgaactatgccagtgacctgagaagtattcttaaaacactgtttgaggtcatggccaccaagcctgaaacagacgacaaggaaaagttaaggaaggtcacccagactctgcggagtgcggccttggaggactgtgcactgtgccaggagaccctgtcatcctctgaactggcagccaagacccgcgatggggactttgaagaccccccggagtgggtgccagacgaggcctgtggcttctgcacggcgtgcaaagcacccttcaccgtcatccgccggaagcaccactgccgcagctgtgggaagatcttctgctcgcgctgctcctcgcactcagcaccgctgccccgctacgggcaggtgaagccggtccgagtgtgcacccactgctacatgttccatgtcacgcccttctacagcgacaaggccggcctgtgacgtggtgccaggggcagccccaacccacccgggccaggaacccccaggaaggtggggccacgctgcaggcaggtctcactgcgtctcatgaggccgctgccgctgctgcaggggcacccagacctccagagcatccagagcctctgtcctgcccacgctagcctccctgcagggaccccgggccggctgcaggggccaacaagaggtcagctttgcccagcaggggacccggaggagcctggtggctgcctcagggcagggtgcctggcggagaaggcctgggccctcccactggtccctcggagatctgctggggctatgggaatcggggcgggtgatggaggtggacaagagtggggccactctgcgcctctgctgttgcggtgaatctggaagccggagcaagggccactccacaggctctttggcacagcagggctccctatgtgcctcccaaacgtcaaatgcaggctacccattctccccatcagctgcccacctcgttccccagccctcacccctcacccctcaccatccttcctcaggacttggctaaacaacatgcatctcatttcttcttggagtggggagatgcgggaagctgacccagtggtcctctaggcaggcagggtgctcctggtgtctgcccaccactgtccccttgctgatggcatgggggtccgaccaggcactgacaccgcaggcagaggttgctcggggccttgggtcgggtttaccaatcagccaggacgcccggggccaccagctcagctaccacttccccttccctctgcaccctctggaaccctggcccaattcctcagaccccagagtggcctgggacccaagctgccgcagctgagtggccccagcggacacctcctcaggcttaaatctcaggcttcacattgcaatgacgattgcagttttatttttggagatgacacacctactgcttcttttctaggataaatctaattactgtttactggtggagtacatatgcatagaaacggcttctgtcggggggagagtatataatggaggaaatattatgtattgagattatatttattttctaaatgctgtaatttgaagccatttccataaatctatttaaggattgcaaaaaaaaaaaaaaaaa

SEQ ID NO: 1147 - DNA, 4205 bp, HOMO SAPIENS
tgagcacaggtttcgcgggtagaaggcgtgcgcaggcgcggacacgggcgcatgcgcgttcactccggcgcgcagtgccggccggggcggggatacgccgtgtgcgcggccgggggcggaacggaggaggaggcggtggtgtcccggctgcggggtaggagtccgcggcagcctccgggtaagccaagcgccgcgcagtgctgagttcccgcacgccgcagagccatggagatcggcaccgagatcagccgcaagatccggagtgccattaaggggaaattacaagaattaggagcttatgttgatgaagaacttcctgattacattatggtgatggtggccaacaagaaaagtcaggaccaaatgacagaggatctgtccctgtttctagggaacaacacaattcgattcaccgtatggcttcatggtgtattagataaacttcgctctgttacaactgaaccctctagtctgaagtcttctgataccaacatctttgatagtaacgtgccttcaaacaagagcaatttcagtcggggagatgagaggaggcatgaagctgcagtgccaccacttgccattcctagcgcgagacctgaaaaaagagattccagagtttctacaagttcgcaggagtcaaaaaccacaaatgtcagacagacttacgatgatggagctgcaacccgactaatgtcaacagtgaaacctttgagggagccagcaccctctgaagatgtgattgatattaagccagaaccagatgatctcattgacgaagacctcaactttgtgcaggagaatcccttatctcagaaaaaacctacagtgacacttacatatggttcttctcgcccttctattgaaatttatcgaccacctgcaagtagaaatgcagatagtggtgttcatttaaacaggttgcaatttcaacagcagcagaatagtattcatgctgccaagcagcttgatatgcagagtagttgggtatatgaaacaggacgtttgtgtgaaccagaggtgcttaacagcttagaagaaacgtatagtccgttctttagaaacaactcggagaaaatgagtatggaggatgaaaactttcggaagagaaagttgcctgtggtaagttcagttgttaaagtaaaaaaattcaatcatgatggagaagaggaggaagaagatgatgattacgggtctcgaacaggaagcatctccagcagtgtgtctgtgcctgcaaagcctgaaaggagaccttctcttccaccttctaaacaagctaacaagaatctgattttgaaggctatatctgaagctcaagaatccgtaacaaaaacaactaactactctacagttccacagaaacagacacttccagttgctcccagaactcgaacttctcaagaagaattgctagcagaagtggtccagggacaaagtaggacccccagaataagtccccccattaaagaagaggaaacaaaaggagattctgtagaaaaaaatcaaggaactcaacagaggcaattattatcccgactgcaaatcgacccagtaatggcagaaactctgcagatgagtcaagattactatgacatggaatccatggtccatgcagacacaagatcatttattctgaagaagccaaagctgtctgaggaagtagtagtggcaccaaaccaagagtcggggatgaagactgcagattcccttcgggtactttcaggacaccttatgcagacacgagatcttgtacaaccagataaacctgcaagtcccaagtttatagtgacgctggatggtgtccccagccccccaggatacatgtcagatcaagaggaggacatgtgctttgaaggaatgaaacccgtaaaccaaactgcagcctcaaacaagggactcagaggtctcctccacccacagcagttgcacttgctgagcaggcagcttgaggacccaaatggtagcttttctaacgctgagatgagtgaactgagtgtggcacagaaaccagaaaaacttttggagcgctgcaagtactggcctgcttgtaaaaatggggatgagtgtgcctaccatcaccccatctcaccctgcaaagccttccccaattgtaaatttgctgaaaaatgtttgtttgttcacccaaattgtaaatatgatgcaaagtgtactaaaccagattgtcccttcactcatgtgagtagaagaattccagtactgtctccaaaaccagttgcaccaccagcaccaccttccagtagtcagctctgccgttacttccctgcttgtaagaagatggaatgtcccttctatcatccaaaacattgtaggtttaacactcaatgtacaagaccggactgcacattctaccatcccaccattaatgtcccaccacgacatgccttgaaatggattcgacctcaaaccagcgaatagcacccagtcctgcctggcagaagatcatgcagtttggaagttttcatgtactgatgaaagatactctacagaacttgtcaaatctttgaaacttggaatatattgctttcataatatgaagttttattgcctatctatctgaagtgtctaatttttcaagtttgtaagtttattatgtggttttaacattgggtgtttttgttttgtttttactatgaaaagacagcttaaggaagagctaaattctgttaaaatatttggggcatgtttgtgcactgctgttgtgaggatcagcatatgaaattgacatcatggttagtcatggtactgcagcttagggggctacacggttgctgtgtgagtggagagatgcagtgaggcagttgtcattattctaaaaattgtactactttcacttttcccaaagattatataatgttcataatccaccatgaaaacagcattggccaaaggtactgaggctgcttaaaatattcaattctgctttttaatttttaagtgaatttagtttgaaaagcatgattatacaggcctctcaggctgagtgctactttggtaaagttcccagttttcctgccttctgtgacaggatgaatgaggtgggtatggacagtggaggcagctggaatggcaagtgcagaaaataggaacagttctatacagtgctctcatttactaataacataatgccttctaaataatttttttgggaaactacattatcacaaaattatacaaatttttttacaagtatttacatactgtatctgaaaacagactttaaagtcacaagattataaatgtacatatatattctcacattctgaaaaataacattctcagaatccacagaaaatatacttagttactactgaagataatttttgaaatgtaaaaattagatttaaatagtatattttaaatgacagaactataattacagagatcagatcagataggtaaactgcaagatagataggatgaaacttttggcctactgtattacttacagagtttttttgtgtgtggtttttaaaactgttaaggcaagaagtgtcaaatgctttagagttaaataacagatcactgatttcaaagacttggtgtatagtgttaaaaattaaagcttaaaaggtggttagaaaagtggattaatgcaaaaggggtaataaagactgcaacattctcaggaccaaattaaactgctaaaaaaaaaaaaaaagttcattgacttgcttagtcgtatactcaaatgatgataaacctacatgtgcaaaggctcacgtttaagattgtcaagccagcagtctactgttgtgttgccattgcttttccattgggagaagaaagaattaaccagtcattaaaccatttggtaagttgcactttgctgtgctgatcccacaggaaaggcttgaaacacgagaagcagcaaagacagagcacacaagtgcataaggctgttgtcttcggcttgggtgaaatgacagttcctcttcattctaaaggtttactccattgaatttaaggcatttgttcattccagtgttgagatgctttgcatctctgcagaagaaatttattttaaattgtttaaatatctggaaatacttttagctatcatttataaagatagttttgttctcagtttcactataaattatagaacaaatgggaaacaagggtttaatttagttcagccattttacaaggaaataataaaatactaaaatctgaaaaaaaaaaaaaaa

SEQ ID NO: 1148 - DNA, 4617 bp, HOMO SAPIENS
aaaatcggttttcctgataaagagctgggctgagtcatctgtggaggagaaaagtcacatccagctccttcatgttgctgccgatgtgggattttcctggcttcgtcagccaagcaattggctgcctttgccggaggctttgagaaccaaggcttgaaggccggcaggagcatccagggggaagcttggcttcagggaggacctagcagacgttgggccggagcactagcctcacggagaaggatctgaaagaagccaaggcgcggagccagcagattgcagcccagctgaccacccctcccagctccaattcccgtggcgtccagctcttcaacaggcgccggcagagggtgaacgagttcaccttggagagccacggccagaggggacagaagcccagccaggagtccctcagagtgctcccttcaagcctcccaggccatgcaccggggctcagcctgagttccacctcgctgccggagccaggccctccacggcaccccagtccccagagccccgacagaggggtccctggccacagcatggaggggtactcagaggaggctagcttgctgcggcacctggagaaggtggccagtgaggaggaagaggtaccactggtggtttatctaaaggagaatgcagcactgctgacagccaatgggctgcacctgtcccaaaaccgagaggcccagcagtcctcaccggccccacctccagctgaggtccacagcccagctgcagatgtcaaccaaaaccttgcctcgcccagtgccacgctcaccacaccaacttctaacagcagccacaatccgccagccaccgatgtcaatcagaacccaccggcaactgttgtcccacagagcctgccactttctagcatccaacagaattcctcagaggcccaactcccatctaatggcacagggcctgcttccaaacccagcaccctgtgtgctgatgggcaaccccaggcaccggctgaggaggtgagatgcagcacactcctaattgacaaggtatcaactccagctaccaccaccagcaccttctccagagaagctacgctcatccccagctccaggcccccagcctcagatttcatgtccagctccctgctcattgacatccagcccaacaccctagtggtgtcagcagatcaagagatgtctgggcgagcagctgccaccacgcccaccaaggtctacagtgaggtccacttcacactggccaagcccccatcagtggtcaacaggacggccaggccttttgggatccaggcgccagggggcaccagccagatggagaggagccccatgctagagagacgacattttggggagaaggccccggctccccagccccccagtttgccagacaggagcccccggccacagagacacataatgtcccgcagccccatggtggaaaggaggatgatggggcagcgaagcccggcctcagagagacgccccttggggaacttcactgcaccccccacctacactgagaccttgtccacagcccctctggcttcctgggtgaggtctcctccctcatattctgtcctgtatcccagctccgaccccaagtcttctcatctgaagggccaggcggttcctgccagcaagacgggcattctggaggagtcgatggcccgccggggcagccgcaaatccatgtttactttcgtggagaagcccaaggtgaccccgaatccagacttgctggatctggtacagacagcggatgagaagcggcggcagagggaccagggggaggtaggcgtggaggaggagcccttcgcactgggggccgaggcctccaacttccagcaggagccagcacctcgtgacagggccagccccgcggcggcggaggaggtggtaccagagtgggcctcctgcctcaagtcaccccgcatccaggccaagccgaagcccaaacccaaccagaacctctccgaggcctctgggaagggagctgagctctacgcccgccgccagtcacggatggagaaatatgtcatcgagtcttcaagccacacgccagagctggcccgctgcccatcacctaccatgtccctgccttcctcctggaaataccccactaacgcccccggggccttccgagtggcatcccgaagcccagcccggaccccgcctgcctccctctaccatggctacctgcctgagaacggggtcctgcgcccagagcccaccaagcagccgccataccagctgcgcccctcgctctttgtcctctcacctatcaaggagcctgccaaggtctcaccaagagctgcctcgcccgccaagcccagctccttggacctggtgcccaacctgcccaagggggctctccctccatctcctgccctgcctcggccctcgcgctcctcaccgggcctctacacctcccccggccaggacagcctgcagcccactgccgtgagccctccttacggcggtgacatctcccccgtgtctccctccagggcgtggtctccccgagccaagcaggcccccaggccctccttctctacccggaacgccgggatcgaggctcaggtgtggaagccttccttctgcttcaagtaacgaaccccacgggggtcccactgccggtcaagttcccctccttgagggccagatggagagcagatgtggcaggaaatggcacagagctgagtgaggagaatggggagtccatggttcaaggtcagatgcggccaccagctggctttgtgaccttgggcgagtcgcctcccctctctgagctgaagccgcccctcccctactacaacaggggtcggactccatgtctgagcggggaggagggtcatggagagagaactgtctggcagccctgatgcggtagaggggcatcctctggcctttgtgagctgtagggatgcagagtctgatgccagcgtcttgctgggggagtggcctagaaggggatcctaacagggacttctggagcagacagagcctgccagtgcctgtggagtcagccagccgagggtctgcctcctcagctgccccaggggggcctccctcctgaggctcaagctcctggcgtctttcttcctgttgctggattctcacctccatgggcctgtctcttctgcctctgccttctggacaccgtttcctctccgctgcttcagagagctttgcctcgcctccgcctgcgctcccctccagggtccttctgctggctgcggactcggcccaccactgctgtctgacgcttttcttcctgccccctctgaggcctggctctgttttagggagatcactgggcccaggcctcagccccagttctacctggcttgctgtcaccgctctaggggtgggggacgtcccaggggatccccaggagaaggagagccctgtagggggctgtgcagatgtgggtgtgccacagggagggtggcccctagccatgtatccattggctgttttggcttcagattcaaccaagatctgcctgactaaaagaagccacctcagcgcagtggaacggggcccagggggaggcaggagaggagggttccggtcccatgtcaccttctcatttgctgtgtgactttggcccactcacattctctttgggcctcagttttatcatttatacaaggagggcttttctagctgtaacaatctgtgaggattgagaggataggctggtgctttgaagaaaggccttgtaagtgacaagacagtcccctgggaagaaagagaaaggaaatgggctattgccaaaggacaggtggcgttagatggctgtgagggtgacctggtgagggaagggttggaatgagctgctgcaggaggccaagggatgcctgggctgggctgggctgggctggcttaggctcaggattgcctggggacagtaggagcatggcaggagctggggcaggtgcatagcagtgcagtgggaagggacagaggagatcttagaattttgaggaaaatctgggacttgagacctggattctaacagaccaactgcatgtgtgtctgtaggtctcagtttccacattcatacagtgagggtgttaagtcaggtagctggagacttcccatcgcctctgacacttttggaggtgatatgatacagcccccgaccaaaccaggctttgtggggggtgagagaatacagacacaagtggcaggattcagatggaagcttcgcaaggctgggggccgaggaccacccacttctctttcccagccctagttctgggttccccagtggggcaaggggtggtggaggcagtgcccatgctgggctgagcctgcagtttttgtgagctctgggcttgtctccatgggaacaggggtgccttcttagtgagctcatttcacacagatcgagggggtatgcgtgggggagttgtgagtgagctcagctccttcaggcctggcctctcccagaacagagtgaagcccctgccctggacccctgctcccttctacccttgagggccaccaatggaagagcccgcccttcattctgcagctcctgcggccaggctgagctctgcccccaactttgttttctctcatgttctcaatacactctgcctcaaatccgaaaaaaaaa

SEQ ID NO: 1149 - DNA, 335 bp, HOMO SAPIENS
gaagttgttcctgattacagctctcttatctgttctccctttgatttgctgactgatggatgcagtccatttaagaaatgagcatagcatattggaaagagcactagacttagattctagtcccagttctgtcacttaacagctatgtgttgaggtgaggtgagggaagagtacttggatctctggatctcttttaactttaatattctcctctataagggtagaagatgaactagaggatcacaacagtaccatttagttttccgttcagtggcaattttgacatacttttttgagcatacataatctcagaatcctatgcctcaaaactttga

SEQ ID NO: 1150 - DNA, 6668 bp, HOMO SAPIENS; identical to SEQ ID NO: 317

SEQ ID NO: 1151 - DNA, 7056 bp, HOMO SAPIENS
cacacccacggcagacacgcacgcacccgggcgccgaagggaaagccgcgtctcgccctcccgccccgccgtcggtcctgtctcagtccctcagcagagcgggaaagcggaggccggagccgtgacctctgaccccgtggttatgcggagccgccgcattccttagcgatcgcggggcagccgccgctgccgccgtgggcgactgacgcagcgcgggcgcgtggagccgccgccgcccctcccccaccgccgctctcgcgccagccggtccccgcgtgcccgccccttctccccggccgcacccgagacctcgcgcgccgccgctgccacgcgccccccccaccgccgccgccgccccagccccgcgccaccgccccagcccgcccagcccggaggtcccgcgtggagctgccgccgccgccggggagaaggatgaaggacaaacagaagaagaagaaggagcgcacgtgggccgaggccgcgcgcctggtattagaaaactactcggatgctccaatgacaccaaaacagattctgcaggtcatagaggcagaaggactaaaggaaatgagaagtgggacttcccctctcgcatgcctcaatgctatgctacattccaattcaagaggaggagaggggttgttttataaactgcctggccgaatcagccttttcacgctcaagaaggatgccctgcagtggtctcgccatccagctacagtggagggagaggagccagaggacacggctgatgtggagagctgtgggtctaatgaagccagcactgtgagtggtgaaaacgatgtatctcttgatgaaacatcttcgaacgcatcctgttctacagaatctcagagtcgacctctttccaatcccagggacagctacagagcttcctcacaggcgaacaaacaaaagaaaaagactggggtgatgctgcctcgagttgtcctgactcctctgaaggtaaacggggcccacgtggaatctgcatcagggttctcgggctgccacgccgatggcgagagcggcagcccgtccagcagcagcagcggctctctggccctgggcagcgctgctattcgtggccaggccgaggtcacccaggaccctgccccgctcctgagaggcttccggaagccagccacaggtcaaatgaagcgcaacagaggggaagaaatagattttgagacacctgggtccattcttgtcaacaccaacctccgtgccctgatcaactctcggaccttccatgccttaccatcacacttccagcagcagctcctcttcctcctgcctgaagtagacagacaggtggggacggatggcctgttgcgtctcagcagcagtgcactaaataacgagttttttacccatgcggctcagagctggcgggagcgcctggctgatggtgaatttactcatgagatgcaagtcaggatacgacaggaaatggagaaggaaaagaaggtggaacaatggaaagaaaagttctttgaagactactatggacagaagctgggtttgaccaaagaagagtcattgcagcagaacgtgggccaggaggaggctgaaatcaaaagtggcttgtgtgtcccaggagaatcagtgcgtatacagcgtggtccagccacccgacagcgagatgggcattttaagaaacgctctcggccagatctccgaaccagagccagaaggaatctgtacaaaaaacaggagtcagaacaagcaggggttgctaaggatgcaaaatctgtggcctcagatgttcccctctacaaggatggggaggctaagactgacccagcagggctgagcagtccccatctgccaggcacatcctctgcagcacccgacctggagggtcccgaattcccagttgagtctgtggcttctcggatccaggctgagccagacaacttggcacgtgcctctgcatctccagacagaattcctagcctgcctcaggaaactgtggatcaggaacccaaggatcagaagaggaaatcctttgagcaggcggcctctgcatcctttcccgaaaagaagccccggcttgaagatcgtcagtcctttcgtaacacaattgaaagtgttcacaccgaaaagccacagcccactaaagaggagcccaaagtcccgcccatccggattcaactttcacgtatcaaaccaccctgggtggttaaaggtcagcccacttaccagatatgcccccggatcatccccaccacggagtcctcctgccggggttggactggcgccaggaccctcgcagacattaaagcccgtgctctgcaggtccgaggggcgagaggtcaccactgccatagagaggcggccaccactgccatcggaggggggggtggcccgggtggaggtggcggcggggccaccgatgagggaggtggcagaggcagcagcagtggtgatggtggtgaggcctgtggccaccctgagcccaggggaggcccgagcacccctggaaagtgtacgtcagatctacagcgaacacaactactgccgccttatcctctaaatggggagcatacccaggccggaactgccatgtccagagctaggagagaggacctgccttctctgagaaaggaggaaagctgcctactacagagggctacagttggactcacagatgggctaggagatgcctcccaactccccgttgctcccactggggaccagccatgccaggccttgcccctactgtcctcccaaacctcagtagctgagagattagtggagcagcctcagttgcatccggatgttagaactgaatgtgagtctggcaccacttcctgggaaagtgatgatgaggagcaaggacccaccgttcctgcagacaatggtcccattccgtctctagtgggagatgatacattagagaaaggaactggccaagctcttgacagtcatcccactatgaaggatcctgtaaatgtgacccccagttccacacctgaatcctcaccgactgattgcctgcagaacagagcatttgatgacgaattagggcttggtggctcatgccctcctatgagggaaagtgatactagacaagaaaacttgaaaaccaaggctctcgtttctaacagttctttgcattggatacccatcccatcgaatgatgaggtagtgaaacagcccaaaccagaatccagagaacacataccatctgttgagccccaggttggagaggagtgggagaaagctgctcccacccctcctgcattgcctggggatttgacagctgaggagggtctagatcctcttgacagccttacttcactctggactgtgccatctcgaggaggcagtgacagcaatggcagttactgtcaacaggtggacattgaaaagctgaaaatcaacggagactctgaagcactgagtcctcacggtgagtccacggatacagcctctgactttgaaggtcacctcacggaggacagcagtgaggctgacactagagaagctgcagtgacaaagggatcttcggtggacaaggatgagaaacccaattggaaccaatctgccccactgtccaaggtgaatggtgacatgcgtctggttacaaggacagatgggatggttgctcctcagagctgggtgtctcgagtatgtgcggtccgccaaaagatcccagattccctactgctggccagtactgagtaccagccaagagccgtgtgcctgtccatgcctgggtcctcagtggaggccactaacccacttgtgatgcagttgctgcagggtagcttgcccctagagaaggttcttccaccagcccacgatgacagcatgtcagaatccccacaagtaccacttacaaaagaccagagccatggctcgctacgcatgggatctttacatggtcttggaaaaaacagtggcatggttgatggaagcagccccagttctttaagggctttgaaggagcctcttctgccagatagctgtgaaacaggcactggtcttgccaggattgaggccacccaggctcctggagcaccccaaaagaattgcaaggcagtcccaagttttgactccctccatccagtgacaaatcccattacatcctctaggaaactggaagaaatggattccaaagagcagttctcttcctttagttgtgaagatcagaaggaagtccgtgctatgtcacaggacagtaattcaaatgctgctccaggaaagagcccaggagatcttactacctcgagaacacctcgtttctcatctccaaatgtgatctcctttggtccagagcagacaggtcgggccctgggtgatcagagcaatgttacaggccaagggaagaagctttttggctctgggaatgtggctgcaacccttcagcgccccaggcctgcggacccgatgcctcttcctgctgagatccctccagtttttcccagtgggaagttgggaccaagcacaaactccatgtctggtggggtacagactccaagggaagactgggctccaaagccacatgcctttgttggcagcgtcaagaatgagaagacttttgtggggggtcctcttaaggcaaatgccgagaacaggaaagctactgggcatagtcccctggaactggtgggtcacttggaagggatgccctttgtcatggacttgcccttctggaaattaccccgagagccagggaaggggctcagtgagcctctggagccttcttctctcccctcccaactcagcatcaagcaggcattttatgggaagctttctaaactccaactgagttccaccagctttaattattcctctagctctcccacctttcccaaaggccttgctggaagtgtggtgcagctgagccacaaagcaaactttggtgcgagccacagtgcatcactttccttgcaaatgttcactgacagcagcacggtggaaagcatctcgctccagtgtgcgtgcagcctgaaagccatgatcatgtgccaaggctgcggtgcgttctgtcacgatgactgtattggaccctcaaagctctgtgtattgtgccttgtggtgagataataaattatggccatgggaaacattgtatatttagtgtgtgtattttgataatgattgatcttaaatctgtatacagaatatcattgatataatactctttaggcaggagcactcttgccttcccccaaaatttacactgctaaagccctctgtcacttggcgacccttctggtcttgctggaggggtttcctgggtataacccattgggctgcccaaggccagccagcctgagctctcctgcaagacagagcctgatgtggcacggagtggggttgcggggggtggggggactgcctgactcccagagggacttgaaactgaagcaagaaggttgcattctccaccaagggagttaacctacctgaactaagtagaaatgccagtcttccactaccccctccctgccatcttttcttctgctactttggggagttgatggccaggaaagaagccagcacagggttaaagtaactcctggcattgcccaccagggggctggtgcacctgctgacctcagggtcacagttgagtcatttgccagttgacggagcaagtttgaccttggttctgttgctgaagcaaatttggaacttttctgtctcagtgtgatccactaacccacaggatcatttggaaccttgaatagctctgcttggacaatggggttggggaatagggttgtctttcctatgaaaatgccatctgtagaccttgtgagtcagccgtccagatgtttgcaggtgaattcctctgcttgacatcctccctgtcactttggaccctatgggagtgggcatctccacgcacctgtgtatgtgaaagtcattttacatttcaaagcagtgtgtgtttcttatttttatatttttaactctttattcttggatgtataaagtgaactttttggcttctgtaagtatgctctatgcacctctaatgttttatcatgtatttatatgttgtacacagtactggctgattctgtaaatggatgtattgtacagagaacatgaacgtctcttcctaattttacatcttcagcatcattgcattaaagtggtgtaatctccttctctacatctgttgtcagagccactgagtgctgtgctgctcgacgtgagggtgaaatgattgacttgtgacctgccaggttgcccgatgccctgttgggtcaccggctggacctgctgcagcctgcagagccacagtcagcctgcccacatgccaccgagcaaacgcatcttgcttttcacatctctcctcctacagccttaatggctgcttgctgccatatgtgacaaatcaccaccaccagtgttaagtgcttctggattcatgggtgagttccctgggcagcccccaggaaggccttccagatctggctccagggtcaccacctgtcacagcaatacctgggaccatgctctcctgggactgtgaggctccttttgacgtacttttgacatcaggcaggtttgggaagaaacaaagccatgcctgctcctgcctctctcccaacatgtttccagcaagtagatgcccctgtgtgtgttttcccttgccttgtttcctgccttatatcttgtatttcgacttattacagagttgagggttcttgcttaatttagatcaagtataaaatttgtatgacttcaagtctcattttatctgaaaggtttttttctcatttaatctgatgtggcattttcgtcatctgaagcatgagtgacaagttgggaatgatgtggtgatttagaatgcagtattggccaagtccaagttgtcaacttaagcgtctgtttaccaaagaccgggaacaggggcccaaacatgtccagtcctcttcttccctctgctggaacctttggggacactcaagggtacagtttgacactgatctggtccatgaggctgcccagagaaagcactgcttctgtatgtctcttgtggtattggaacaataaacccgtacaacctgcaaaaaaaaaaaaaaaaaa

SEQ ID NO: 1152 - DNA, 11525 bp, HOMO SAPIENS
cagcccgccaagacccagacctgggaggggaggcccctcctgttagcccagagggaaagaaagaactggggcgatccgggacctggtggccttagtctttcaggtggaacggtgtgcgacatgggaaagaaaaccaagcggacagctgacagttcttcttcagaggatgaggaggagtatgttgtggagaaggtgctagacaggcgcgtggttaagggacaagtggaatatctactgaagtggaaaggcttttctgaggagcacaatacttgggaacctgagaaaaacttggattgccctgagctaatttctgaatttatgaaaaagtataagaagatgaaggagggtgaaaataataaacccagggagaagtcagaaagtaacaagaggaaatccaatttctcaaacagtgccgatgacatcaaatctaaaaaaaagagagagcagagcaatgatatcgctcggggctttgagagaggactggaaccagaaaagatcattggggcaacagattcctgtggtgatttaatgttcctaatgaaatggaaagacacagatgaagctgacctggttcttgcaaaagaagctaatgtgaaatgtccacaaattgtgatagcattttatgaagagagactgacatggcatgcatatcctgaggatgcggaaaacaaagagaaagaaacagcaaagagctaaaggaggggatggtctctgtcatttctctttgtacataatacattcacctccctgcctcctctcctttctacccacccctttctatcctaaacacatccataaaaaatgtgcttatcactgtgctccacaggagaaatgttggtattggttctcttgtaacataactgatggtctgattaatgataagtgtctctctgtgaagaccaggcatttacatactgagtgtaatacccacaatttttttttcctttgccctgatctcttccttctgcttccctgtgacctcaagatgagtttcaactttttaatcaccttagagtcttgatcttttcagggttggtcgctttttaggttgggggattttgttacaatgatgttgaattttggtttcttgctttggttcttagaacatgttgctgactagctggcctttgttctgacatgttgagatggaaaggatgttgcccatctgttaaaaagccaatagcaactgcctacctgttggggctttcccaaccttgttcagctctacccaggagaatacagggtttctggtgtggtcttctgggccaccctctgttgttcatcctcactcatcctcccagaattactccatcctttggaagatttgaaattttacactgaaatctgtcaagacactctttttagccccaggactttcggtattgcttttagcactccccacttctgcttctgtaaagtgatatcaatttgtgataaaatgacaagattattaactgtgcagatttgtagctatagtacatgaggatgatggggtagggtacaattgtctttattatcatatatggtatgtatgtatgatttctttccattcctcatatttagactgtatatttatgtaggtgtgagtgattgcctggtgcttgcttgtgccaaggtgctaggcaccctccaaccctgccaacttttgtggcctcccaaagcattcctgttaccaaagaggcttcaaacctgaccctcacttctcagtggacccgagtttcccttccatgccattattttcagtggggaagttttagaggtgagctgttggccacaatatcaattttaagtgttcatagcagttatgtctcctgcattcttggctcctggatttaccaccaagagtccccaaaatattaatgctcttccctttttctaccctcaaacttatagttgtatcttattttttaaaatgaattttcatggccaggcacagtggctaccgcctgtaatcccagcactttgggaggctgaggcaggagaattgcttgaagccagaagtttgagaccagcctgggcaatgtagtgagaccccctgtctctaaaaaatataaataaaaataaaggcatgttcctgaaagactgtcaccttggaaagtgacaggccctggcattagcatgttgacacacccttttcttcttactcagcaaaatacttcgttttggtttcttcttgtgttgctattgagaaatttgtctgatcatatccttctgcctttgtcccccaagaaatgccctactttatccttttctttttgtagttgaggagggctagagaatcacaattaaaagtaaggaaatagcagggttttgaggatccttgtcccagccccaaagctgaggaaataagaataaatgcttaatatagccttaattctagagcgcaccagccatgaggctgcttttcttgttgtttttgatttttaaaacatacagctgtctggccaggagcatctaccatttctagattattcagagtaatgaggggaatggatggattgctccagtccacagatgagccacataatatgcaaatcatatacccattcatagcatttgttaacattgcttccctgctcagctgctgattgaattctgtgtgcttatataaattatgtcaaaaattatactgcataattgaggtgacagctgttgctgcagtgacatgacagactggaacaatgaagcttttggtttaagtcagccaggaaaatccttctgaatggtaatgtgattgggcaagagctcataaaccatacctcaagtgggtgggagttttatctctatattccttctctctctgaaggaattaaaggcctagatcaagtgctggataattgacaattgcttgtacttaatctgatcggtatctaaaagaaggaaaggatggtcaggaaacatttatcataaatgtagccaaggatatcaattagggtagacaagaataggacaaaaataggccagagctcctgaggaggtgatatgggtctcttgatttgcagaaaatgacagcctatccaagtggcccagtgtatgcctcccagtagcagtgggcatgtaaactgcagcgaccttatttttaaaaccaaaaacctagtatgtggacaaagaacatgacaatatttggtactgagattggttctgagaaacctggggcatgtggctgctgtggttataggtaatatttaagacattcataaaaatctgatattcttttaccgaaataaccccagtatcatctactacttaccatctgttaatagactttactctgtcttttttgtcttcggtttattgtactgagtgccgccaaaacaacttttgttctcttcctgcctacctgcagctggttctataggaatgtagggagccagaggccagtattgatttcagcccttagcacaaaggaaatcagatgcctgcttccagcatttgttagtgttgagtagatgttcttgccctagaagaattacagcctcaaacagaaacctgtttcatggagctttctcccctcagaagagttaatagttaagagctaagcactcttaaacacctaagtctcaaatgctaaaaatttatttttcttgtgtttagtcctctttcaagacatctttctaagcctttcagtaatcaacattaaaagatctccctttcttcagagttatagcacagctttgcccagtagaggctaccaaggacagcttagcagccctttgattgctgggctgggcagatggccttcaagttaagatcaaatgccgggaaaatcagcctacatgggagcacccattttaaacctggagagaaccatgatgttttcttcttcaaataacaatctagttttttttcccccagtactaaaattgtattgtctttcagacaatataatttttatttaaaattggaacatactatcttcatgctttctaagctaaatcttcatttagatttcactcctcagtagatcccagagaagaagctatataggatccagattcaaatttaacagtgtcttctacttttttagttatgttttctatcaactcctgctgccttttcaaatacggatatttttcaggagactcttctacttgtccactgactgtattttttcctttttgatccgtagccctggttaaatggctgacatccttccgtggatgattcttggaggtagtctcagaattccaaagtgattgtctgtcttcttcttgtcttgatcctaatgcagacattcacctctattatttatttattttttttagacagagtctcgctctgtcaccaggctggagtgcagtggcacaatcttggcttactgtaccctccacctcctgggttcaagcgattctcctgcctcagcctctcgagtagctgggactacaggtgtgtgccaccatgcccagctaatttttgtatttttggtagagatggggttttaccatgtttgccaggatggtctcgatttcctgaccttgtgatctgcccaccttggcctcccaaagtgctggaattacaggcatgagccaccgtgcctggccacctctattaaatttttgtggacaaaaataaaattgtcattatttgtttgctctcatggagcactttcagtaatacaattttttttaaattccagttgccctctttgttgctctgtcctctgtaatacctgactttgctaaagacttgaggggtggtttcagaggagggtcaggtgatgggaaggcaggatgagaaaagccctggacttgcatgtttgagaaggcttccaaccacatcttcactcagactcttggaattcctgtccccaaaacaagcttctgttttttgctcacaatgctatatttctaaatttttcctgaattactgagaagcagtcattagctttgttaagtttggtttggggacattgttggtatcaaaaatcgaagtcttattcatttgatgtaggccatgaatcatcaataactggttgctggaaagcttgactaccatccactggggtgctattttgagaaggatttttgggtatctttatagtctgcaattagttgatgattgctttctagtttatcaactgcatttatatttgcttttctgttcatggaaaatcctttatttgctggggttttttgtttgtttgtttgtttttcccacttacagcaagtaaaagtggtctgaggttatccttgtttttcttcgcggtttgccatgtgtgaaagtagatttcctgctattgatatattctcattatagacagaatagtggagaacagtgttgccatggacaaaatccagttttggtccactctggggagcatttggacctgtggtgcttctaacaattaaaagtctagatggtccttgactgtcccccagccatactgcatactactttgtgcattctactttgtgtcattaatgaaagattggttctgtccctgtaacttaggcatttattattcttaactcttcattcctgttctgtagccacccagcagtccattttccctatgttcaggccaaaccacagggcattggggaaggtttttgggattttcttattgagattttgttgaatctgtagtttaccccagctttcctaaggtacagtgaggggttggagggatctgtgtttggcccggggagcaattgtctctaccttaaggttcagttttgagggcataaaatactactttgcaatgtcatgagaacaccgttagatctgaaatgtggaaatggtttctcacaatttaaaggaaaaacccactttgcacccatgatcccatcattttggttgagattttagaataaaaaatatagtgttgagatccgtacttttgtaatcagaccaccaagcatgcctgtggcaaggcagagaggaaaggtctggagccagtgtattgcagtttcatgctacctttacctgctaatcataaaaattatgttttcaaaagtagatgatactagccttacacccaaaaacatgttctgaattagatgccccctcacccaatttttattaagctttctaaattccagccacattgctgtacatcaacattggtttcattcaacagacatttttttggcctgaagatacaaggttcagaaagaggccatccctgccctcaaataactttcatactggtgtatgatgaactgaccattaatagtttaagtgcttacaagctatgtttctgttcaaaaaaaaaatagtttggtataataaatgctataaaccaatacacatttctgacttgggggcagagacagactggctgatgttgtatagtttgtagccctggagtaagaagttgacattaatttcggcctatatgtggaaaagacctataacattgggtgaactgagccagctggccatagaacacaagaacatattccaggaaataaatatagctggagggttggaaatgctgttattactgagagagaaaacaggtgagttgggattgagaactcctgattttcatccctggtttagattcttggccaaagtagtggtagagttaatctttgcttgtggaaagcattaactatgttgcagattcagttgtgttacattattgtgggttctataacaacatattcctcatggacactttaccagagttgctcacacctttttcaatttctcatcccttttggaggaatgaacatgagacttaactgcctttaagcctaaaacggacatgctttccaatgacaagagattttctaaagagaagtcttggagcacatctgttaatacctgagcatctactctgagcagtgcagttttattcaatactggagagagggtgatttctttttttttgagacggagtcttgctctgtctcccaggctggagtgcagtggcgcaatctcggctcactgcaagctccacctcccgggttcacgccattctcctgcctcagcctcccgaggagctgggactacaggcgccggccaccacgcccggctaattttttgtatttttagtagagacggggtttcaccttgttagccaggatggtctcaatctcctgacctcatgatccacccacctcggcctcccagagtgctgggattacaggcgtgagccaccgccgggccgagagggtgatttctaagcagagaattgtatcagttatgtggaaacctttgccagaaatacatataccttgtatattaaatctgagtctcagatttaatcatcgaagcgtagctgggttaagaaacagtctgatcgtaaggatgttgtcgattctgacccatggatgaccacaagaaaaagatatttatttctgcctggataattgagagttgactaactttggaagtcagaattcccaggaattagagtaactgctctggaaagttaaagtgtgaagttttttagatagtttcataaaaacaattctggtttctttttgcttgtgctgactttcttggattttaatctacctcatcttgtctttttagagttacttcaacttgtcactttaacattgtgcttgactttggttgttttctaagatggaatttttcctgttcattgacagcttgttctcttgccttttcattctgatcctcatttcatctaacatcatctcatattgctcctctgtcaagagaaatgttttaaaatagtttaaagtcttgttttatgggaagaaagtgatcctccaatgctatttgtttctgaggtcagtaagagaaggagttaaaacaaggcagtggggaagggaatgaatcctgcactggaggcaaaagctgacaaggaaagagccattaattaagacaatttcaaagtcaactgattgtgatcattaatgtcacaatagatcaaaacctaattatcacagcctaggtaagagccatcagtattaatcggaaaatctaataggaaactattatcaagaaattaggccaaattgaatgcagtgaactttttatcttggcattctctatttttttgtgatgtcccctggcattggcaggtgtgaccctaacagtcgattcaaggccaagtggtcagtttgtcagccttttttaagggatttctttttatttttaggaattccaaacagagttaacctaaactgtcattgccaaaagatcagtcttaaactttcttagcacctgtacctgtttaatgtgatcagctatcagtgaggaaaaaaaaaaaaatctatttaggtcttggaatggttcctgtacctagagtatccatattgaaccttttttttttttttttttttttttttttgagatggaaacttgctcttttgcccaggctggagtgcagtggcgtgatcttggctcactgcaacctccgcctcccgggttcaagcagttctctgcctcagcctcctgagcagctgggattataggcgcctgccaccatgcccggctaatttttgtatttttagtagagacagggttcaccatcttggccgtgctggtcttgaactcctgaccttgtgatccgcctgcctcggccactcaaagtgctgggattgcaggcgtgagccagcacccggccacagtatctttattacagctcactgcagcctcaatctcctgggctcaaatgatcctcctgcctcagcctcccaagcagctgggactacaggcgcacaccacggtgtctggctaattttattatttaaaaaatgttttgtagagacagtctccctgtgttgcccaggctggtctccaactcgtgagctcaagtgatccacgtgcctcagcctcccaaagtgctgggattacaagcataagccaccgcacccggcccctagtgaacattttactgtatgtgttgataaatcatcttttgagtttctgttgtatgtggggacttcctacactggctgctgtgaagaggtatggaagaaaggagaggctttctgcctagaaattctttgagaacacctgaaaagacagtttaatcatgtcacaacactcttaaggctcaagtcagtgttctggtttccggtagctttaggattggattctaaacgagggctggtggtgagtttggtgtttgtctcgtgtcaccctcacccctcacctcctcagtttaggataagagacataatgatttctaccagaatccaaagtaaatccaaagggggagaaaagacataactgttttttcttctaccttttttttgttaaagagttacatctctcacaggaggaaagaattcaagagtctatatgattagttacagagaatattttcatcccctctccctgaatagaaaagcaggggtcaccatttgtatccttacccttgaggtgtttttgaagatgctgtaactcttgaagttgagctgaggcagaaaggttggaaaaatgcagccctctgggtattgtggggagggatgtgatgtagtaagagggtgttttgtggtgctaggattcccacgccaccaacttgcagctttataagagcgctaccaagaaccaccactggggaaaaggttcttattcattgtttctgttggaatgtgatcttgctttctggattttaggaattcaggttactcagtataaaactctgagaaatcagtgtgacttagtccttcacctcctaagataaagtgaatatttctttacaaaataattcatgtccttaatgttaaagatgtaattttattttcaaaacatctataacatgactttcagaagcagttcatttttccaagattcctcacattatactagataaataataggccctcagttaatacccttcagttattgaattaatctagtttgtggaatgaggtgtatcctgccaacttccctctgctcccaagtacactctgagaggtaaaatgctctgggaaatggaacaagaatcgagtggatgctgactctgtgtgcccacctcctcaactgattgataatggttgaccttgggcaagtcacttctttcaatgcctcagttccccatctgtcaaatggggttaataatactgacctacctcacaggggtgttgttgtgaggcattgtaaatcaaagttaatagaatacttcagggtcctctgtggaggatgtcttgagccagagtttaagcctgacacacaggctttggtcctcactgagctgtctccaagactggaactacttagtgactcggcaaattttctgccccccacccctcatcaaagctgctagttcagatgttgacagtgttttcatgaatgttggaatcttactagtccagacttacttaggatgttgttggggaaggcacttgggattttctgtgtcttgcattcacagagggaggccatttcagattcaagagcattggattagggaatcgtgaggcagggatgctactgcgtatttctctctgcaggttggggattaaagttcctttccccatgggtttgaagcagactcagactgtctcaggatcaaagcaaccctcaatggttttgatttatgtcattgcttaccactccccaaccaatcccaggacagctgggtcactgtacccctttgtggtatctgtacctgggcctctccttcctcatagggaccagctgattgaataaatgtgaccaccttatttccaccccccacccccaaaagctacattggaattatttttcctagaaatgtgtataacactcagaattgggcattgatccttaaagcttcatcccattcaccgtattcaacatctgtcatctcttagtgtctgcagtctgaacctaaccttgaccttttttccctctggtttgagaaaactttggacactatttctacttggccaggtgtgggctcaagagccttactctttccatctcagtttaggggcgcagccagctcctcttcccaatagggctctttctgctttccctctccttggccctagatttgtaatccatgaaaaagcacaaggtcctggctccttgcggtcacattctggttctctgtgttttgtggactctgctctcactgttcacccagcactagcagtaccagatggttctgtggagtcctggggaatggagagagcacagtctgactccctgccaagtagccaggagttgacttgcccatggtccgctggctttcccaccacttcctacaggatgggatctaagagactcaagagctgggtttctttcagcactctgtactgtcccaaatagcaaacaaatcactttgtagccagatttctgaatggaaatgagaaattgaattctccatggacttttaggtttatgggggagttttagctgtgtttcttggttttatttcagccaaacatgtctgcttttgattttttttttaaagtataagtggtctatatatatgttcaccttttaaatgtaaatgtttaaaaagtaagcatttatgtgtttccataactgacatctgatgcagacctcattctctccccctcttctaccctcctcttttcccccttttcatactcttgtattggttctaataaatggttgcttttcaaaaaaaaaaaaaaaaaaaaaaa

SEQ ID NO: 1153 - DNA, 1785 bp, HOMO SAPIENS
gagagggcgaaggtaggctggcagatacgttcgtcagcttgctcctttctgcccgtggacgccgccgaagaagcatcgttaaagtctctcttcaccctgccgtcatgtctaagtcagagtctcctaaagagcccgaacagctgaggaagctcttcattggagggttgagctttgaaacaactgatgagagcctgaggagccattttgagcaatggggaacgctcacggactgtgtggtaatgagagatccaaacaccaagcgctccaggggctttgggtttgtcacatatgccactgtggaggaggtggatgcagctatgaatgcaaggccacacaaggtggatggaagagttgtggaaccaaagagagctgtctccagagaagattctcaaagaccaggtgcccacttaactgtgaaaaagatatttgttggtggcattaaagaagacactgaagaacatcacctaagagattattttgaacagtatggaaaaattgaagtgattgaaatcatgactgaccgaggcagtggcaagaaaaggggctttgcctttgtaacctttgacgaccatgactccgtggataagattgtcattcagaaataccatactgtgaatggccacaactgtgaagttagaaaagccctgtcaaagcaagagatggctagtgcttcatccagccaaagaggtcgaagtggttctggaaactttggtggtggtcgtggaggtggtttcggtgggaatgacaacttcggtcgtggaggaaacttcagtggtcgtggtggctttggtggcagccgtggtggtggtggatatggtggcagtggggatggctataatggatttggtaatgatggaagcaattttggaggtggtggaagctacaatgattttgggaattacaacaatcagtcttcaaattttggacccatgaagggaggaaattttggaggcagaagctctggcccctatggcggtggaggccaatactttgcaaaaccacgaaaccaaggtggctatggcggttccagcagcagcagtagctatggcagtggcagaagattttaattaggaaacaaagcttagcaggagaggagagccagagaagtgacagggaagctacaggttacaacagatttgtgaactcagccaagcacagtggtggcagggcctagctgctacaaagaagacatgttttagacaaatactcatgtgtatgggcaaaaaactcgaggactgtatttgtgactaattgtataacaggttattttagtttctgttctgtggaaagtgtaaagcattccaacaaagggttttaatgtagatttttttttttgcaccccatgctgttgattgctaaatgtaacagtctgatcgtgacgctgaataaatgtcttttttttaatgtgctgtgtaaagttagtctactcttaagccatcttggtaaatttccccaacagtgtgaagttagaattccttcagggtgatgccaggttctatttggaatttatatacaacctgcttgggtggagaagccattgtcttcggaaaccttggtgtagttgaactgatagttactgttgtgacctgaagttcaccattaaaagggattacccaagcaaaatcatggaatggttataaaagtgattgttggcacatcctatgcaatatatctaaattgaataatggtaccagataaaattatagatgggaatgaagcttgtgtatccattatcatgtgtaatcaataaacgatttaattctcttgaaaaaaaaaaaaaaaaaa

SEQ ID NO: 1154 - DNA, 1342 bp, HOMO SAPIENS
gaggaagtgacgacaggcgtgcccttgacaggcagggagggctaggctgtgcatccctccgctcgcattgcagggagatggctcagcgacttcttctgaggaggttcctggcctctgtcatctccaggaagccctctcagggtcagtggccacccctcacttccagagccctgcagaccccacaatgcagtcctggtggcctgactgtaacacccaacccagcccggacaatatacaccacgaggatctccttgacaacctttaatatccaggatggacctgactttcaagaccgagtggtcaacagtgagacaccagtggttgtggatttccacgcacagtggtgtggaccctgcaagatcctggggccgaggttagagaagatggtggccaagcagcacgggaaggtggtgatggccaaggtggatattgatgaccacacagacctcgccattgagtatgaggtgtcagcggtgcccactgtgctggccatgaagaatggggacgtggtggacaagtttgtgggcatcaaggatgaggatcagttggaggccttcctgaagaagctgattggctgacaagcagggatgagtcctggttcccttgcccgcgtgggaccccaatagaactcagcccttccatgccagcccttcctgctgcctccctcctgtctggctcctggggcccatgcttagagcccaggctccagccctgagtgcttccgagctggcggactgcccaggggccatcagaggatggtggtgctgctgctgatccggggaccgctgtcttccctcccatacgcctttcatccctccttctagggcctatggcagttctcccaggatgtgtggcgagagcctgggccagcccacagcgttcctagtcaggcagccacaccttggtcctcatcttggtcccttccaatctgaaacctcgtgcctggctcgtctgccacctacatttctctttccagctgctgttttgtaaaaagaaaaagaaaaaagaagcccaaactagtgagagtaatatctaattatctcattttttgtaggtctgtgataaagaacttagtcatcccttccacctcctactgtgaagaacagaccctgggtcccacactgaaatcccctctagtcacccattcccaccccccagggagctgcctcccaggcagggggtgcagaaaatgattgatgggctggggaaccctggagagcctcgactccggaagtctcaaggtgcctcctcctctccttagctggcccgttggttttctgagcagggggctgaactgtgaacaagtcagacaaataaagcaagggtctgcaccatcaaaaaa

SEQ ID NO: 1155 - DNA, 4759 bp, HOMO SAPIENS
gccccgcggctgaggagcgggaggccgtccgggcagcgcggccggcggcgagaggggccccgccgctctccggaggcagaagttgtggatcggccggcgggggcgagcgggcccgggggccggggccgcgctgcccgggccgcgaggacgaggcggcgccgccgggctgtggaggcagcagcccagacgcggcacagagagggcctgggagcttgctgcagcttcagacagggagccaggatgggaaccacggactgacctgacctgcgtcctcggggccactgcactgggtgattcacgtgtgcccaggccctgaggtgggccggacctgggagtggcagccacacccactcgcccgggtctatggccacggtcggagagtggtcctgtgtgcgctgcaccttcctgaacccggccggccagcgccagtgctccatctgcgaggctccccggcacaagcccgacctcaaccacatcctgcggctcagcgtggaggagcagaaatggccctgcgcccgctgcaccttccgcaacttcctgggcaaggaggcctgcgaggtgtgcggcttcaccccggagcctgcgcctggggctgccttcctgccagtcctcaacggggtcctccccaagccacccgccatcctgggggagcccaagggcagctgccaggaggaagcaggtccagtgaggactgcggggctggtggccacggagcccgccagggggcagtgcgaggacaaggacgaggaggagaaggaggagcaggaggaggaggagggagcggcggagcccagagggggctgggcgtgtccgcgttgcacgctgcacaacacgcccgtggccagctcctgctccgtctgcgggggcccacgcaggctctcgctgccacggatccctcctgaggccctggtggtcccggaagtggtggccccggccggcttccacgtcgtgcctgccgcgcctccacctggcctccccggggaaggtgccgaggccaaccccccagccaccagccagggcccagctgccgaaccagagccgcccagggtcccgcccttcagccccttctcgtccaccctgcagaacaaccccgtgccgcgcagccgacgcgaggttcccccccagctgcagccaccggtgcctgaggctgcccagccgtcaccctctgccggctgcaggggagccccccagggctcgggctgggctggggcctcccgcctagcagagttgctgtctggcaagcggctgagtgtgctggaggaagaggccacggagggtggcaccagccgcgtagaggccggcagctccacctcgggcagtgacatcattgacctggccggagacaccgtgcgttacacgcccgccagcccctccagccccgacttcaccacctggtcatgtgccaagtgcacgctcagaaaccccacagtggcccccaggtgctcggcctgcggctgctccaaactgcacggcttccaggagcatggcgagccccccacccactgccccgactgtggggccgacaagcccagcccctgcggcagaagctgcggacgggtgtcctcggcccagaaggccgcccgcgtcctgcccgagcgcccgggccagtgggcctgccctgcctgtaccctgctcaacgcactgcgggccaagcactgcgccgcctgccacacgcctcagctcctggtggcccagcggcggggggccgcgcccctgaggcgcagggagagcatgcacgtggagcagcggcggcagacagacgagggcgaggccaaggcactctgggagaacatcgtggccttctgccgggagaacaatgtgagcttcgtggatgacagcttccctcccgggcccgagtctgtcggcttccccgcgggtgacagcgtgcagcagcgtgtgaggcagtggctgcgaccccaggagatcaactgctccgtcttcagggaccacagggccacgtggtctgtgttccacacactgcggccctcagacatcctgcaggggctgctggggaactgctggttcctgagcgccctggcggtgctggcggagcggccggacctggtggagcgggtgatggtcacgcgcagcctgtgtgcagagggcgcctaccaggtgcggctgtgcaaggacggcacgtggaccacggtgctggtggacgacatgctgccctgtgatgaggccggctgcctcctcttctcacaggcgcagcggaagcagctgtgggtggccctcatcgagaaggcgctggccaagctgcacggctcctactttgcgctccaggcgggccgcgccatcgaaggcctggccacgctcaccggcgccccctgtgagagcctggcgctgcagctcagctccactaacccccgcgaggagcccgttgacactgacctcatctgggccaaaatgctgagttctaaggaggctgggttcctcatgggtgcctcctgtggcgggggcaacatgaaggtggacgattcggcctacgagagcctgggcctgcgcccccggcatgcctactccatcctggatgtccgagatgtccagggcaccaggcttctgcggctccgaaacccgtggggccgtttctcctggaacggcagctggtccgacgagtggccacactggccggggcacctgcgtggcgagctcatgccgcacggcagcagtgagggtgtcttctggatggagtacggcgactttgtcaggtacttcgactccgtggacatctgtaaggtgcactcggactggcaggaggcgcgggtgcagggctgctttcccagctcggccagcgcgcccgtgggggtaacagcgctcacggtgctggagcgggcctcgctggagttcgcgctcttccaggagggcagcaggcgctcggacgccgtggacagccacctgctggacctgtgcatcctggtgttccgggccacgttcggcagcggcggccacctcagcctgggccgcctcctggcccacagtaagcgcgcggtcaagaagttcgtcagctgcgacgtcatgctggagcctggcgagtacgctgtggtgtgctgcgccttcaaccactgggggccgcccctgccgggcacccctgccccccaggcctccagcccctcggcaggggtcccgagagcctccccagagccgccgggccacgtgctggctgtgtacagctcgaggctggtcatggtggagcccgtggaagcccagccgaccacgctggccgacgccatcatcctgctcaccgagagccgcggagagcggcacgagggccgtgagggcatgacctgctactacctgacacacggttgggcggggctcatcgtggtggtggagaaccgacaccccaaggcctacctgcacgtgcagtgtgactgcaccgacagcttcaacgtggtgtccacacgcggcagcctgcgtacccaggatagcgtgccacccctgcacaggcaggtcctggtgatcttgtcccagctagagggcaacgccggcttctctatcacccaccgcctggcacatcgcaaggcagcccaggccttcctcagtgactggacagcctccaaggggacccacagccccccactcacgccagaggtcgccggtctgcatgggccccgaccgctgtgaccaccatgcctggggcaggggctgtgcacagacggaccccccacccccacacgcactttatgagggagaccccgacagaggacgcttgagccagaatctcaggaccccgcccagggagctgccagcccagggctcagcttcccatgggccccccgcccccctccttcccctccctgaaccccacagtccgcctggccaggcctcctggccgccacgcagaatacctcgaaccaggcgggctgtgaaccagccccgctcacctgccagccccaacacccgacgggggccgaggccaggctgcccctccctgtgggctcagggtctcctgcgggctaggcagccaggagctctgtccgcaaaaccaaatctgggtgtcagaggccaagaccctggggtgggatcagggaccacccctcacggggcataaggtcagttttcccccagagcccgggtccctgtcccccacagggcaggcggggtccctggagccctggtgtggagcggcgagtcccggggcggtgcctgtctcagaagaaggggcccttggccagccccccagcgacactatgcaaatcctggagtgcccgccaggatcgaagccatgactgggtgcaggcgggcgccaggcccgctgtgggtgggcaccagttctcagcaccgctcactgctgccgggcacactgggaccagcaggctcctcagccaaccctgtccctcggcccggccctgccagagagggaccccagcacatcgtgggcacgggcagggctcagccgctcccacctccccacagaagcccaggagtgtgtggacgtctgagcccagctttctgcgtgccctcctggcccctcactcccggcagcgggccggcctcgcccccactccccctcctaccccggcaggggcttccggggccttttcacctggagaaacattcccactcccctttggcctccctgtactctgagctgtgaatatttttaaccctgtaaatacggccagctcttgtgacacagagactattttatcaattgtcagtcccgttcctttaccataggattctccacagtggcttccgactcaggctccaatggaccaaataaaagcgttttgttttgtaaaaaaaaaaaaaaaaa

SEQ ID NO: 1156 - DNA, 345 bp, HOMO SAPIENS
ggatctcaagttccataacacacggaccattcagtggtgttgtttctgggcttgattcactgtgggtcacttgaacgatgtcgggggtattgtccacctcccagtgctcagtctgtggcttgtggccagctgttcctctgtggggtctatgttggctgtgttaaggcctgctgcagaaacatctcatttctagcatgtttttctcaagcagtgatcctgtggggtcaagtcttcaatatcaaataatattgataataattatgatagaaataataagaggccaggcaccgtggctcacatttgtaatcccagcactttgggaggcagagttcaggtggatcattt

SEQ ID NO: 1157 - DNA, 6910 bp, HOMO SAPIENS
ctcgtgatgccccgccccgtcgctcctgcgcctgcgccgtgcccaccgaccggcctcgagcgccccggcgggaggtttttctatatgagtggagaagacagctgttaccagggaggtcatacaacatttttttaggatgtctgaagatgaagaaaaagtgaaattacgccgtcttgaaccagctatccagaaattcattaagatagtaatcccaacagacctggaaaggttaagaaagcaccagataaatattgagaagtatcaaaggtgcagaatctgggacaagttgcatgaagagcatatcaatgcaggacgtacagttcagcaactccgatccaatatccgagaaattgagaaactttgtttgaaagtccgaaaggatgacctagtacttctgaagagaatgatagatcctgttaaagaagaagcatcagcagcaacagcagaatttctccaactccatttggaatctgtagaagaacttaagaagcaatttaatgatgaagaaactttgctacagcctcctttgaccagatccatgactgttggtggagcatttcatactactgaagctgaagctagttctcagagtttgactcagatatatgccttacctgaaattcctcaagatcaaaatgctgcagaatcgtgggaaaccttagaagcggacttaattgaacttagccaactggtcactgacttctctctcctagtgaattctcagcaggagaagattgacagcattgcagaccatgtcaacagtgctgctgtgaatgttgaagagggaaccaaaaacttagggaaggctgcaaaatacaagctggcagctctgcctgtggcaggtgcactcatcgggggaatggtagggggtcctattggcctccttgcaggcttcaaagtggcaggaattgcagctgcacttggtggtggggtgttgggcttcacaggtggaaaattgatacaaagaaagaaacagaaaatgatggagaagctcacttccagctgtccagatcttcccagccaaactgacaagaaatgcagttaaaaaccaaatttcagtattattggtgccaacatgtctatcctgaggacctttgctgctgttggacactccgtcaccttttggaacacaagtatatcaagatagtggctactgatgttcaagtgggattgaagtgtgataaatggatatattttgttgtttgctggggtgttcatggagatgttaagagattgaggccctgggctgagggtatataatgtatgtcaggtaaagtttgaagactgccaaggagcagattttctccctggaaatgtgaaaactgaacctataactctgataaggacttgagatgtgtagaaacgttgggttatggaagactagtttcttccataaccctgaattggagaccttaatgctaagtgtagattattgaggtttgttagtgaggaaaagaataagagttcagaagcctttgttatcagatagcgaaatcagggcctagtgaggagcacaggtcgactacataatggagtccattggcgaaccctattgcaatttggtccaactatatcttctggtgaaggaaattaatgatgtaagaaaatgcaagaggctcaacttctcttccaaaaatcttctggcttctgaactcttcctctgcctctctttaaataaataacacagaatttcaagtggtaggagacttattaagccagtcaccaagcttggtctgtcagcctgtcttctaacacctcaaagatcttgtgccctgtgctgtccctcccttgtaattatgaaaagttctttggtttctggggtgaattctacccatgtataatgaggaattctctcataaccttttttgtcttgtctgtcatctctgttcatcccttcctataacctctaggtaaaaagaaaagaaaaaaagaaatttcgagatattttcaacattgttagagtttgggctaaaatgagcaaggagaaaaaaaccaccaagaacatttcctggggcatgttccagttttgaggggtgatatatctgccagatagggggtatctgacccagtcttcttttcagctggtctctggggggagctgagaactcgcttgctacctcacatccttttccccagactttttatctcctatgcatccctttgctttctatagctggtgtttcttccccaaaatggcgttcccatgcttacctttctcacattctagacaatgatggacaaagacgcatgcaagactcagacccggggaatggtgtggtgctaatctcaacacctgacattcacagcaagcatggcccagcccaactgcatgtctatctcaaaccgcagaaaggctttaatactggaaaaaaagaattcaagactacaggcagctcccctctgtaccccaactcatttaaaataggaggaatcactttttgccttacttaacgcttttttctgagcacagggatgggcacctgcaccccagaaggtgtgagctgtctctctgccaggagctaaggttcattaggggattggatggtttatcacttctttctttctgagtttacttttagtaacttttattgatggctacctttcatgtccctgtctaaagagactttctctttcatacgtcttaaatctcatcaatgaaatccagtgaaacagcaccatttcttagtatcattaaataactagaaagtatcaagtattgctctctgctgctttatatcattaacatattaataataccaagaaggaaatactttgaataagtgtcagattctgatccagtattggacacctgtgatattggacacctgtgaggctgggataattacttttgaattacacctcttctctagtttctggaccttgctctgtcactttaacacagggtgatcaaacctgaatgaggatcagaactcacccaggcacatactaaagcaagattcctaaacctcagttccaggggtaattctgacatcacccgtccagcatagtcagctgaaattataaatctaagaaacagttacatcaagattctgctgtgtcatttaattctgaaactcccagtattctacccttcttcatcactgcatattaccccactcttccatcccaaattggctatcctttcagcccaccaacttagcggcagcactagggattcattataaggtaaatctggtttacataaagacctgaaggaggcctgtatttgaagctcacacttggtattggtatctctcatttttactgagccagtgtggaataccactgtatgtactcatataagcccttgacttttactgctcatcaggattggaatattactctagcagtcttcacacataggcaagttacagtccttttaaaaagtatctcatttccctataatggaacctaatagccaactttttcatagaaattgctagaagagtttgatcaactataaatgataaagtgtttataagcatagtcagtgtgacacagaaaccaatcttaaaattgaatttaatgttttatcatatcagattaaatattttctccatgtcttatttttactgcaacaagttagaaagtgggaacactttgattaatgtcttaaaatttgtgggccctcatttggataaaggcagcaatcctaaggactttttttttttttttaacataatctgagaatttctctgtagagcagagactttcaaaccttttggctgtaacccacagtaaaaaacgcatttatatcaaaccttagaatatgtttaatgaacaatacttaccattctgatgctttttattgtttcagtttttaaaatatgccagttgcaacccactaaattgatatctaccaatgggttgcaacccttagcttgaaaaaaacaccctcacagaggaactggtatttcttgaataccttctgtttgccaggcacttcaccaggcattttacaagtaaggaaactgggcttcagagaaaataatttgcagaggtttactcaactacaaaggggtgaagccaggaatgttaactaggtctgttgagctacaaaaacttttatgtctctcagactatacagcctctatacaaaattgagatgggggttgggggcaggggctcatgcctgcaatcccagcacttagggaggcagaggccagaggatcacttgagcccaggagtttgagaccagcctgggcaacatagtgagactcttgtctgtatgaaaaaaattaagaattagctgggtgtggcatagcacacacctgtggtcccagctacatgggaagctgaagtgggaggatcacttgaactcaggagcagccttggtgacagaacaagaccctctctcaaaaaaatatttaaaaaaaggtgggtcatccattctcctttaccaaacaggctttgaaatgacacattccattcatttgcatctttttaaaaaacttctgattccttactgagtgtccagcagcctcaaagtttttaatggtagctgatgcagacataaacagtgctcaatttggcccttaaactataaaatcaagaaagagtatttcaatcccatccacctgcctgcaagatttcttaatgttcactagttataaccattgtttaaacagtgctttttgtgtaatttaaaaataaactttaatgctttttaaaacaaatttatcataattcatagatcaaatgattatcctttaaaatgatacccttgggaaatcatgtacttactgtagtgatgctagtattaatattacttagaccaattttgaaactgttctttcagaattgcctccaaagacattttgcagatcatcccagaaaagggggtatgatggtgctgtgtagaactgaccagagttcctggaggattttgaggttatactgaaactgagtgctgtacagggagaattgcatgagtccagaaacttccttctgtgggctgcctgccttcctgccctcccttaagtgctctaagatttttgtacaggagtaagaatcaaatactggtaacatcaatcacaagaagttgaggaaacctgtaatatagctagataatatacaacgtttgtcttccatcagagtgcagaaaccaaaccatgctttgtgttaaccttaaatatgaaaggtgtttctcagggtcccctttgtccttcgttgctgccatatgaaatcttacaaggaaggatgaggaaaagcctggggggaggttctcctcggaaatgaggtggttttttttgttattaagtagaacgtggctgtggttcacaggtacttaacgaatgttagatgatgttcttaagtaatcagaggcctaataaaaggcaggggagtttctcttctagcctaaattaatattaaaagttcaggggtattttttgtttttaaattaatactttattgtttttaacaggtggttctcataatttacattcattaatttgatgcccttttacaaagaaacttcttaggtattataaaccatcaatgtaaaggatccacatggtatgtatccacattgctactctcaaatagaaatgggagataagaaatatatctgtgcaatattaaattgaaaaaaaaaaacccataaaaagtgtcaaaggcaaataatttgctctagatcacaaaactagttagcacaaggctaggattataaccagggtctaggaaaaaatcctgaaggtgatttaactgagtgttaggccctgtcaagccacctgctaaggctcatggtctttcagactagcttcaacattccaaatcaggcaatagctacaacggaaagataattggacggggaatcctgagatcagagtcctagtttggctttgtctcttgtagcaggattttttaaatcaggggcagctctcttctcccatcccagccatgaatctttcaaccttagtggtcaccaacttgactccattccttatatcaagacttgtcctgtcaattctcccttaaatgttagttgcatccatttctaaatatatccatggccatcaccctagtaaaaagactattacctcacaccccgcacttgatcttcccccaactttaagtgactcagttccttatatcactgccacaagaattaacaaccatgtccatctttcatttttctgctgaaagattttcagtggttcccactgaataccaaataaagttcgaatcccttagattggcattcacagccttctacgttctggccccagctttatctcttgaaactcactactcaccatctgacaatgccactaaaaatccacaagagtgattttaaggtttttctatggtgaaggttcaaactggtaataaaccatgtttacatttttctggtctaaaataatttctatattactttataatagtcagctgggggttatttaagctcttggacgagcctaaaacttgtatcctgaagaaaatatttttttccaccagaagaaattgctttcaatttcttaaccttcaaaacaatgtcagtgttgtcacctgtgcatttgatagccacagcacaagtattcttcaggagcataaatcctccagccttgaatggaccattgtccagctcctgtgaaaaacttaatatttgagaaagacattcaatggtacatgttttctgtacacttcatgagtagttgagattttcttgtattaaggttaatcactaaaaaggtgtttacttgggtttcgttaactaaaccccctaaagatgttttccattttattgttaaacacttggtgttagcaagggtcagcacgagaaaaggcccaatggcaagaatttctgcaaactctgtaaagcttactgaattcatttgtcatttattacattgctgagtggtgcttgaataaggaaacatgcaataaatttacttatttaaccaacaaa

SEQ ID NO: 1158 - DNA, 10325 bp, HOMO SAPIENS
aggagccgggcggaggtgactgccgcgtgtttgcgttgcacgcccaccgcccgaaacacggcggcggcctcagggctgctgcggcctcggcgggggcaggccccggcgcccgcccgcctcccggcctccatcatcccagggtgcaccgcggcgggcgcgggcgcgcggccatgttgcggtagtttgttgttttcttcctgcggaggcgaagggccagctgtggaccgcgaagcgcccggcttcgcctctgcctcctgcagccccctcccttctctgtcctccgtcacccgtacccgggcccggaccaggcacgtcggcccaccagctggcttggtgggggaggctgaaggccgggccccgcgagtgccatggcggccgccctgggagcgagcggaggagcaggcgccggagatgatgactttgaccagtttgataagcctggcgcggaacggtcgtggagaagaagagctgctgatgaggactgggacagtgaacttgaagatgatttacttggagaagatttgctatctggcaaaaagaatcagtcggatttgtcagatgaagagctaaatgatgatcttttgcagagtgataatgaagatgaagaaaatttcagttctcagggtgttacaattagtctgaatgctacatctggcatggttacatcatttgaactctctgacaacactaacgaccaatctggagaacaggaatctgagtatgaacaagaacaaggagaggatgaactggtttatcacaaatctgatggatcagaattgtatactcaagagtacccagaagaaggacagtatgaaggccacgaagctgagttgacagaagaccaaatagaatatgtggaagagccagaggaggagcagctttacactgatgaagtgttagacatcgagatcaatgaacctttagatgaatttacaggaggtatggaaacattggaacttcaaaaggacatcaaagaagaatcagatgaagaagaagaagatgatgaagaatctggacgattacgtttcaaaactgaaaggaaagaaggaacaattattaggctctcagatgtaactagagagagaaggaacattccagaaactttggagctttcagcagaggccaaggcagcattgcttgaatttgaagaaagggagcgacagcataaacaaggacgctacagctccaggcggggaggacggcgaggaggtccgctgatgtgtcgtggtgtgggggaccagaggagagagagcaccgagaggggcaggatgaaggaccacagacctgcgctgcttcctacacagcctcctgtcgtgccccaggctccccctccaccgccaccgccgcctcagcagcagccgatcagaagcctgttccagccgcagccgctgcagccgctgcttccggtgcagcacccgcaccacccatccccgcctcagggaatgcacatgcctccccagctagagaccccaaggatgatgatgaccccgccacccgtgactccacagcagcccaagaacatacacatcaacccgcacttcaaagggacggtggtcacgcctgttcaagtgcccttgctaccagttccgagccagccgagacctgccgtgggaccccagagattcccaggccctccagaatttccacagcatacacctggacctgttcccaacagtttcagccagcccccacgactccctctccaggaccagtggagagccccacccccgcctcaggatcgagaccctttcttcttaggagtttcaggtgaaccaagattcccgagccatctttttctggaacagcgaagtccccctccaccaccaccgcctcctacccttcttaacagtagccatcctgttcctactcagagtcctctaccattcactcagccaggaccagcatttaatcagcaaggacagcagccagtgttcccaagagagcggcccgtacgaccagccttgcagcctccaggtccggtggggattctgcactttagccagcctgggtcggcaaccacacggcccttcattcctcctagacagccgttcctgccaggcccaggacagccgtttctgcccacacacacacagcccaacctgcaggggccgttgcatcctccattgccccctccgcatcagcctcagcctcagcaacctcagcaacagcccccgccacagcaccagcctccgcaccagcccccgcaccagcccccgccccagcaccagcccccaccccagcacccaccacagcacccgccgcagcaccagcaccaccaccaccaccaccacctgtccgtcccgccccctcctttgatgccgatgtctcagccacagttccggcctcacgtacagaccgctcagcctcaggccagcagcagccggatgcagtgcccccagcgccaggggctccggcataatacaacttctcagaatgtaagcaagcggcccatgcagcaaatgcagcccactgcgccaaggaacagcaatttgcgtgaattacccatagcgccgtcacacgtgatagaaatgagcagcagccgctgctctgccacgccctcagcacaagtgaaacctatcgtcagcgcgtcaccaccctcgcgggccgtggcgggttccagaagctcacagggaaagacggaagtgaaagtcaagccagctagccctgtggctcaacctaaagaagaggcaaaaacagaaacagagtttcctgatgaagatgaggaaacaaggttatatcgcttaaagatagaagaacagaaacgcctaagagaagaaatcctgaaacagaaggagttacggcggcagcagcaggctggtgccaggaagaaggagctgctggagagactcgcgcagcaacagcagcagctgtacgctcccccacccccagcagagcaggaagagcaggcactgtcaccatcacccaccaacggtaacccactgttgccctttccaggtgcacaggtcagacaaaatgtgaagaacagacttcttgttaaaaaccaggatgtcagtatttcaaacgttcagcccaaaacatccaattttgtaccatccagtgccaacatgcagtatcaaggacaacagatgaaagcactgaaacatttgagacagaccagaacagttcctcaaagtcagactcagccgctgcataaagtgctcccgatcaaacctgcagatgtggaggagccagctgtcccccagactcctcgagtggcgtccatccagggccggccccaggacacaaagcctggcgtgaaaaggactgtcacgcacaggacaaacagtggtggtggagacgggccccacatcagctccaaggtcagggtgattaagctgtcaggtgggggaggagagagcgatggcttttttcacccagaaggccagccccagcggcttccccagcctccggaagtgggaccacagcctgcccgcaaggtgacgctgaccagggggggcctccagcagcccccacatctgccagcggggccccacgcacactcgcctgtccctccagggatcaaaagcatccaaggaattcacccggcgaagaaggccatcatgcacggacgaggcagaggagtggccggtcccatgggccgggggcgcctgatgccaaacaagcagaacctgcgggtggtggagtgcaagccccagccctgcgtggtgtctgtggaggggctgtcctcgtccaccacggatgcccagctgaagagcctgctgatgtcagtgggacccattcagagtttacagatgcttcctcagcaacggaaagccatagctaagttcaaggagccagcccacgcattagcatttcagcagaaattccacaggcatatgatagatttgtcccacataaatgtggccctgatcgtggagtgagtcctaacaagagagcctgaccttaggctgtacacacactgtggaatttcttcaagggagctgccggccggcgcagaacccccaggagcacaggtctctccgggccgctgtcctgcgtaactgttctccagagcgccagccagccacgggcctgattccagaggagccgaactgacaggacacagcaggctggagttggtgttagattgcttcacattctcttgtcaccaccaagaactccaagtttttcgttttgttttgttttcaaagtgcttacaatgcatgtagacattgttctttgtggtctgactctatgatcgatcacagtgacttagattcaggaaagaacattaacgtcacaagttctaagtagttttcacagcaaagaatatttgataatggttgcacttatcttcagtgcaggttagaagagtcttctcaaccaagcttaactcgagttgtcttctcagccctcaaaaggctcttgtacaaaatgtagattaaaatttgggtgattgttgattgacctttgcataccctggaaagccagggtgtgagtggggtggttgggagtggtgccagttgaacagcagattctgcttcttgtcactgtttcaaaagcgtcaactctgtgttcctagtttcgatgaactccccattcatttttaacacacttcccagataaggcaatgtgctggacaggcacacggcatggccctcggctagagcagggtctgtgatggcctcacctggcagccctctggcctagttcccaccacacatgaggtggtggaatggcctgaaggtggaacagacctgtttttttcctttttaaatgcagtaaggtggcctgtttatcactggctctgtgatacatgacattctttgggaatttggtggccactgcttcagtcacctctgtttttctgaaggctgttccagcagggctgccctgttcatcagcggatgttcactctggcctgccgttccccgtggcatgcggggtgagggtggctttcttccagccccaaatgagacgagtctgtgtcatcattgaaactgcttttcgtaattgcgggtaggttcctgtaggtgagacatattctccataaagctactgtagtagaattcattctgggcaaacactgaaaaaagtgccttacagtatttctgctcatgaaagagtttcactattttggatatattctaaagtggacctgagctatttgagcaaataatgatagggcatactcagacattttagctaccttttatacctacgatttcatgtcacatttactaatagaattaagggaaatagaagcccgttctttcttactgcccctggagggagcatggcgctagggctctcagcctcctagaaggaagggactaaggagacgggcacagacttgcgtcatctcgtttccacagttgacgttttatattactttctcaaattaagttaccaaaacaaactgaagagctgaagcaggtcttccagaccctgcgatcctttctgtagcagtgattctaaagtggcgtttgctgtgtgcttgagagtaacactgcacgctgcaggggctgttgcagcagtcagtcccaggaagccacagcgcttgtaggatctgctaggaccctgcagctgtgctgccgccacctctgctccagagtgtcccagccaaccctcggaagatgggattgccagtcagccctgcctcaccatgcctgcaggaggctgtccagggagcaggtctgtgtgcccatcagcaggttcccatggctgtcactgcccactcatttccacagttagatacggatgtgttgatgtatttcgtctagtttatttggctcagtccacagctgcgttggagtggtgactttggtagcccttgagctctaattaagagagatccaaaccactcagtacccactgggcagtgggaaggcctaccgacttactttatcattgagggcttactgatacaatgaaatgagtttcatgactttttttttttttaaacactttttgaaatagagtgtgctgtgtttaaaaccaaaaatatgcatgttgtctctgaaaagtaggcattgaaacagacttttttgtagtcagtgttaataaaacggatcctgtttgggccttcattgttaaggtggacttcatggccactggaaggtctgttttggtgttacctgagtgtgacacaggccctggggtgtgcgtgtttctctaactgtctacacgtgcacataggcagactttctcatagaatgttcttgaaaggtgattggcaaagtcatgcaggcccgccttaaagcgctgattagaacagtccaacacagtccgacctcactcaatacccacaaccatcgaaaatggattcttagtaccagacaatcccagtaatgaaggtttagtttccttgaaggaaactacagaaaaggaaagaagcagaatgagaaaggaatggtacttaggtgtttggtatgctgctcacgtgaagtcagcccacaccagccaaaccctcgtggaagatctgctgcaaccattatctttgttcttgagttcatcatgcatttaaaatgagatgcaagagcatttagcataccatgtaaatatggaccttttaaaattaaaatactattggaagtgctttcaactcagccacatcttagctattagttctttgtgttgtcttatcaaagtttaatggatacagttccacagttgttgatgtgtttgtgtgtatattcgatttttataaagatggtagtaagtcaatacatttatcctgatctgtgtattatttgttcacaaattcaagaagcttaaaggtcgtaaatatcagtatctcataaggtaaaccaatagctgattatgtggagccaagttacttcttttctttttgcattatcttgttttggttttgtgctgtaatagaagttcacttagctactttagataaccttgcattaccactggtctggccacgtttgttaaatccttatactgatattcttctaaagagtaaatctcatcatttttccagacaaattttgaggggtttctctgttttgtggacaggcagcagcctccgtaggcacccgcaccctgccttgctggaggagatgggatggggcgggaggtggcttcaccataactatttttaatatgggtcattcttagcatgatttgtaaaggtctcaggcaaacagttgttgaagcttgcttctgtggcatttctgaattgtggcagagcttagatcctgcacccaggggtctttttttcaaacagcatcttgctcagttctgtgaacagaaggctttgttactgaaggaggtggaagaggagtttagggtgaaaaggaggaagggatggacagacccaggtgaggagaggcctggggattggggaagctgtcatctcagtgttaataatcaacttgcttctaacacactggcttatcaggggaggtcatccagtccggtcggtggagttgagagcccttgggccagggtgtttggcggcacaggggcatccgctggatggcctggaggagtgggggaggggaacgtcttcactgggtggtgatcagctgggacagttcaggtagggcaggtgagggacccccgaggccctggagccttgtcctgggatgggtttgaagaactcatcactcatcacttgttttcttttggcttttgttgtttttgttttgttctgtttgttttgttttgtatttctttgttattttattgggaaggtaagcggaatgtgctcatagaccatcagacgcttgtcgaaggcaggtcctagtcatgtaattgcacaggacaaggaggtcagcgtgtgtgatggcagcatgctgtgccggcacatcgtggagtcctagaaactctctagtccctgcggctgttcccctcctctgctctctccctggagaggactgccagctcttaagaaacattcctggtgcggtgtctgcagtgccctttgtgggtgacttcaggcttcccgctttcgtggtgctcttcctgggattcgtttttttattaccctccctccctacttgtaggcctcagctatggcttgacgtaatcgcttttagacccaggttggcttcccttcattaagctatgatcctccaccccattttttttttttttaatttggagtgggagggaggggggtgggcgagagaaagctcgaaaggtattattggtttttcaaaaaattagaggtgacgattctaccagggagttgactgataggagtgtgtgcagggcaggaaaggttcggaggcacccgactaccaccactcggaaagccgctagtccagatcgactagggagaggcttagatactttagtgtatttaaagagcatttcagttaactttttcagctatttttaaagtttgtgaatggagtgttattttggacattcttaaatatgaattctccaaaggcatttagccttgacttaatattaaatcctaaggattttatgtaaggtttttttgcaacctatttaattttttttaaatgcctaacttctgaggtgcataagcccgtggtttgtgtactggaactaaagcggaactcactgattcatattggatccccaggtataccttctgctggtagcatatggctggaaaaggccgtttgcctcacacattgtaacctgccttggctagaaaatgcttttaatgtctcaactctctcttttctgtgtcatgttttggtaggaaatctttaagattggcggacggaacaggtattttagtgagacacttctgagtacttgctttttcctttgacttctaaccaactaaaagagaaggaggtcttcatgttgatattttgcttggttttattttactgattttaaaaggtatatagaaaaatgtaggcctttaaaaagaaacagcatgtagttttttattttaatatgttccatagagtggataggcagacaggtactattgtaatgtattctgtatttaataatttaatatactctagaaagtagacctcatgcattcttttagcatgattttcttttaaactgcttttcattttaagggcacccgtggcggaagctggttttgcaaggactgtgtaagctgtatgcgttctagctgtatgcgttctgtagtcttttcttaggtgggtaacattttcaataacgcgcgcacagcacacaggggtgccctgagccgaaggagcaaaaaaagccaccgctcgtttctataatccagctttgcttttcacaggcgtgggatccaggatggtgtcctctgtgaggacttgaactctggggctttaattccactgtttaattttcaggtaccacagcagcaaagcacagagtgtgacctttttcatgtctgagctgattctgtttgctccacgtgcctgcttcttgctactgttcatttagtaatgggatcacctcaccatgccatgctctgggctctccctctctgtccatttctgttttgctttcctggctaaacccatctaccattcttaacactggtagctcctgtcccattccaagactcactctctcagaccttcccatctccctggctttccatgctcctctccctccacctcctggcttcaactgggtgagggccgtattcctgccactctgctccgcctcagccttgagaactccacgtgggctgggtgggaaggtgctgacgattttcacactgtgtttaccactccatcacctctcaacctttgcttcgacaggtcttcactcacgatttattcctccaggtctttgattggagagagtaactttttaattctgttgttttgcagtttggctctgtaggagtgagtggcgattcaaagatgccggcgtcccgcagtgtgcggttcgtgcccttaaccacccgcttctttgtttcccgcccctctgctttcgcaggagctcttgtgcttgagttcagtgttagtggtagcgtggctcactccacttggaggtggcggccgtctgaccgtgtgttactgctttgccgacggggcctcccggccctgatgcgtgtacactctgcgggctgcaccgggtggctctggttgggggcgaagctgtgttgactgggagagcgttggaaattgagacatggagagatgacgggagtgcgtttctctgggtttgatctccatcctgttttctcccagacacaccacacctaccttgggggaatgccgttgcctgttccacccctttgttcacttcgcgttaactgctgtggtaactttttcaggatctgtgtgaagaatggtaatgacgtagttgaaaggaaaatgtactgttgtgtgtttcatttgtgtgatttcgtaccaaaaaaatgtgtttgaactatattgtatgtaatttggaagtcgtgttaataaaaccctgcagtttccactctg

SEQ ID NO: 1159 - DNA, 1599 bp, HOMO SAPIENS
aagatcctggcctgtgcagctcgggtttccgagcttctgcctcaggcatctccgcgatctcctctcccctccaatcctatccgtgatggacgatgcccacgagtcgccctccgacaaaggtggagagacaggggagtcggatgagacggccgctgtgcccggggacccgggggctaccgacaccgatggaatcccagaggaaactgacggagacgcagatgtggacttgaaagaagctgcagcggaggaaggcgagctcgagagtcaggatgtctcagatttaacaacagttgaaagggaagactcatcattacttaatcctgcagccaaaaaactgaaaatagataccaaagaaaagaaagagaaaaagcagaaagtagatgaagatgagattcagaagatgcaaatcctggtttcttctttttctgaggagcagctgaaccgttatgaaatgtatcgccgctcagctttccctaaggcagccatcaaaaggctgatccagtccatcactggcacctctgtgtctcagaatgttgttattgctatgtctggtatttccaaggttttcgtcggggaggtggtagaagaagcactggatgtgtgtgagaagtggggagaaatgccaccactacaacccaaacatatgagggaagccgttagaaggttaaagtcaaaaggacagatccctaactcgaagcacaaaaaaatcatcttcttctagaccaaagtctagaaaggcctatgttactgacggaagaagtattggttccagacttcctataagactgtctgcattggtgctttagtatctcaggcctccaaggattccatgatgattttaatgtctttctcaaaactctgatatttgtcacacctagaaagtatgtagcctgattgatacttgccttgactaaattttgggacctcttggggcattttgaagtatttaactgtcttgaccagttggaagaagatacgtgggccataagcatcttctggacaggggaactgctttcagagagaaaacctttccaagagagttttgttttgttttggtttcgttttgtttgagatagggtcttgctctatcacctaggctggagtgcagcggcatgactgcagccttgaactcctgggcttaagtgaccctcccacctcagtctcctgagtagctaggactacaggcacacactactgtgcccagctaacttatttttattttttatggagatggggtcttgctttgttgcccaggctggtcgtgaactcctggcttcaagcagtcctcctgcctcagcctcctaaagtgccgagggctttaatggtttcacattgaagcctgaagttgctaagacttaggttgtttcttatatctggttttaagtagatgaaacaaccagaaacttttacttgtgatactctaccatgaaggatgcggtaatggcaggaatagcagaataattggtgcttgtaaacatttaagattctcctgtggattttggtgagtgatcattaaactgttttccaacttgcaaaaaaaaaaaaaaaaaaaaaaaaaaaaaaaaaaaaaaaaaaaaaaaaaaaaaaaaaaaaaaaaaa

SEQ ID NO: 1160 - DNA, 488 bp, HOMO SAPIENS
  misc_feature (41)..(42): n is a, c, g, or t
ccacttctctataactccaacataaccagttttccctctanngagttggaacagattatagtttagtagctcaccaaataaagtacgtagcttgtatttaccagctatggtatataaaaatatgaatcattaaatgctagtataaagcagttagtcttaaaaaaaaaaaaagatccacaaaagggatgagtgggagataagattgaagcaaaattatagaaagttgtataccaggctgagggctttctgtgtcacttcacaggaagtaggtaaacaccgaaatttagtcagtgtcattattagagttgtgctttcataaaaagaatctctcaagtgtgacaaggctaaattagaaagaagagactggaggtagaggccagttaggagatccttgtaataatccacagttgatggaatgaggatctagagtagccaggctggaggtaacaaagagggacaggagggcaggagtactctactttaaagta

SEQ ID NO: 1161 - DNA, 2016 bp, HOMO SAPIENS
tccgaggccccgagggcgggacgtttcgtcctccctgccgcgcgtgccctgcctaccacgagcggcccgggagtacctgtacctttcagctgcgccggccgcgaggccacggagagctcgccttggagagcccaggagcaggggagacatggactcagtggtctttgaggatgtggctgtggacttcaccctggaggagtgggctttgctggattctgctcagagggacctctacagagatgtgatgctggagaccttccggaacctggcctcagtagatgatgggactcaatttaaagccaatgggtcagtttctctgcaggatatgtacgggcaagaaaaatctaaggaacagacaataccaaacttcacaggaaataattcctgtgcctacactttagaaaaaaattgtgaaggctatggcactgaagaccaccacaaaaatctgagaaatcatatggtggacagattctgtacacataatgaaggtaatcaatatggagaagccatccatcaaatgccagatcttaccctgcacaagaaagtttctgctggagaaaaaccatatgaatgcaccaagtgcaggacagtcttcacgcatctttcttctcttaaaaggcacgtcaagtctcactgtggacgaaaagcacctccaggtgaggaatgtaagcaggcctgcatttgtccctcacacctacacagtcacggaagaactgacactgaggagaagccgtataagtgtcaagcatgtgggcaaactttccaacatcctcgttacctctcccaccacgtaaagactcacacagcagagaaaacctacaaatgcgagcagtgtcggatggcgtttaatgggttcgcaagcttcactagacatgtgagaactcacacaaaagacaggccatataaatgtcaggaatgtgggagagccttcatttatccctcgacatttcaaagacacatgacaacacacactggagagaagccctataaatgtcagcactgtgggaaagccttcacttacccccaggcttttcaaagacatgagaagacgcacacgggagagaagccctatgaatgcaagcagtgtgggaaaacattcagttggtctgaaaccttgcgagtccacatgaggatccacactggggacaaactctataaatgtgaacactgtgggaaggcttttacctcttccagatcattccaaggtcatttgaggacgcacactggagagaaaccttatgagtgtaaacaatgtgggaaagccttcacttggtcctcaacgtttagagaacatgtgagaattcacacgcaagagcagctctataaatgtgaacaatgtgggaaggcttttacctcttccagatcattccgaggtcatttgaggacgcacactggagagaagccttatgagtgtaaacaatgtggaaaaaccttcacttggtcctcaacgtttagagaacatgtgagaattcacacgcaagagcagctccataaatgtgaacactgtgggaaggcctttacctcttccagagcattccaaggtcatttgaggatgcacactggagagaagccttatgagtgtaaacaatgtggaaaaaccttcacttggtcctcaaccttacataatcatgtgaggatgcacactggagagaaacctcacaaatgtaaacaatgtgggatgtccttcaagtggcactcctccttccggaaccatctgaggatgcacacaggacagaaatcccacgaatgtcagtcatactcaaaagccttcagttgccaagtcattctttctaaaaccagtgagagcacacactaaagagaaattctataactttaatggggtaacctcacattaattcatgtataatgctccagaaaattcacaccaggagagaaatcttacaagtatgatattgtctttgtcaatacctcatttgtaaaacagacccattagtcgtgaatttccagctctttcaaaaataaatgtttatgtgagaaaataaaaaaaaaaaaaaa

SEQ ID NO: 1162 - DNA, 3112 bp, HOMO SAPIENS
ccccggactctgcctgctcctgccatggtgccgtggccctgctgggcggatggagcaggatcccaagccgccccgtctgcggctctgggccctgatcccctggcttcccaggaagcagcggcccaggatcagccagacctctctgcctgtccctggccctggctctggcccccagcgggactcggatgagggcgtcctcaaggagatctccatcacgcaccacgtcaaggctggctctgagaaggctgatccatcccatttcgagctcctcaaggttctgggccagggatcctttggcaaagtcttcctggtgcggaaagtcacccggcctgacagtgggcacctgtatgctatgaaggtgctgaagaaggcaacgctgaaagtacgtgaccgcgtccggaccaagatggagagagacatcctggctgatgtaaatcacccattcgtggtgaagctgcactatgccttccagaccgagggcaagctctatctcattctggacttcctgcgtggtggggacctcttcacccggctctcaaaagaggtgatgttcacggaggaggatgtgaagttttacctggccgagctggctctgggcctggatcacctgcacagcctgggtatcatttacagagacctcaagcctgagaacatccttctggatgaggagggccacatcaaactcactgactttggcctgagcaaagaggccattgaccacgagaagaaggcctattctttctgcgggacagtggagtacatggcccctgaggtcgtcaaccgccagggccactcccatagtgcggactggtggtcctatggggtgttgatgtttgagatgctgacgggctccctgcccttccaggggaaggaccggaaggagaccatgacactgattctgaaggcgaagctaggcatgccccagtttctgagcactgaagcccagagcctcttgcgggccctgttcaagcggaatcctgccaaccggctcggctccggccctgatggggcagaggaaatcaagcggcatgtcttctactccaccattgactggaataagctataccgtcgtgagatcaagccacccttcaagccagcagtggctcagcctgatgacaccttctactttgacaccgagttcacgtcccgcacacccaaggattccccaggcatcccccccagcgctggggcccatcagctgttccggggcttcagcttcgtggccaccggcctgatggaagacgacggcaagcctcgtgccccgcaggcacccctgcactcggtggtacagcaactccatgggaagaacctggtttttagtgacggctacgtggtaaaggagacaattggtgtgggctcctactctgagtgcaagcgctgtgtccacaaggccaccaacatggagtatgctgtcaaggtcattgataagagcaagcgggatccttcagaagagattgagattcttctgcggtatggccagcaccccaacatcatcactctgaaagatgtgtatgatgatggcaaacacgtgtacctggtgacagagctgatgcggggtggggagctgctggacaagatcctgcggcagaagttcttctcagagcgggaggccagctttgtcctgcacaccattggcaaaactgtggagtatctgcactcacagggggttgtgcacagggacctgaagcccagcaacatcctgtatgtggacgagtccgggaatcccgagtgcctgcgcatctgtgactttggttttgccaaacagctgcgggctgagaatgggctcctcatgacaccttgctacacagccaactttgtggcgcctgaggtgctgaagcgccagggctacgatgaaggctgcgacatctggagcctgggcattctgctgtacaccatgctggcaggatatactccatttgccaacggtcccagtgacacaccagaggaaatcctaacccggatcggcagtgggaagtttaccctcagtgggggaaattggaacacagtttcagagacagccaaggacctggtgtccaagatgctacacgtggatccccaccagcgcctcacagctaagcaggttctgcagcatccatgggtcacccagaaagacaagcttccccaaagccagctgtcccaccaggacctacagcttgtgaagggagccatggctgccacgtactccgcactcaacagctccaagcccaccccccagctgaagcccatcgagtcatccatcctggcccagcggcgagtgaggaagttgccatccaccaccctgtgaggcaccagggcattcgggccacagggcggtgctagcttgacacagtcagcatgcttcccagagggagcaggccggaaccacagggccagagggagctggaacccgaggggccggggaagctgccagcccagaacacccctaatgagggtgtgagaagtgccttctccttccccaggatggactcttctcggctcaggctctgctggtggaaagcgattcactgtataaacttttttttatgaaaaaaatggcatcaaccaccatggatttttacaagatccatttgcctttctgggagcagaaacagccattgcggccccaggaggggaactgagtcacgctggggctctctgagactctttagagcagctttgggatcccaccctggggacccccacgattggccacctgtagccatctgcacacacctccgagacagtccagtgtcacctctctcagagcatctggctgtttagcagaactcattctatccccaatcagctccttttccgttctgttctgctgggagttctagaaccacttcctgctacaggaggggtctcatgtcctgctggcttccagcttcaggcaccagcatccaccttggctctgccagtggatcccctgcggtcaggctgggcagccccagagagaggatgtggaaagcactttttggctgacttcatctggggttggcaacaggacagagttcacaggaggccagtgggcgggccatgagggacagggtcttttttcatttcttcctcagctggttactcagggttcatctgtccatggcctttctaataaactgttgagttgaagcac

SEQ ID NO: 1163 - DNA, 247 bp, HOMO SAPIENS
agcctggccaacaactctgttgctactaaaaatacagaaattagccaggtgtggtggcgtccacctgtaattccagctacttgggaggctgaggcatgagaattgcttgaacgctgaaggcggaggttgcactgagttgagattgtgccactgcattccagcctgggtgacggagtgagactctgtctcaaaaaacagaacaaacaaacaaaaacaccacagaattagctggatgccgtggctcaca

SEQ ID NO: 1164 - DNA, 522 bp, HOMO SAPIENS
  misc_feature (104)..(104): n is a, c, g, or t
  misc_feature (107)..(107): n is a, c, g, or t
  misc_feature (109)..(109): n is a, c, g, or t
  misc_feature (111)..(111): n is a, c, g, or t
  misc_feature (124)..(124): n is a, c, g, or t
  misc_feature (128)..(128): n is a, c, g, or t
  misc_feature (130)..(130): n is a, c, g, or t
  misc_feature (137)..(137): n is a, c, g, or t
  misc_feature (139)..(139): n is a, c, g, or t
  misc_feature (146)..(147): n is a, c, g, or t
  misc_feature (163)..(163): n is a, c, g, or t
  misc_feature (297)..(298): n is a, c, g, or t
  misc_feature (302)..(303): n is a, c, g, or t
gacctaaagtcacaatcttcttctttgctgctttttaaaaattacctattacctttaaaagatcccaaatttagaagaggaattaaaataaaagttaatgcaanaanananttccacaatattntatnanttcaacntntaatcanngaaaacattaatggantactcttactacgcctggtagggatgtgtttgggacataaaacagtttaaaaccttcaaaagacaatgactcaatattttcttgttagacaagtactattagcacctacagcacatttgaaggtctaatggcanncttnntgaaaagcattctgcatttcagcattattttgacctgtacattacacttttcccttccctcatcttagtgaagtagagagattactgatctatttctttatcttaatcattcctccctaaccccaagacaaagaatacaaattagaatttacaaaatgtattgtgcccatggaaatacatagttttgttactgtactcatagatatttactacccttgt

SEQ ID NO: 1165 - DNA, 1587 bp, HOMO SAPIENS
gcggcggttttttttcccatggcgctctggggcgcgggcgatttgtaggtaatggcaggcgttcggtcactgaggtgtagcagaggatgcgctggcggctgtgagtgcggcgacaagggcaaatgcagcgactcctcgctgttgggcaagagactctccgaagactcgagccgccaccagctgttgcagaagtgggcgagcatgtggagctccatgagcgaagacgcgtcggtggccgacatggagagggcgcagctggaggaggaggcggcggctgcggaggagaggccgctggtgttcctgtgctccggctgccggcggccgctgggcgactcgctgagctgggtggccagccaggaggacaccaactgcatcctgcttcgctgtgtttcctgtaatgtttctgtggataaggaacagaagctatccaaacgtgaaaaggaaaatggttgcgtccttgagactttgtgctgcgcggggtgctcactcaatcttggctacgtgtacagatgcacgcccaagaatcttgattacaagagagacttgttttgcctcagtgttgaagccattgaaagttatgttttagggtcctctgaaaagcaaattgtgtcagaagataaagagctttttaatcttgaaagcagagttgaaatagaaaagtctctaacacagatggaagatgtcttgaaagcattacaaatgaagctgtgggaggccgaatccaaattgtcctttgccacttgtaaaagctgaactctagtctgtgtcctccattctgcccccgcccttcctccccttatttgttaaatgaagcaacatagtgagacgtcgtctctacaaaaaaaaaaagaaaaaaaaaattagccaggcatgcgaaacgctgaggtgggaggatcagatgagcttgggaggttgaggctgcagtgagccttggtcatgccactactgtgttctagtctgggcaacagagtgagaccttctctcaaaaaaaaaacccaaaattgtagaattacttctatagctatattttatgataaagaagtgattgtttctcaaaatcgcattttaaagacgttttatggtacttgttggaattgggacttaggagttttgattttgataagaaactgggataattttctgaactttttttcctctgtatcacatttatttactatttttaaaaactttgacatttaacacttgggacaacatttattataaatgataagaaaaatcttagaggtttgtctacccacagtgtcatggaatcttctctgaaaactaatccataaagttccctggagaaattggtcagaatgatctgtcagaaccatttgaaaacttgctcaagagcagttgcttatatatagtaggattttactttttcctgcttatgtactactatatgcttaaaaaacctggaggaatacttaccaaagaggagtaaccatctctgagggtgggattctgggggaatttttgtttttttctgttttctataatgtgaaacttttgtagtatgtatttttctaattgaagagaataaagattaaaacaaagtgctttaaaaaaaaaaaaaaaaaa

SEQ ID NO: 1166 - DNA, 2859 bp, HOMO SAPIENS
ctttccgcggcattctttgggcgtgagtcatgcaggtttgcagccagccccaaagggggtgtgtgcgcgagcagagcgctataaatacggcgcctcccagtgcccacaacgcggcgtcgccaggaggagcgcgcgggcacagggtgccgctgaccgaggcgtgcaaagactccagaattggaggcatgatgaagactctgctgctgtttgtggggctgctgctgacctgggagagtgggcaggtcctgggggaccagacggtctcagacaatgagctccaggaaatgtccaatcagggaagtaagtacgtcaataaggaaattcaaaatgctgtcaacggggtgaaacagataaagactctcatagaaaaaacaaacgaagagcgcaagacactgctcagcaacctagaagaagccaagaagaagaaagaggatgccctaaatgagaccagggaatcagagacaaagctgaaggagctcccaggagtgtgcaatgagaccatgatggccctctgggaagagtgtaagccctgcctgaaacagacctgcatgaagttctacgcacgcgtctgcagaagtggctcaggcctggttggccgccagcttgaggagttcctgaaccagagctcgcccttctacttctggatgaatggtgaccgcatcgactccctgctggagaacgaccggcagcagacgcacatgctggatgtcatgcaggaccacttcagccgcgcgtccagcatcatagacgagctcttccaggacaggttcttcacccgggagccccaggatacctaccactacctgcccttcagcctgccccaccggaggcctcacttcttctttcccaagtcccgcatcgtccgcagcttgatgcccttctctccgtacgagcccctgaacttccacgccatgttccagcccttccttgagatgatacacgaggctcagcaggccatggacatccacttccatagcccggccttccagcacccgccaacagaattcatacgagaaggcgacgatgaccggactgtgtgccgggagatccgccacaactccacgggctgcctgcggatgaaggaccagtgtgacaagtgccgggagatcttgtctgtggactgttccaccaacaacccctcccaggctaagctgcggcgggagctcgacgaatccctccaggtcgctgagaggttgaccaggaaatacaacgagctgctaaagtcctaccagtggaagatgctcaacacctcctccttgctggagcagctgaacgagcagtttaactgggtgtcccggctggcaaacctcacgcaaggcgaagaccagtactatctgcgggtcaccacggtggcttcccacacttctgactcggacgttccttccggtgtcactgaggtggtcgtgaagctctttgactctgatcccatcactgtgacggtccctgtagaagtctccaggaagaaccctaaatttatggagaccgtggcggagaaagcgctgcaggaataccgcaaaaagcaccgggaggagtgagatgtggatgttgcttttgcacctacgggggcatctgagtccagctccccccaagatgagctgcagccccccagagagagctctgcacgtcaccaagtaaccaggccccagcctccaggcccccaactccgcccagcctctccccgctctggatcctgcactctaacactcgactctgctgctcatgggaagaacagaattgctcctgcatgcaactaattcaataaaactgtcttgtgagctgatcgcttggagggtcctctttttatgttgagttgctgcttcccggcatgccttcattttgctatggggggcaggcaggggggatggaaaataagtagaaacaaaaaagcagtggctaagatggtatagggactgtcataccagtgaagaataaaagggtgaagaataaaagggatatgatgacaaggttgatccacttcaagaattgcttgctttcaggaagagagatgtgtttcaacaagccaactaaaatatattgctgcaaatggaagcttttctgttctattataaaactgtcgatgtattctgaccaaggtgcgacaatctcctaaaggaatacactgaaagttaaggagaagaatcagtaagtgtaaggtgtacttggtattataatgcataattgatgttttcgttatgaaaacatttggtgcccagaagtccaaattatcagttttatttgtaagagctattgcttttgcagcggttttatttgtaaaagctgttgatttcgagttgtaagagctcagcatcccaggggcatcttcttgactgtggcatttcctgtccaccgccggtttatatgatcttcatacctttccctggaccacaggcgtttctcggcttttagtctgaaccatagctgggctgcagtaccctacgctgccagcaggtggccatgactacccgtggtaccaatctcagtcttaaagctcaggcttttcgttcattaacattctctgatagaattctggtcatcagatgtactgcaatggaacaaaactcatctggctgcatcccaggtgtgtagcaaagtccacatgtaaatttatagcttagaatattcttaagtcactgtcccttgtctctctttgaagttataaacaacaaacttaaagcttagcttatgtccaaggtaagtattttagcatggctgtcaaggaaattcagagtaaagtcagtgtgattcacttaatgatatacattaattagaattatggggtcagaggtatttgcttaagtgatcataattgtaaagtatatgtcacattgtcacattaatgtcaaaaaaaaaaaaaaaaaa

SEQ ID NO: 1167 - DNA, 745 bp, HOMO SAPIENS
gtcgggtacgggaaggtccaagccgctgccgggtgcccgagggccgtcgtggccgccgtcgccacgggtcccaatggagccgccgaatctctatccggtgaagctctacgtgtacgacctgtccaaaggcctggcccggcggctcagccccatcatgctggggaaacaactggaaggcatctggcacacatccatagttgtgcacaaggatgagttcttcttcggcagtggtggtatctccagctgccccccgggagggacattgcttgggcctccagactctgtggttgatgtggggagtacagaagtcacagaagaaatctttctggagtacctctcctccctgggggagtccctgttccgaggtgaggcctacaacctctttgaacacaattgtaacaccttcagcaacgaagtggcacagttcctgactgggcggaagattccttcttacatcacagacctgccctctgaagttctctccacgccctttggacaggcacttcggcccctcctggactccattcagatccagcctccaggagggagctccgtgggcagacccaacggccagagctaacaggactgcctgggaccgccctgcctcaccagggcttttcctttttaaacaaaacaaaccctaccagatttctattttataattttacatcagagctaacaaccaggggacggctttttaaatttcccagggaaggagaccgtcaggccgcatgtagacaatgct

SEQ ID NO: 1168 - DNA, 14460 bp, HOMO SAPIENS
gcggggcggcgggcgtgtccgaagtcgcgcgcggctggcgcgcggtcccgagtgaaaggagaaggaggggcgctgggggtgacggtgcggagccgctgccagcgctgggcgagagtcggcggccggatccgaggagcaggcgggcctgaggccgagtcagctgcgcgggcccccggatcccccgacagagcggcggcggtgtctggccaggcggtaggcgctgcctggccgcggcggggaagatgttcagcgtagagtcgctggagcgggcggagctgtgcgagagcctcctcacttggatccagacatttaatgtggatgcaccatgccagaccgtggaagatttaacgaatggggttgtgatggcccaggttcttcaaaagatagatcctgcatattttgatgaaaattggctaaacagaatcaaaactgaagtaggagataattggaggctaaagataagcaatttaaagaaaattttaaaaggaatcttggattataatcatgagattttaggacagcaaattaatgactttacccttcctgatgtgaaccttattggggagcattctgatgcagcagagcttggaaggatgcttcagctcatcttaggctgtgctgtgaactgtgaacagaagcaagagtacatccaagccattatgatgatggaggaatctgttcaacatgttgtcatgacagccattcaagagctgatgagtaaagaatctcctgtctctgctggaaatgatgcctatgttgaccttgatcgtcagctgaagaaaactacagaggaactaaatgaagctttgtcagcaaaggaagaaattgctcaaagatgccatgaactggatatgcaggttgcagcattgcaggaagagaaaagtagtttgttggcagagaatcaggtattaatggaaagactcaatcaatctgattctatagaagaccctaacagtccagcaggaagaaggcatttgcagctccagactcaattagaacagctccaagaagaaacattcagactagaagcagccaaagatgattatcgaatacgttgtgaagagttagaaaaggagatctctgaacttcggcaacagaatgatgaactgaccactttggcagatgaagctcagtctctgaaagatgagatcgacgtgctgagacattcttctgataaagtatctaaactagaaggtcaagtagaatcttataaaaagaagctagaagaccttggtgatttaaggcggcaggttaaactcttagaagagaagaataccatgtatatgcagaatactgtcagtctagaggaagagttaagaaaggccaacgcagcgcgaagtcaacttgaaacctacaagagacaggtagtagaactacaaaacagattatccgaagaatcaaagaaagcagataaactagattttgaatataagcggctaaaagaaaaagttgacagtcttcaaaaagaaaaggacaggctgagaacagaaagggattctctgaaggaaaccattgaagagcttcgttgtgtacaagctcaagaagggcagctcacaacacaagggttaatgcctcttggaagtcaggagtcttcagacagtctagctgcagagattgttacacctgaaatcagggagaaacttattcgtcttcagcatgagaataagatgttaaagcttaaccaagaaggttcggacaatgaaaaaatagccttattgcagagccttctagatgatgcaaatctacgcaagaatgaactggagacagagaataggctggtgaatcaaagacttctggaagtacagtcacaagttgaagaattacaaaaatctttacaggatcaaggctcaaaagcagaagattcagtccttctaaaaaagaagcttgaagaacatctagagaagctgcatgaggccaataatgaactacagaagaagagagccattattgaagatctcgagccaagatttaacaacagctccttaaaaattgaagaattacaagaagctttacgaaagaaagaggaagaaatgaagcaaatggaagaacgatacaaaaaatacttagagaaagccaaaagtgtcatccgtactttagatcctaaacagaatcaaggagcagcaccagaaatacaagctcttaaaaatcagctccaggaacgagaccgactgttccactcattagagaaagaatatgagaaaacaaagagtcagagagagatggaagagaaatatattgttagtgcctggtacaatatgggaatgaccctgcataaaaaggcagctgaagatagactggcaagcacaggctcagggcagtcatttctggcgaggcagaggcaagcgaccagcagcagaagatcatacccaggccacgtgcagccggccacagcaaggtagagaagttgtgccgctcaatcacagacacctgcacccacaacatacttctgttacacacaagaacatttcaggaaactcagccagcttattttttgtttctcttctatgtcaatacttagtgtttctcattttgaggactttttctctctcctgtatctttgttttagtttctttggtttttattttgtagtcctttcagttatttttaatgtgccaaaaatttgtacatgttcaattaaaaatgttgtataatagtgtaatacttttctttgtatgaaaatgtcctcttcttcaaaggtataggctttgtaatgaattagattttctgccaataattgatatacaatttatattctttattgtgcctgtgtgttaccatgctaagaatgtctttgtttaaagggaattaatctttttatgatgtattaatctgtgttttcaattgttttccaagtacagttcaaataacttgcatatttactatacaaaatggttgacaagtgttctttttgcaaagacttgaatacattggcagaggtgctaatcacatcttccctaaggcacctggaagaattatttgaggaaaaaatgagttttcacattgttttataggaaattaaatttgtccaaagatttggagactatttttaaaacataaatacataaaatttcattatttcctgctatcttgtttgctggcagaagtgaatgtttggtgaggttattttgggataaattacaaaagaaaaaaaattagacactgcattaatttcttgttcttttggaatatcttagtaactgaggatcattttctaacaatgtggttgacataccttcagttgctttccacatctaaaagagttatctttcatatatgtacaagttattggtagtcttatttttgggctgtttgttgacttatgccccatttgttttacttgttctttaatataaacccttccattttttaacaattcctaacacttgatatcttaatatcagtcactaacattagtaacttcttgtatgttatattatggcagatctctttacgttttttctcacatctatctgctagtccaggaatttgttactaaatagattttcttggatatttggttgcctcaaagtgcttacatttgttaacagattgtaaaccacatttatttacattgatgaatgggctgttgaataatcattgtaaagcactttgtatatataaggtgctatataagtgtgaaatatcattcatttataaatgaaatgccttctaactttccatattgacttatgtatttggtcccaaattatatttaagtcttttttcttgcaacgtagcccattttttgaaagcaaaacatttctgaaattaggtcatggtttttttgtttatttttaggttaggtcacttaatataggaggatgttttctcatgtacttgctatttgcaagttcaggtttcatttggttctttatgttaaatacgaataagtaacctcaaatcaagctaaatgtaattaagaattttcagcaactatattcaagtgtttgatttttaaattctttctttctttttaataagaaagatgacctaaaaatcagtggtatttgtttgtcctcagaagccgtagttgaagaaagatattagagtatacacagaactggagccatacattgtgctaattttttacattaagtacagaagtctgagcacagcatgaatgcttctgcctgacaggaccacaaagcagcagaagttagggataaatggagatagccatgagtagaactgctgtagggcttcaggaggctacgcagacctgatcaactgcaaagtttccaaagtaaaagattaaaaactttcagacggttcttacctctacccgtgtttcacaaatagcctgaggatccaactatttttaaagcaaattggggccagacgtggtgcctcacgcctgcaatctcaccatttgggagacctaggtgggggtggatcacttgaggtcaggagtttgagaccagcctggccaacatggtgaaaccccatctctactaaattacaaaaattagctgggcatggtggcatgtggctgtaatcccagctacttgggaggctgaggcaggagagtcacttgaactcaggagccagagactgcagtgagctgagatcgcaccactgcattccagcctgggcgacagagtgagactctgtctcaatcagtcaatcaatcaatcaatcaaattggaatatgagcactaaccttggtaagttaaaattttgggaaaattgtacctgcagaatatgatggatgaaaacaacagccaggtgcagtggctcacgcgtataatcccagcactttgggaggccgagacaggcacatcatctgaggtcaggacttccagaccagcctgtccaacatggtgaaactccgtctctactaaaaatacaaacaattagccaggcatggtggtgtgtgcctgtagtcccagctacttgggagggtgaggcaggagaattgcttgaacctgggagacagagattgcagtgagccgagatggcgccattgcaccccagcctggcgacaagagcgaaactctgtcgcaagaaaaaaaaaaaaaaaaaaaaaaaaaaaaacagtctgtgaactactcactgaatgaattttgttctgtgagatgagaggttttcattttcattttctatttacagccccagtcctaatctcctacccatccacctacccagatattttttctctatctgggttggaaaggccccaggcttttagaggggagttttacttctgacttttttttccccccgagacggagcctcgttccgtcacccaggctgtagtgccgtggcatgatctcggctcactgcagcctctgcctcccgggttcaagcaattctcctgcctcagcctccagagtagctgggattacaggtgcccaccaccatggctggctaatttttgtaatttagtagagatggtgtttcaccatgttggccaggctggtctcaaactcctgacctcgtgatctacccacctcggcctcccaaagtgctgagattacaggcacgagccaccgcgcccagtcgtacttctgacttttcttcagcatctgttgtatgctattattttgatgtttacatttataattttctttcttttttttttttttgtgagatgatgtctcgctctgtcacccaggctggagtgcagtggcgcgatctcggctcactgcaagctccgcctcccgggttcacgccattctcctgcctcagcctcctgagtagcggggactacaggcgcccgccactacgcccgactaattttttgtattttttagtagagacggggtttcaccatgttagccaggatggtctcgatctcctgacctcgtgatccacccgcctcagcctcccagagtgctgggattacaggcgtgagccaccgcgcccagcctacatttataattttcattctcttttacctataaaattcagtgtattagtttcattacataggagaaattatatttctaaacattttatgatgtttaaaaacaaaacaggctgttgtaaaaaaaaaaaaaaaaaaaacttctgaatatactttaggtatcagaaagccaagaataaaatttagctctaacggtggcaactccatgtccggtgtccagctttggacagggtttatgacgtttctgtttctctagtaatgattaatgattcctcaggagattcgtgatgttgtctggtctatctggaaatttaaagtcactaggagctttgcctcatcgtgagtgatgctgtgctgtatttttacaaactctcgcatacagcaccttcctggggccacgttggcttgtgcagtggagcttgtccaggcaccagcatggagcaagtacagggttgctgtgttgggttggagcacactgtcaccacagtgtctgaagtcttataaacaggaagatcattttctgttttccttctaaccagggtgagaaaatacaaagtaaagaactaaagaatattaaaacctagcatttatgttccacagtgtgtatttcagaagtttgtaatccagaaaatatagtagtgtataatatctgaaaagagaatcaagtatacaattgtacatatttttaaagaactttgaaaaactccgtcatatcttttaccatttgtctatttgatagtaatgcagaaaaaagtccctaaagaccctgtgttccaaaatttaccaagattgacatttctattagacatccttaacctaagtgttttaattagattattagactataataaggatgaaattgctgtctgtaattttgttgaggttttattgttaatataataaaagctcaactgtacaaaattaagctaaatgttatccagtcagaaacatcagcctgtggccaggtgcggtggctcacgcctgtaatcccagcactttgggaggccaaggcaggcggatcacctgaggtcaggagttcaagaccagcctggctaatatggtgaaaccccatctctactaaaaatacagtattagccaggcatggtggcaggcgcctgtgatcccagctacttgggaggctgaggcaggagaatcatgtgaacccaggaggtggaggttgcagtaagccgagattgtgccactgcactccagcctgggccacagagtgagactccatctcaaaaaaaaaaaaaaaaaaaaaaagaaacatcagcctgtatattccagtagttctcacagaagaatgaaaatccgtgctgtgcaaatagatcagtagtgagtgagtgttaagtgaaagatgagctaggttgaagaaaatatacattttattgatgagccactttgctatctctccttccttcctccttccttccttccttccttccttccttccttcccttcttttcttttttcttttcttttcttttctccctcctttcttccttcccttcccttcccctcccctcccccaggctggagtgcagaggcacgatcctggctgactgcaaactctgcctaccaggttcaagcgattctcctgcctcatcctccctagtagctaggattacaggcatctgccaccacgcccagctaatttttgtatttttacaaaatacaaagagacggggtttcaccatgttggccaggctggtctctaactcctgacctcaggtgatccgtccaccttggcctcccaaagtgctgggattacaggcgtgtgttactgccccagcctcctatttccttttcgaaagtagcagtttggtttattctcgtttgctaagtaattgtttgaaatatttttcagcctctcctgctccctcacaaaaattcacctgtcattttaatgataacagcatgttaaaaacttggaagtctttatcccaatataagaattatcttgaaacaaaaatctaaattacttttaaaaattctcttaactctgcatttagtctcctattatctagatctctgagtccaggataactccagttatccccagttggatcatgtgtgatttatctgagaaagcatccacaacccacagctagtggaaaccgagctagtttacagccacgtggataagaacatctttgtttctaaagtgagaggaaagtgcttggtatcttgctttttgctgagggcaaaataacaacatgaagacaaagtgctttttgttgtctattcatgaaactgtagaagaatattttgagtttttattcttatattatgaagggattctttgcctagcagtggccgtcaaactgatgtagcattgtacttctcaacagtgaagcctgtgtaataccatacagtaggatgaaagactattctgagcaaaatcaaatgggatgtcagaatctttgaaaattattttatcattttttctattttttcatttttataaattagaaggattttccattcaataaggataatctctcttcctatcattctgtcaaaatggcagtttcttttggtaattatccaacctagtttcattacatttagaaggaggtttcagagcttattcttgataactataataatgatttgaatgttttatatcatgaagttttttctatgaggaaggctattctcaatgtatctgtcgtctaattttttattttctatctataaagaatatttaaataataattggtgtatgttccttttgttgaaaatgttttattgtccagttttaacacagaagtggtctaaagttttgcagcaaatgctgttcagttcccagaagcctaaaaaacataacataatatgctaacagagctaatttccacccaatccctcaaattaccgaagtattaatatttagcttcctttctagaaaacaaggggcagcacaaatggggtggcatccatctcttttaaatcactgatgattttctggggaagtatatatagatgattttattttttaaatagccttttatcaaaccatttcacatgtattatctatatgactatagaaacttataaaacatttaattcatgttgacttaaaacatgggcatccttggattctccacattgactgaaatgatagagaaagggacatttgtttgagaaacaagagacctgtacctaattatggcaagtatatgagttttggtgattgtggggggttataaatgttttcctatgatagataaatatatagatatagatcaggaattacttgatgtctcttcagaagttttctgttttcttataatttccagtaatactctgtaagactcggtttgcatgctgtgtgtgtttgcatgagtatagaaacctaagaacataatggaaggctattaaggcaaattcattcctagaaagtggagtggatcattgggataagaaatagcctaattataaacaaatatgcaggcagagggaagtcctaatacaatgaaaacttgcattatctaaacagatgttcccaaagcaatagtttgcctaaaatcctctgtattacatgattattcagtaaaagagtaaacaaatatctaatttattttctaattgtccttcccttcattgagtattaactaggtgcataatgtagttgtatatgtttactagtaaagggaaaaacacttattttcattttgagactgtttggctattactaaagctgagaaagtgattttaggtcgccaaggatactatgatttgatgagatgagaagaaatctgcggtggctgaaaatcgtgaccaacttggtgttatctagatctgctttatctagtttgcaagccataggctcaattttatgtccttcttacttacacacagtagccccacacagttttgttttaaatgaaggcaaaagtagacatttttaaagtatattcaacattgtgccattatttacctgataaaggtgaaatcagaggtgtccacggcctcaaagtttgggcccatgggactatcaaatccgaattatatctacttagagcttagaggaagaattaggtatcatgagaaaagcaactcctacttgagagaaagaagactaccaaagcatgttgaggctttaacatgggagacttccaggtaggcgttaacacttgagtggtaactagcttgatgaaggaaaataattactttagcagttatgttgtaaaattaataaaaaggactcatgtttattctggtgtatttgtcaacccatgggtagtgattactccgtgtacattctatagtgtgtgtattttatttagtgtcttaatatatagtctttatatagtatcttaatattatttactgttacttctagtcatttatgtagtatattttactgcaaaatttgtagcactttactaatattagatcattattttccctcttcccctctacctttctggcattttctgttatcttagagtcaggaatctaaaggtctaagtctagaaatctgttggaagctgggttggagctactggatatgagttactttttacatgtctccttaagaagactcttttataatgtaatacttagaagccaaatcctttcaaacgcaaacacccttgaaacttgatgctttctgaagttgtattcataaaaattatcccatcttacagttaatcagaagatgttcttacctttggtttgcctgcctcctgaaacacaaacctgcagattgcccctaacttcagcagtgcctccgtcactgcatgtacctaaaagacaggaaagccaagttctgggagctgtcaagtcggaggatcaggaaaatggtggggaagaggtgactggaaaggcaggcactaaagatggcaggctgcaaaagcattctgagttcccctgtaacagataggttttatgaactcagctgttttcttttttctttttttttcttttgagatggagtctcactctgagtctcactctgttgcccaggctggagtgcagtggcacaatctcagctcactgcagcctccacctcccggtttcaagtgattctcccacctcagcctcccgagtagttaggattacaggtgcccaccaccacgcccaactaatttttgtatttttagtaaagacagggtgtcgccatattggctaggctggttttgaactcctgacctcaggtaatccacccgcctcagcctcccaaagtgctgggattattataggcgtgagccaccatgcccagtgaacttggccattttcttacattcatatatagcaaagttttcaacttgtctaccgagagactttctttaggagccaggacttctacatttgtaacttgagtatattaatattcaaatcatagttcaaaaatactgaaatacttgtttattatgttacataaatatggacacaattactgccaaagaatagagagatttgcttatgagaacattctgtcatttgttctgtttgtagatgagagacatgcttttaaagtacaaaacgtttctcttctaccttaccccctgttctactgacgtgctttgcatgagaagctcatctagaagagagcaacgctggaatagagaagtctagaccctggcctttgagggaaaggactgctttttttctctcccaaattagaaaattaaaagtgaaacataacacataaggacgaaatacaatgttctgaatatcttccactaattaattgttgaatgattaagtctctaagtatcttaacttccattgtcttcttgttaacctagacaagagtagattattcagtagccacatgtgacagttaaaattaagtaaaattaaaactatagtttctcagtggcctagccacatttcaagtgttccacagtcacatgtggatagtagttacctatcagacagtacaggtatagaacatttccagtattgccaaaaatgctattcaacagcacttttattgcccagagagaaaataaggacaaaataaaggcagtgaagtaacttaagacaactctgagattttaccaccatacttagagaaagtttttctgttataaaaattaatactaatcctttttaaagaccttggaaaaaatcaaaaccccattcctttaagctagtcttcagtatatatttttctaagaacagattctcaatactttatttttcaagtgataaaatcattttataaatcatttcttaatatcttcagtgttttttccctttttatgtaaactcttttaaaattgatattagctgggcatggtagctcatgcctgtagtcccagctactccagaggtcgaggcaggagcatcgcttaagcccaggaggttcaggctgcagtaaggtctgatcacacctgactgcactccagcctgggtggcaaagcaagacccctgtctctaaaaaaaaataatataaattgatgttatatagttaacatttatcaggcaaattcatatgaatgcttatttcaaataaagattgatagatttaatgatatccttccttttaaatttatatagatctaatgaacattgccaacagttttttttgtttctgtcccttaaacatttcccctgaaagtccacctcaaaggtacatcaagatgcaaacaatttttttatcttcataacttcctgctcttattaacttgtattatgaatcaaattaagttttatgtataaggcatttactattccagtgacttagctaatgaaaacatttaaaaatatgtattaatttacttggcctgctactaaagtgcttaacataactaaatggatctatagtaacatgtctaaattttttaatggaaataagggactaaccataatccttttgagtcagcttggtgcttacaattattttgttaggaaatcttgatgctttcttctttctctttaaatttttgtaatcaagcaacagacttgatccagcagtgtcgaattccaagcaagttatgatgattcttattgtagttcaagtacagatgagtaagtggtgtgacttcagtttattatcttcttggtgacctactttagtatgtgttctgtagcgattcatattagttaagggacgttttcaatatgcttgaaataagaaatagcattttactctaaatacaagaaatgactgtacacaaatgctaatcagtgatttggggccttttaatgtctttaacagcaatcttttatttatttatttatttatttttgagacggagtcttgctgtgtcaccaggctggagcagtggcacgatctcgcctcactgcaacctccgcctcccaggttcaagctattctcctgcctcagcctcccaagtaactgggactgcaggcacatgccaccacatccagctaatttttgtatttttagtagagacggggtttcaccttgttggccaggatgatctcgatctcttgatctcgtgatctgcccgcattggcctcctgaagtgctgggattacaggcatgagccactgcgcccggcccaaatcttttattttttaacagccttagttatttataattcaaatgcactaaaatatcatcgctgtcatgaactttgctgtttacaggttctgtgtaattcagaatgctttgtacttagaaaataatttctaggcttatcttgttttgcagttttcatgttttgacaattgcccaccatttacaatactcaatttttgattatgaaatgaatagtaaaattcaaacatatctaataataatttgccttagtttgattaataaattatatcaaaaaacttggggatagaaagaggcttttttttccccctgtagtatttttaaaactttttagatgagctggatgaaaccttagtacattggagctggagttgtattgagtacagccccaactctgaagccttatattcatgtcttaagtaccattgattgttctgtgaattgttgttagtttcatatttgacattgtagtaatccaccttgcattttagtctttgcaaaaaggatattgctaggtatattcttatttctgattgagtattgaatttacatttttcagaatttcattctttgtcattataatccaaaaacaatgtccacatcagacttggaacttctcacttcaaaaatgaaatacagatttagcagtgttgtacataatgatgtccaagcatttttccacctgtttactgagttttccaaccatttactatgtgttgagattggtgggttttctggctgtttttctgaggtgaatgacttgttacagagcctcagtaagaaatttcaactaaaatcacaaaaacataaagtccaggaaaccaccagaagatggatttttagtgtttttgaaatcttgtatttccttttgatatcatttactcattttaattttacgactgccaacttgttacggtattaattatatgtatgtgtttatatgtatgcatataatatatgtatatgtatatgaagaataaagttaagatttggtcaaactatattttcccattcaagtacaaaaatgttttcaaggctgcaaaaagtgtacagttgttaaacaagttgtaaataaagacttgtataaaaattcaaaaaaaaaaaaaaaaaaaaa

SEQ ID NO: 1169 - DNA, 13302 bp, HOMO SAPIENS
gaagcgcctgtgctctgccgagactgccgtgcccattgctcgcctcggtcgccgccgctttagccgcctccgggggagcggccgcctattgtctttctccgcggcgaaggtgaagagttgtcccagctcggcccgcgggggagccccgggagccgcacgtgtcctgggtcatgaaacttaatccacagcaagctcccttatatggtgattgtgttgttacagtgctgcttgctgaagaggacaaagctgaagatgatgtagtgttttacttggtatttttgggttccaccctccgtcactgtacaagtactcggaaggtcagttctgatacattggagaccattgctcctggtcatgattgttgtgaaacagtgaaggtgcagctctgtgcttccaaagagggccttcccgtgtttgtggtggctgaagaagactttcatttcgtccaggatgaagcgtatgatgcagctcaattcctagcaaccagtgctggaaatcagcaggctttgaactttacccgttttcttgaccagtcaggacccccatctggggatgtgaattcccttgataagaagttggtgctggcattcaggcacctgaagctgcccacggagtggaatgtattggggacagatcagagtttgcatgatgctggcccgcgagagacattgatgcattttgctgtgcggctgggactgctgaggttgacgtggttcctgttgcagaagccaggtggccgcggagctctcagtatccacaaccaggaaggggcgacgcctgtgagcttggccttggagcgaggctatcacaagctgcaccagcttctaaccgaggagaatgctggagaaccagactcctggagcagtttatcctatgaaataccgtatggagactgttctgtgaggcatcatcgagagttggacatctatacattaacctctgagtctgattcacatcatgaacacccatttcctggagacggttgcactggaccaatttttaaacttatgaacatccaacagcaactaatgaaaacaaacctcaagcagatggacagtcttatgcccttaatgatgacagcacaggatccttccagtgccccagagacagatggccagtttcttccctgtgcaccggagcccacggaccctcagcgactttcttcttctgaagagactgagagcactcagtgctgcccagggagccctgttgcacagactgaaagtccctgtgatttgtcaagcatagttgaggaggagaatacagaccgttcctgtaggaagaaaaataaaggcgtggaaagaaaaggggaagaggtggagccagcacctattgtggactctggaactgtatctgatcaagacagctgccttcagagcttgcctgattgtggagtaaagggcacggaaggcctttcgtcctgtggaaacagaaatgaagaaactggaacaaaatcttctggaatgcccacagaccaggagtccctgagcagtggagatgctgtgcttcagagagacttggtcatggagccaggcacagcccagtattcctctggaggtgaactgggaggcatttcaacaacaaatgtcagtaccccagacactgcaggggaaatggaacatgggctcatgaacccagatgccactgtttggaagaatgtgcttcagggaggggaaagtacaaaggaaagatttgagaactctaatattggcacagctggagcctctgacgtgcacgtcacaagtaagcctgtggataaaatcagtgttccaaactgtgcccctgctgccagttccctggatggtaacaaacctgctgagtcttcacttgcatttagtaatgaagaaacctccactgaaaaaacagcagaaacggaaacttcacgaagtcgtgaggagagtgctgatgctccagtagatcagaattctgtggtgattccagctgctgcaaaagacaagatttcagatggattagaaccttatactctcttagcagcaggcataggtgaggcaatgtcaccctcagatttagcccttcttgggctggaagaagatgtaatgccacaccagaactcagaaacaaattcatctcatgctcaaagccaaaagggcaaatcctcacccatttgttctacaactggagacgataaactttgtgcagactctgcatgtcaacagaacacagtgacttctagtggcgatttggttgcaaaactgtgtgataacatagttagcgagtccgaaagcaccacagcaaggcaacccagctcacaagatccacccgatgcctcccactgtgaagacccacaggctcatacagtcacctctgaccctgtaagggatacccaggaacgtgcggatttttgtcctttcaaagtggtggataacaaaggccaacgaaaagatgtgaaactagataaacctttaacaaatatgcttgaggtggtttcacatccacatccagttgtccctaaaatggagaaagaactggtgccagaccaggcagtaatatcagacagtactttctctctggcaaacagtccaggcagtgaatcagtaaccaaggatgacgcactttcttttgtcccctcccagaaagaaaagggaacagcaactcctgaactacatacagctacagattatagagatggcccagatggaaattcgaatgagcctgatacgcggccactagaagacagggcagtaggcctgtccacatcctccactgctgcagagcttcagcacgggatggggaataccagtctcacaggacttggtggagagcatgagggtcccgcccctccagcaatcccagaagctctgaatatcaaggggaacactgactcttccctgcaaagtgtgggtaaggccactttggctttagattcagttttgactgaagaaggaaaacttctggtggtttcagaaagctctgcagctcaggaacaagataaggataaagcggtgacctgttcctctattaaggaaaatgctctctcttcaggaactttgcaggaagagcagagaacaccacctcctggacaagatactcaacaatttcatgaaaaatcaatctcagctgactgtgccaaggacaaagcacttcagctaagtaattcaccgggtgcatcctctgcctttcttaaggcagaaactgaacataacaaggaagtggccccacaagtctcactgctgactcaaggtggggctgcccagagcctggtgccaccaggagcaagtctggccacagagtcaaggcaggaagccttgggggcagagcacaacagctccgctctgttgccatgtctgttgccagatgggtctgatgggtccgatgctcttaactgcagtcagccttctcctctggatgttggagtgaagaacactcaatcccagggaaaaactagtgcctgtgaggtgagtggagatgtgacggtggatgttacaggggttaatgctctacaaggtatggctgagcccagaagagagaatatatcacacaacacccaagacatcctgattccaaacgtcttgttgagccaagagaagaatgccgttctaggtttgccagtggctctacaggacaaagctgtgactgacccacagggagttggaaccccagagatgatacctcttgattgggagaaagggaagctggagggagcagaccacagctgtaccatgggtgacgctgaggaagcccaaatagacgatgaagcacatcctgtcctactgcagcctgttgccaaggagctccccacagacatggagctctcagcccatgatgatggggccccagctggtgtgagggaagtcatgcgagccccgccttcaggcagggaaaggagcactccctctctaccttgcatggtctctgcccaggacgcacctctgcctaagggggcagacttgatagaggaggctgccagccgtatagtggatgctgtcatcgaacaagtcaaggccgctggagcactgcttactgagggggaggcctgtcacatgtcactgtccagccctgagttgggtcctctcactaaaggactagagagtgcttttacagaaaaagtgagtactttcccacctggggagagcctaccaatgggcagtactcctgaggaagccacggggagccttgcaggatgttttgctggaagggaggagccagagaagatcattttacctgtccaggggcctgagccagcagcagaaatgccagacgtgaaagctgaagatgaagtggattttagagcaagttcaatttctgaagaagtggctgtagggagcatagctgctacactgaagatgaagcaaggcccaatgacccaggcgataaaccgagaaaactggtgtacaatagagccatgccctgatgcagcatctcttctggcttccaagcagagcccagaatgtgagaacttcctggatgttggactgggcagagagtgtacctcaaaacaaggtgtacttaaaagagaatctgggagtgattctgacctctttcactcacccagtgatgacatggacagcatcatcttcccaaagccagaggaagagcatttggcctgtgatatcaccggatccagttcatccaccgatgacacggcttcactggaccgacattcttctcatggcagtgatgtgtctctctcccagattttaaagccaaacaggtcaagagatcggcaaagccttgatggattctacagccatgggatgggagctgagggtcgagaaagtgagagtgagcctgctgacccaggcgacgtggaggaggaggagatggacagtatcactgaagtgcctgcaaactgctctgtcctaaggagctccatgcgctctctttctcccttccggaggcacagctgggggcctgggaaaaatgcagccagcgatgcagaaatgaaccaccggagtatgagctggtgcccctctggtgtgcagtactctgctggcctgagtgctgactttaattacagaagtttcagtctagaaggcttgacaggaggagctggtgtcggaaacaagccatcctcatctctagaagtaagctctgcaaatgccgaagagctcagacacccattcagtggtgaggaacgggttgactctttggtgtcactttcagaagaggatctggagtcagaccagagagaacataggatgtttgatcagcagatatgtcacagatctaagcagcagggatttaattactgtacatcagccatttcctctccattgacaaaatccatctcattaatgacaatcagccatcctggattggacaattcacggcccttccacagtaccttccacaataccagtgctaatctgactgagagtataacagaagagaactataatttcctgccacatagcccctccaagaaagattctgaatggaagagtggaacaaaagtcagtcgtacattcagctacatcaagaataaaatgtctagcagcaagaagagcaaagaaaaggaaaaagaaaaagataagattaaggagaaggagaaagattctaaagacaaggagaaagataagaagactgtcaacgggcacactttcagttccattcctgttgtgggtcccatcagctgtagccagtgtatgaagcccttcaccaacaaagatgcctatacttgtgcaaattgcagtgcttttgtccacaaaggctgccgagaaagtctagcctcctgtgcaaaggtcaaaatgaagcagcccaaagggagccttcaggcacatgacacatcatcactgcccacggtcattatgagaaacaagccctcacagcccaaggagcgtcctcggtccgcagtcctcctggtggatgaaaccgctaccaccccaatatttgccaatagacgatcccagcagagtgtctcgctctccaaaagtgtctccatacagaacattactggagttggcaatgatgagaacatgtcaaacacctggaaattcctgtctcattcaacagactcactaaataaaatcagcaaggtcaatgagtcaacagaatcacttactgatgagggagtaggtacagacatgaatgaaggacaactactgggagactttgagattgagtccaaacagctggaagcagagtcttggagtcggataatagacagcaagtttctaaaacagcaaaagaaagatgtggtcaaacggcaagaagtaatatatgagttgatgcagacagagtttcatcatgtccgcactctcaagatcatgagtggtgtgtacagccaggggatgatggcggatctgctttttgagcagcagatggtagaaaagctgttcccctgtttggatgagctgatcagtatccatagccaattcttccagaggattctggagcggaagaaggagtctctggtggataaaagtgaaaagaactttctcatcaagaggataggggatgtgcttgtaaatcagttttcaggtgagaatgcagaacgtttaaagaagacatatggcaagttttgtgggcaacataaccagtctgtaaactacttcaaagacctttatgccaaggataagcgttttcaagcctttgtaaagaagaagatgagcagttcagttgttagaaggcttggaattccagagtgcatattgcttgtaactcagcggattaccaagtacccagttttattccaaagaatattgcagtgtaccaaagacaatgaagtggagcaggaagatctagcacagtccttgagcctggtgaaggatgtgattggagctgtagacagcaaagtggcaagttatgaaaagaaagtgcgtctcaatgagatttatacaaagacagatagcaagtcaatcatgaggatgaagagtggtcagatgtttgccaaggaagatttgaaacggaagaagcttgtacgtgatgggagtgtgtttctgaagaatgcagcaggaaggttgaaagaggttcaagcagttcttctcactgacattttagttttccttcaagaaaaagaccagaagtacatctttgcatcattggaccagaagtcaacagtgatctctttaaagaagctgattgtgagagaagtggcacatgaggagaaaggtttattcctgatcagcatggggatgacagatccagagatggtagaagtccatgccagctccaaagaggaacgaaacagctggattcagatcattcaggacacaatcaacaccctgaacagagatgaagatgaaggaattcctagtgagaatgaggaagaaaagaaaatgttggacaccagagcccgagaattaaaagaacaacttcaccagaaggaccaaaaaatcctactcttgttggaagagaaggagatgattttccgggacatggctgagtgcagcacccctctcccagaggattgctccccaacacatagccctagagttctcttccgctccaacacagaagaggctctcaaaggaggacctttaatgaaaagtgcaataaatgaggtggagatccttcagggtttggtgagtggaaatctgggaggcacacttgggccgactgtcagcagccccattgagcaagatgtggtcggtcccgtttccctgccccggagagcagagacctttggaggatttgacagccatcagatgaatgcttcaaaaggaggcgagaaggaagagggagatgatggccaagatcttaggagaacggaatcagatagtggcctaaaaaagggtggaaatgctaacctggtatttatgcttaaaagaaacagtgagcaggttgtccagagcgttgttcatctctacgagctcctcagcgctctgcagggtgtggtgctgcagcaggacagctacattgaggaccagaaactggtgctgagcgagagggcgctcactcgcagcttgtcccgcccgagctccctcattgagcaggagaagcagcgcagcctggagaagcagcgccaggacctggccaacctgcagaagcagcaggcccagtacctcgaggagaagcgcaggcgcgagcgtgagtgggaagctcgtgagagggagctgcgggagcgggaggccctcctggcccagcgcgaggaggaggtgcagcaggggcagcaggacctggaaaaggagcgggaggagctccagcagaagaagggcacataccagtatgacctggagcgactgcgtgctgcccagaaacagcttgagagggaacaggagcagctgcgccgggaggcagagcggctcagccagcggcagacagaacgggacctgtgtcaggtttcccatccacataccaagctgatgaggatcccatcgttcttccccagtcctgaggagcccccctcgccatctgcaccttccatagccaaatcagggtcattggactcagaactttcagtgtccccaaaaaggaacagcatctctcggacacacaaagataaggggccttttcacatactgagttcaaccagccagacaaacaaaggaccagaagggcagagccaggcccctgcgtccacctctgcctctacccgcctgtttgggttaacaaagccaaaggaaaagaaggagaaaaaaaagaagaacaaaaccagccgctctcagcccggtgatggtcccgcgtcagaagtatcagcagagggtgaagagatcttctgctgaccctcttcctctctgctgaggcagctgcctcctgatcctggccagcccacctctcctgctgtccccgcgtgcacaagtctcttacactggacgcccactgctcctcagcgtccagtcctcctgggcggccccaggtcctggacaataagcaacagatgatattgagtgtcgggtggggaaggaggcccagactctgcttcggccatgatttgtgactgcccaggactctcaggttgggctggccctactcaggattacactgaaagtaatggcctcgtaagtacaggtgatggttttggacacgtcaggaattcctaaaggctgaaagagtgtatccaagtaaggtctgaacctccgaatgccttttatttgggggaacacaaaaccaaacagcagatgttttggacttgatctgtgtacgtacatggggacctgtctgcatatacacacggggaatgccagaagaaggcccagtctgcaccaggcgtctggtcaacttagcacaagggcagtgcctggacggacccggagcccccgcatatcagcagttcacccagtactcctcagagactggtttccctctaaacccatcccgggcacataccacccgtgttttgcatgtatttctcatttcattttagggatgacaaacatttgtgaaaccagtgagagaaggcttgatgtgtataaaagacgtgatgtgcaccacctcgatctcggtgtttcaggcactaaagcaacaaaacaacccatagtatctcattctgtcatcagatccagaagaaatatcctggttttccagcatgtttacccacatgttttggccatggataaagtgaagaggcctactcaccattatccctgcagcgtgacaccttttgattgtcactgaccactcagaaggggccacggcctcctggctgtgttcctgagcccccgtcgtgcctctcccagacagcagctgtctggcccttgctgggtgagggcacaccactgccaggggtcagcctcgcacccaggccaggcagaagctgtgctctgaagctaggacagctggctgagaagtgggttcaggcgaagggtgaagccatgtgtagcagttcctgccagtgcagatctggagaggagctggcccggaaggcgtggttgtgaaagcgcccttcttatgttaggaggccttggcaaaattggatttcttcaaaaatacatgtaaaggtctgttgttgaattgtactctgcccctggaagcagatacagatggctgcctgctgctcggctttgcttttgcttttcccaccgtgttttcatctttgttcacttgaggctttccccagctggtgtgtgcaggacagttcatggtaatgttgccctctgaggccccgtacaccagaagggaggccctggaaaattttgtgcttccaacgtggccttcaattcttgcttttttgcccctcggaagcatggggcttttgagcacacttaaaaaaagaaaaatctgtaacttggtgcttattgatgaattgcaagctggccttgcagatggagatatttatctttcagtttatttgaaagaggtctggtttaaaatttgtagcctacatttgttttatttattgtatttgtgtgtttgtgtttgtttttttttaagggtgagccaggtctagcccaacagtctaaactatccagtcaataccgagtgaagtggcagccagcactgttcactctgtgtcttttgaagtgccttgaaggcccagatgaaattttaaagggagggggtccatgtccttccctcccccaccccgcctcattctttaatcaaaggatgtcttctcccttgtttgagaatgaagaaactcgccacctctgacctacctttgcctttttctgtcatggagaatactcacccttcagaaacagaccaaaggccaaaacctgctgatttttctattgaaaatatgtccccttgcaaagaccctaaacaaaaagttaagtttctttctttcacctatttgtacaactccaagttacagctgaatctgtcgtgactttcctgagatctacccggggcttggctgtctgttctgggcactggctccgagttcccctcctgggatttgcaggagggcagtactgaacctgcattcttctccttgtaaatgtaggccgggtgcccctgttctccgggtttggaacaatacgaggttggtgctgatgggatttacttgcgtacgtgctcttcacaaaaacaccgtggatgctgaagttagagcacgtcgccacagagcttgacatcaatgttagagggtctcttactccccgcccagctgtgatgtttcatctgctttggttgttttggtggtcttttttaaaaatagagatttcacatctgcccagaccccactcaaaacgatttggtcaggttctggttggacaagtttaaaatcaaagtagtgcccggaattccctcaaaccacccaacttcatccaggaatacagtctgcagtgcagcaacagaaccgcttaccaagaactgtgcttacatacctttgtcatctctcttccccccttggaagttgtcctcagggggatttgttcctgtcctggggatttacctgggatggtggctgcctgtgcttttgctcatggccttgacagtgctctagttgctggatctaatggcctgtcttggtttctatcacatgagaaggggttgtttttttggggtgactcggactgaattccccatactgtttccacgccgggacaccatgttctccatcaagctaaagaaatcacgtgcctgaaactgtgcttaagttttgggggaaagatggagttcctatccagagcccccagatttccagaatcgagtgagcttcctggaaggagactgcgtcttctctcaattccagtcatctcagtcgttgtcgttaggtgacatgtgcactttaaatgctctcatcggttggcttcattttcaagacaatcaaatgtattgactgtgttttcttcttagaaaatggagagggttaaaaacatgcaaactgccactttcaacctttgccagtattccctctacccccgtgagagctatctggggggaagaatccttaccaaggtttttttggaaaggtacgaatcttaacttttttccccttctgtgtctcagggtaatactattcagagtcgcccctttgctcattttctcccgtatttgttaccttcctgaggcctcagtattagtcgtgagcacaaagttttgagacctttggcgttgtttcttgatgtgggaggggaggtgttagtgcatgcaagggttgaactagatagaccctgccttagtagagggtgggactataaccttagaggccagaacttgatccagaagttgctgtccacagaagtgctttctatttcatcatttttgtttctagggctctttttctgtagccaggtcttcccaaggattttagtatttgcattggagttgaggtttactctaatgatggtggcccagctgtgcccagaggacagccaggcaggccctgggagggagtttagaaagacagtcctggtgaatgggcttcaagtggtcacaaagagggtggctgtgaggtgaccccagacactgcagaacgatgtgcaccctctgcgttttggatgtccttggaatgtgggagcctagaaataaccctgtggatggaattggggcagcggctgctggagatctgtgtgccttgccttccttcagcaggaccgtctaggtgcgcagccacctatggatgcgtcccagccagccccgtcgctctcgtccatcctcagagacaaagaagagggcagggagtttgggcttggttttgaactttcctttcaatgtagcaaagcattcctagttaaccagagccttggaatctactgcctgctggccaggctttaaaatgaaaagtgttttaatgctgccataaaagggaggcgggggggaggaagggaaaataaaggcatctttccaagtactcatctaatttaattgtcaaaagattgataggccatgaattacttctccatctcactaagggttaaaggcgtgcaaccccccactggctgtgtcccctgccaccgaagtgagtgacctgccctacaaccaggtgggaccacctgtgctgcagtccggaggggcttctgcaggaagcactcaccccccacaccttccccggcctgagcttcccctacctttcgtcaccacctgagggcatgagcacaggccatggggcgtgcctggtgagtctgcctgtggttcaggcttagcctgtggtctcctgtgtgctgctgcccgcatgggatgcgcaggggaggcgtggggatccgcaggagggtggttgggatacaccggatacctctgctctcattgcttgtttgcaaatgctctatggacatttgtgtgctaaatcctattaaataaaaaagacgggttaaaacccagatgctgtatattcatttgtaattatgtataaagtgaagcagttttaaactgtaaagatttttttcagtgtgttttctcgaattttgccacaacatactggcttcgtattttatttatctttctttctagttaccagcttcagacccttgtaaagtctccctcagccctttcaaaaaataataaatttcctgtgaagtt

SEQ ID NO: 1170 - DNA, 4445 bp, HOMO SAPIENS
gtcagcgctgcctgagctcgtcccctggatgtccgggtctccccaggcggccacccgccggctcccatcgtgacctccagccgcagcgcctcccacgccggccgccgcgcgaggggagcgctcgggcgcgccgggtgtggttgggggaaggggttgtgccgcgcgcgggctgcgtgctgtgcccactcaaaaggttccgggcgcgcaggagggaagaggcagtgcccgccactcccactgagattgagagacgcggcaaggaggcagcctgtggaggaactgggtaggatttaggaacgcaccgtgcacatgcttggtggtcttgttaagtggaaactgctgctttagagtttgtttggaaggtccgggtgactcatcccaacatttacatccttaattgttaaagcgctgcctccgagcgcacgcatcctgagatcctgagcctttggttaagaccgagctctattaagctgaaaagataaaaactctccagatgtcttccagtaatgtcgaagtttttatcccagtgtcacaaggaaacaccaatggcttccccgcgacagcttccaatgacctgaaggcatttactgaaggagctgtgttaagttttcataacatctgctatcgagtaaaactgaagagtggctttctaccttgtcgaaaaccagttgagaaagaaatattatcgaatatcaatgggatcatgaaacctggtctcaacgccatcctgggacccacaggtggaggcaaatcttcgttattagatgtcttagctgcaaggaaagatccaagtggattatctggagatgttctgataaatggagcaccgcgacctgccaatttcaaatgtaattcaggttacgtggtacaagatgatgttgtgatgggcactctgacggtgagagaaaacttacagttctcagcagctcttcggcttgcaacaactatgacgaatcatgaaaaaaacgaacggattaacagggtcattcaagagttaggtctggataaagtggcagactccaaggttggaactcagtttatccgtggtgtgtctggaggagaaagaaaaaggactagtataggaatggagcttatcactgatccttccatcttgttcttggatgagcctacaactggcttagactcaagcacagcaaatgctgtccttttgctcctgaaaaggatgtctaagcagggacgaacaatcatcttctccattcatcagcctcgatattccatcttcaagttgtttgatagcctcaccttattggcctcaggaagacttatgttccacgggcctgctcaggaggccttgggatactttgaatcagctggttatcactgtgaggcctataataaccctgcagacttcttcttggacatcattaatggagattccactgctgtggcattaaacagagaagaagactttaaagccacagagatcatagagccttccaagcaggataagccactcatagaaaaattagcggagatttatgtcaactcctccttctacaaagagacaaaagctgaattacatcaactttccgggggtgagaagaagaagaagatcacagtcttcaaggagatcagctacaccacctccttctgtcatcaactcagatgggtttccaagcgttcattcaaaaacttgctgggtaatccccaggcctctatagctcagatcattgtcacagtcgtactgggactggttataggtgccatttactttgggctaaaaaatgattctactggaatccagaacagagctggggttctcttcttcctgacgaccaaccagtgtttcagcagtgtttcagccgtggaactctttgtggtagagaagaagctcttcatacatgaatacatcagcggatactacagagtgtcatcttatttccttggaaaactgttatctgatttattacccatgaggatgttaccaagtattatatttacctgtatagtgtacttcatgttaggattgaagccaaaggcagatgccttcttcgttatgatgtttacccttatgatggtggcttattcagccagttccatggcactggccatagcagcaggtcagagtgtggtttctgtagcaacacttctcatgaccatctgttttgtgtttatgatgattttttcaggtctgttggtcaatctcacaaccattgcatcttggctgtcatggcttcagtacttcagcattccacgatatggatttacggctttgcagcataatgaatttttgggacaaaacttctgcccaggactcaatgcaacaggaaacaatccttgtaactatgcaacatgtactggcgaagaatatttggtaaagcagggcatcgatctctcaccctggggcttgtggaagaatcacgtggccttggcttgtatgattgttattttcctcacaattgcctacctgaaattgttatttcttaaaaaatattcttaaatttccccttaattcagtatgatttatcctcacataaaaaagaagcactttgattgaagtattcaatcaagtttttttgttgttttctgttcccttgccatcacactgttgcacagcagcaattgttttaaagagatacatttttagaaatcacaacaaactgaattaaacatgaaagaacccaagacatcatgtatcgcatattagttaatctcctcagacagtaaccatggggaagaaatctggtctaatttattaatctaaaaaaggagaattgaattctggaaactcctgacaagttattactgtctctggcatttgtttcctcatctttaaaatgaataggtaggttagtagcccttcagtcttaatactttatgatgctatggtttgccattatttaataaatgacaaatgtattaatgctatactggaaatgtaaaattgaaaatatgttggaaaaaagattctgtcttatagggtaaaaaaagccaccgtgatagaaaaaaaatctttttgataagcacattaaagttaatagaacttactgatattcctgtctagtggtataatatctcaggaatcttggctgagggtttggaactgtgggtagagtagagggccaggagtccagtaatagaattcttgcaccatttctggaacattctagctctgggaggtcacgtaaccttcttggggtagttcagtggtttagtggtttataatccaggtgtgcgtcagaatcatctgaggaactttgctaaaatacaaaaatctggcctaagtagctccagatctaccttcataaaggaatctgaccactcctggatttggtaatttccaagttctgaaaattttacttaggatttaataactattaacatctgtccctacataggttttctttcctacttatataccttatgttctcttcattctaaccttcatcagtaatagggaaatgttttaattttatttttttagttgaagggtaatgtaccaaaaaatatagttcagtgaattaaaatgaacacacatgtgcaaccatcaattcaggtcaagaaatagaagattgtagcacacaaaagcctactcagccattctcccagtcactacttccttccttacccctgggttatttttgaaatgacacttgatgtatttccctctgttgctgttatgagaacattgctacagccaagtgttgtgtttctgtgtgcataggttgatacttaattatctccccactttttaataaacttttaatttggaaataattttagattgacagaaaagttgcaaagatagtgaggaaagttcctgtctactctttgctcagcttcccttaatgttaacattttatatagcaagatgcatttgtcaaagctaacaagttaacattggtacaatcactgttaattaaactgcacacaatattcagatttcaccacttttccactaatattctttcattgttctaggattcaattcaggagaccacatttcatctagccctcttttttaaaagtaaatacttttcagcacttacaggagttaactgagctggggcatcatggtgtatagacgccctgacactggtcatcttggaattcatttagtttgtcagtgggtgccctgacattctgtcacaacatcaatttgggaacatggcattatatttttatctttgaacttttttctttttggatgacatttgattaatgcgtcatcttggaacacattatcttttttcttggttatgtgatcaggaagattaatcagtttttcctgttcttggtataattcctgcttttcacatacctgtcccttacagttctctatatatacccttcccttattacacagagagaaatatctatctatactttttacacaaaatatacttcaaaagaaacaaaacagccacaattattaactttttaaataaatgagaatttaattatatcctaaaaaaaaaaaaaaa

SEQ ID NO: 1171 - DNA, 7531 bp, HOMO SAPIENS; identical to SEQ ID NO: 28

SEQ ID NO: 1172 - DNA, 7757 bp, HOMO SAPIENS
ctcactgtccctggaatcttcaagggagttactgcattacatcatcagaaacaaggcatttctatattactatggaaagatttcgtctggagaagaagttacctggtcctgatgaagaagctgttgtggatcttggcaaaactagctcaactgtgaacaccaagtttgaaaaagaagaactagaaagtcatagagctgtatatattggtgttcacgtcccgtttagtaaagagagtcgtcggcgtcataggcatcgcggacacaaacatcaccaccggagaagaaaagataaagaatcagataaagaagatggacgggaatctccttcttatgatacaccatcccagagagttcagtttatccttggtactgaagatgatgatgaagaacatattccccatgatctcttcacggaaatggatgaactgtgttacagagatggagaagaatatgaatggaaagaaactgctagatggctgaaatttgaagaggatgttgaagatggcggtgaccgatggagtaaaccttatgtggcaactctctctttgcacagtctttttgaactaaggagttgcatcctcaatggaacagtcatgctggatatgagagcaagcactctagatgaaatagcagatatggtattagacaacatgatagcttctggccaattagacgagtccatacgagagaatgtcagagaagctcttctgaagagacatcatcatcagaatgagaaaagattcaccagtcggattcctcttgttcgatcttttgcagatataggcaagaaacattctgaccctcacttgcttgaaaggaatggggaaggcctttcagcctcccgccactctttgcgaacaggtctgtctgcctcaaacctttccttgagaggagaatcacctttatctcttcttcttggtcatcttcttccttcttcaagagctggaacccctgcaggctcaaggtgtacaaccccagtacccacccctcaaaacagtcctccttctagccctagcatcagccgcctgacctccagaagttcccaagagagtcagcgtcaggccccagaactactggtttcacctgccagtgatgatattcccacagtagtaattcatccgcctgaggaagacttagaagcagcgctgaaaggcgaggagcagaagaatgaggaaaatgttgacttaactccaggtattttggcctctccccagtctgctcctggaaacttggacaatagtaaaagtggagaaattaaaggtaatggaagtggtggaagcagagaaaatagtactgttgacttcagcaaggttgatatgaatttcatgagaaaaattcctacgggtgctgaggcatccaacgtcctggtgggcgaagtagactttttggaaaggccaataattgcatttgtgagactggctcctgctgtcctccttacagggttgactgaggtccctgttccaaccaggtttttgtttttgttattgggtccagcgggcaaggcaccacagtaccatgaaattggacgatcaatagccactctcatgacagatgagattttccatgatgtagcttataaagcaaaagacagaaatgacctcttatctggaattgatgaatttttagatcaagtaactgtcctacctccaggagagtgggatccttctatacgcatagaaccaccaaaaagtgtcccttctcaggaaaagagaaagattcctgtgtttcacaatggatctacccccacactgggtgagactcctaaagaggccgctcatcatgctgggcctgagctacagaggactggacggctttttggtggtttgatacttgacatcaaaaggaaagcaccttttttcttgagtgacttcaaggatgcattaagcctgcagtgcctggcctcgattcttttcctatactgtgcctgtatgtctcctgtaatcacttttggagggctgcttggagaagctacagaaggcagaataagtgcaatagagtctctttttggagcatcattaactgggattgcctattcattgtttgctgggcaacctctaacaatattggggagcacaggtccagttctagtgtttgaaaaaattttatataaattctgcagagattatcaactttcttatctgtctttaagaaccagtattggtctgtggacttcttttttgtgcattgttttggttgcaacagatgcaagcagccttgtgtgttatattactcgatttacagaagaggcttttgcagcccttatttgcatcatattcatctacgaggctttggagaagctctttgatttaggagaaacatatgcatttaatatgcacaacaacttagataaactgaccagctactcatgtgtatgtactgaacctccaaaccccagcaatgaaactctagcacaatggaagaaagataatataacagcacacaatatttcctggagaaatcttactgtttctgaatgtaaaaaacttcgtggtgtattcttggggtcagcttgtggtcatcatggaccttatattccagatgtgctcttttggtgtgtcatcttgtttttcacaacattttttctgtcttcattcctcaagcaatttaagaccaagcgttactttcctaccaaggtgcgatcgacaatcagtgattttgctgtatttctcacaatagtaataatggttacaattgactaccttgtaggagttccatctcctaaacttcatgttcctgaaaaatttgagcctactcatccagagagagggtggatcataagcccactgggagataatccttggtggaccttattaatagctgctattcctgctttgctttgtaccattctcatctttatggatcaacaaatcacagctgtaattataaacagaaaggaacacaaattgaagaaaggagctggctatcaccttgatttgctcatggttggcgttatgttgggagtttgctctgtcatgggacttccatggtttgtggctgcaacagtgttgtcaataagtcatgtcaacagcttaaaagttgaatctgaatgttctgctccaggggaacaacccaagtttttgggaattcgtgaacagcgggttacagggctaatgatttttattctaatgggcctctctgtgttcatgacttcagtcctaaagtttattccaatgcctgttctgtatggtgttttcctttatatgggagtttcctcattaaaaggaatccagttatttgaccgtataaaattatttggaatgcctgctaagcatcagcctgatttgatatacctccgttatgtgccgctctggaaggtccatattttcacagtcattcagcttacttgtttggtccttttatgggtgataaaagtttcagctgctgcagtggtttttcccatgatggttcttgcattagtgtttgtgcgcaaactcatggacctgtgtttcacgaagagagaacttagttggcttgatgatcttatgccagaaagtaagaaaaagaaagaagatgacaaaaagaaaaaagagaaagaggaagctgaacggatgcttcaagatgatgatgatactgtgcaccttccatttgaagggggaagtctcttgcaaattccagtcaaggccctaaaatatagtcctgataaacctgtgagtgtgaaaataagttttgaagatgaaccaagaaagaaatacgtggatgctgaaacttcattatagaattgaaccaagaggcattatacatatagatatatacatatgtaatgtgtgcgtatcatgtcactatatataagaatattgtatgtcatgctgtttatgtgtgactaccgggtttttaaaagtagtgtctggagtttgtaatgagcaccgtggagactatgtatttaatgaaatgctctctttgaagtgaggtacatggttcttaactattcaaatatttattctgttagaaaaaaaaattttctgttttgcaatagaaggatgtggagaaatgctttcagtctacttttcttaaatctctgttcatcagtggcaattcgtaaaaaccttaagtgatactttgtttatatgtttataatttttaggtgtttcctgaaattttcacatattatttcacttttgttagtgctttatgggaagaatagggagtctataccagtgctgtgggaaaaatggtaacatttcagggcttctctatttgtgtttcatttctgtagatgtccatcgtgtttcactaactggcgttttcttagccatagagatgactgtagaacaatagaaactttaataatgatagtttttaacttttatgtttaaattttttttaaatcttaaaaccttcatatctaggtatccattgtgacagacaagtaaaattgcaggtgatttgataattaagcacccataccatttataacttctgaatttaaaaagttatacaatgccagtttgcaatagttgattttgatgcctttgtagaatattttttctgaatccttatgctcttttaaagccaatgattcccactctgttctctgccttgtctctctttgtcttaaaatgctttagtttccatcaggttcaagttcttgactattattctcttataagtagtaggcgtaaataatcaggagttagaattctctcagaagggtctatgatcagtattactttattaagaattacctttcattttctctttatgttattctttcacttttgtagattacatttaatagcttgttacctgtgattttattttaaaatatttattttgatatgatgcttaaatattatataaacatttggaaaagtaacaaatagagtaaattgttaatgtaaatagttggtgcttactttcatttatgtttattatcttaaagcaattgatagattttacatctttgatataaagcactgccatatttatattttaaaaggaaattagacattttatatgtagctcagattaatgacatttttattttgtgtattagtttttgcttttctgagctttttaaagtctaacaaatctttttagtcatcttttatatacttttagttccacatgaaataaatgttgttaagcctgtaggactggatgaatggggttgtgaaactgatttgacaagagaataatttacaaaaatcaaatgagtattgagaagccacagaaatatcaaaaatggtgacatcactattaggatgaaaattttatgaaattccaatgctccctttaaccatataattaaattacaaaggtatacataattaatctaataaaggatcatgaggaatgccaaaagctgaaattttagcaagtctggtgttttaaattcattataaactatttattaactaatgtaatgtcctcctctaagaccatattgtaagagtcttgttaaaatgatggattcaacttctgcctcggatgagaggttggaaatgtagctgcttttctttagaaaatatgtagctgtcatcatttggtactgcctaaaaagagttagactctattggcaattgatagagtattacccacggtgcttattattgtttatgagcttccattgtaatgattcctttttatttgtagcagcataattatttccaaagaccccagtatttgctgctatttttaaaactcccctgatgtacctgaacaagaggatttcctcacatcatttccttgtgtctggacatcaggggtaacaactgtacttactttacaggaagaaattttaaaactgaaaactacctgggatcatagtgtttctgtgattttatttaattgtgtatagtaattatccagtgccagaaaaaccgtcacttgcaaaatactttgcactcaaaatgtttttacaatgcttctaaatgttactggtttctgctttcttttgactacttgactgacaaaatgatctgactactccatttaagagcaaaggtaactcatgtttaggtaattaactgcttgttttaagtgattatatttcttccactgtttttgaaaaataatcaaagatagcattcattgagagacagtgacagatataatttactacatatattgatttttaaataaagttgccttaaataagtgtatgtaagcagtagtagttgctatgtactgatttacctcaaggtgcaaaataattaaacctgtacatattccatttacaaaataaattcagccctgcactttctttagatgccttgatttccagaatggagcttagtgctactgaataccctggccacagagccacctcaggatattcttttctccaccctagtttatttatttatagatatctgtttacaaagtctgtagtaaatcctgatgctgaccatctgaaatgtactttttttctgaatgctgtttcaatctaaaatagcagcttttgagaaaacaatgatgtaaattccttatgataaaaggatgattctatatattctttaatgatattaaatatgccgaagccaagcacacagtctttctaaagtgtgtgtatgtttgtgtgaatgtgaatgatactgatcttatatctgttaaaagttgttttaaaaagctgtggcatcccattgttcatatttgccaagtcttctgtaaagatgtctaggacgaaatattttatgtgctaatgcatgtatttgtaaaccagatttgtttaccactcaaaattaacttgttttcttcatccaaaaaagtttatttcttccacgtacttaaattttctgtgtgggtataatatagctttctaatttttttctttcacaaaggcaggttcaaaattctgttgaaagaaaaatgctttctgaaactgaggtataacaccagagcttgctgtttaaaggattatatgatgtacatcagttctataaatgtgctcagcagtttaacatgtgaatcctgttttaaagtgctcagatttcaactgtgtaagccattgatataacgctgtaattaaaaatgtttatatgaaataacttaatgttttaaatttatttatgtagatcacatcatttttatcgtatgcagtgcaaatatgtgaaatgtcttttggtttattccaacaattatttattttagaaagtaagtttaaagactttaaggacattcaaagtttaaaatagtgttcaaattgcaaaatttggcaatcttcatataaattggtttcttttctaacttttcaaaaactaacattaaatgtcaattataggaaaacatagttggaaatgtaatcatccaaagatcatttttaaaatgaaatttaattagcacatattgaacatttgacttaattgttaaaccccagttttgttttgtttttttaatcagatttttgcacactgattagtttttgtgttgtggcttttgttgctttattattcaaggttttttttttttttcttccccatgggggagattgtcttccaatgtttaactacgtttaaataaataaaaattgaattttattgttcatttatataaaatctgataccttgatgtaatttcacaatacagttccaatttttatggcttttataattacaatgatattttcttctataataaaatccaaagtaaacatttaaattgtagaactgatatttttcatttatatgaagtataagcctctactgggtctatattgtgaatcatcctgcctttcaaatttgtttcataattgttagatgaaaactatttttttggagatgttactgaagttgattgagcaataaaagtctacttaatta

SEQ ID NO: 1173 - DNA, 1683 bp, HOMO SAPIENS
agaaacggcagtggcagcagcgtccggagcagccgcagccttctggaagctccaggcggtctttctgccgagcctcggtcccggcccccatcctccccgccccatcggttgttgtctgggcggatttaaacagtcaagtaaaatcaagctgggtaatcatggcagaaggtggatttgatccctgtgaatgtgtttgctctcatgaacatgcaatgagaagactgatcaatctgttacggcagtcccagtcctactgcacagacacagagtgtcttcaggaattaccgggaccctctggtgataatggcatcagtgttacaatgatcttggtagcctggatggttattgcattgatcttgttcttactgagacctcctaatctaagaggatccagcctacctggaaagccaaccagtcctcataatggacaagatccaccagctcctcctgtggactaactttgtgatatgggaagtgaaaatagttaacaccttgcacgaccaaacgaacgaagatgaccagagtactcttaaccccattagaactgtttttccttttgtatctgcaatatgggatggtattgttttcatgagcttctagaaatttcacttgcaagtttatttttgcttcctgtgttactgccattcctatttacagtatatttgagtgaatgattatatttttaaaaagttacatggggcttttttggttgtcctaaacttacaaacattccactcattctgtttgtaactgtgattataatttttgtgataatttctggcctgattgaaggaaatttgagaggtctgcatttatatattttaaatagatttgataggtttttaaattgctttttttcataaggtatttataaagttatttggggttgtctgggattgtgtgaaagaaaattagaaccacgctgtatttacatttaccttggtagtttatttgtggatggcagttttctgtagttttggggactgtggtagctcttggattgttttgcaaattacagctgaaatctgtgtcatggattaaactggcttatgtggctagaataggaagagagaaaaaatgaaatggttgtttactaattttatactcccattaaaaatctctaatgttaagaaaaccttaaataaacatgattgatcaatatggcagatgatttacagtccattatatgacatttgtaagccactcaacactagccttacaaggttcatgaaaggaggaaaacattaattctttctgcctttgctgatataatccacatagtaataatttaagctataatttatttttaaaatgagtgcctcttgggaagcttcttttctgttctaacagttccctgttaaaatgaaaatcttaggccagtgcagtggctcacacctgtaatctcagcactttgggaggctgaggtgggtggatcacttgaggtcaggagttcgagaccagcctggccaacatggtgaaaccctgtctctactaaaaatacagaaaaattagccagggttggtgcatgtgcctgtaatcccagctactcaggaggccaaagcaggagaattgcttgaacccgggaggtggaggttgcagtgaaccaagatcgcaccactgcattccagcctaagcaatagagcgagactccctcccaaaaaaaaaaaaaaaaaaaaaaaaaaa

SEQ ID NO: 1174 - DNA, 472 bp, HOMO SAPIENS
  misc_feature (346)..(346): n is a, c, g, or t
ttgtgtaagcgcttcaccttattcctacaataaggagaagtgcactaacaaaatgaacaatgcagcaagggcttcagtcgcagctcaggtcttatcaaacaccagagaaccctcaatgggagaagccttatgagtgtgacaactgtggaaagacagttccttttttgttagtatcacttctacttattgtagaaatatgctttcattattgcatctactcacatttctcactcggtttctggcaccagcaatctcttccatatttataatatcagtcaaaaactctggaattcaaatataacaagacttttctggtcacctttgatagttaatgacttgggcattntgatatattatctcctgctgtatgtattttgtttagtagaaattgaatcattatccacaatcctttatagaactatccaagtccctgtttttatgctagtttccaaggcttggtccttcaaggttt

SEQ ID NO: 1175 - DNA, 949 bp, HOMO SAPIENS
gcgctccgggcctggaatccctacgcgtccctttgggtttagcacgatgagctcaatcggcactgggtatgacctgtcagcctctacattctctcctgacggaagagtttttcaagttgaatatgctatgaaggctgtggaaaatagtagtacagctattggaatcagatgcaaagatggtgttgtctttggggtagaaaaattagtcctttctaaactttatgaagaaggttccaacaaaagactttttaatgttgatcggcatgttggaatggcagtagcaggtttgttggcagatgctcgttctttagcagacatagcaagagaagaagcttccaacttcagatctaactttggctacaacattccactaaaacatcttgcagacagagtggccatgtatgtgcatgcatatacactctacagtgctgttagaccttttggctgcagtttcatgttagggtcttacagtgtgaatgacggtgcgcaactctacatgattgacccatcaggtgtttcatacggttattggggctgtgccatcggcaaagccaggcaagctgcaaagacggaaatagagaagcttcagatgaaagaaatgacctgccgtgatatcgttaaagaagttgcaaaaataatttacatagtacatgacgaagttaaggataaagcttttgaactagaactcagctgggttggtgaattaactaatggaagacatgaaattgttccaaaagatataagagaagaagcagagaaatatgctaaggaatctctgaaggaagaagatgaatcagatgatgataatatgtaacatttactccagcatctattgtattttaaatttctactccagtccaatgtaactatttagccctggattatacatactgtccaattttcattaaatttttgtcttataactataaaaaaaaaaaaaaaaaaaaaa

SEQ ID NO: 1176 - DNA, 12204 bp, HOMO SAPIENS
gtgtgtgtgtgcgagggtgtgtgtgtgtgtttgtgtgtgtgtgcatatgtggggggtgtgagtgtgtgtgtgcgaggaagcgggggtgcgtgcgcgtgtgagtgcgtgtgtgagtgtctgtgtgtgtgtctgtgtgtgtgtgtgagtgagtgaattccagattttctgtctttccaaaacccgctcctgtcctctcgcatatcactcacagacggggatctgacagcagccacaaacctacagtgagtgatcgctctccccccggcacgaatccgccatagagatcggcgaggaggaggaggaggaggaggaagaaaagaaggaggaggtggaggaggaggtggaggaggaggaggaggagggaaagaggagaaggaagaagaagaaaaagaagaaacccactaccttcccaggattgccttttttttttccttatctttacgcgcgagtgtgcctgtggcgcgtgtgcgcccctcgtcccttccatccgaacccgggcttggatgtttaataaagaaatcaagtgtctcaacagtcaccaaaaaaaaaaaaaaccgcaaaaacaaaaccaaaaaaattccaaaagcaaaaacaaaaaagagagaggaaaaaaaattcaaaataaacaaacaaacaaacaaggcagaaccaacctctacttcaaagcagccggcacaagccacccgtgtctgccacccagagaggggggtctctggcccgtggtggaggagttgcaggggggatcgtcagggggacagaggccgagtgacgtcctaggagccaccgggcaagaggcggaggagacccagagaggccagagagacagcgggccccagcgcgcggctcggggctggggcgccagaagtgggactggagcgaagtagaggatgccgaggagaaaacagcaggcacccaagcgggcggcaggctacgcccaggaggaacagctgaaagaagaggaggaaataaaagaagaggaggaggaggaggacagcggttcagtagctcaactgcagggtggcaatgacacagggacggacgaggagctagaaacgggcccagagcaaaaaggctgcttcagctaccagaactctccaggaagtcatttgtccaatcaggatgccgagaacgagtctctgctgagtgacgccagtgatcaggtgtcggacatcaagagtgtctgcggcagagatgcctcagacaagaaagcacacactcacgtcaggcttccaaacgaagcacacaattgcatggataaaatgaccgctgtctacgccaacatcctgtcggattcctactggtcaggcctgggccttggcttcaagctgtccaatagtgagaggaggaactgtgacacccgaaacggcagcaacaagagtgattttgattggcaccaagacgctctgtccaaaagcctgcagcagaacttgccttctcggtccgtctcgaaacccagcctgttcagctcggtgcagttgtaccgacagagcagcaagatgtgcgggactgtgttcacaggggccagcagattccgatgccgacagtgcagcgcggcctatgacaccctagtcgagctgactgtgcacatgaatgaaacgggccactatcaagatgacaaccgcaaaaaggacaagctcagacccacgagctattcaaagcccaggaaaagggctttccaggatatggacaaagaggatgctcaaaaggttctgaaatgtatgttttgtggcgactcctttgattccctccaagatttgagcgtccacatgattaaaacaaaacattaccaaaaagtgcctttgaaggagccagtcccaaccatttcctcgaaaatggtcaccccggctaagaaacgcgtttttgatgtcaatcggccgtgttcccccgattcaaccacaggatcttttgcagattctttttcttctcagaagaacgccaacttgcagttgtcctccaacaaccgctatggctaccaaaatggagccagctacacctggcagtttgaggcctgcaagtcccagatcttaaagtgcatggagtgtgggagctcccatgacaccttgcagcagctcaccacccacatgatggtcacaggtcactttctcaaggtcaccagctctgcctccaagaaagggaagcagctggtattagacccgttagcagtggagaaaatgcagtcgttgtctgaggccccaaacagtgattctctggctcccaagccatccagtaactcagcatcagattgtacagcctctacaactgagttaaagaaagagagtaaaaaagaaaggccagaggaaaccagcaaggatgagaaagtcgtgaaaagcgaggactatgaagatcctctacaaaaacctttagaccctacaatcaaatatcaatacctaagggaggaagacttggaagatggctcaaagggtggaggggacattttgaaatctttggaaaatactgtcaccacagccatcaacaaagcccaaaacggggcccccagctggagtgcctaccccagcatccacgcagcctaccagctgtctgagggcaccaagccgcctttgcctatgggatcccaggtactgcagatccggcctaatctcaccaacaagctgaggcccattgcaccaaagtggaaagtgatgccactggtttctatgcccacacacctggccccttacactcaagtcaagaaagagtcagaagacaaagatgaagcggtgaaggagtgtgggaaagaaagtccccacgaagaggcctcatctttcagccacagtgagggcgattctttccgcaaaagtgaaacacctccagaagccaaaaagaccgagctgggtcccctgaaggaggaggagaagctgatgaaagagggcagcgagaaggagaaaccccagcccctggagcccacatctgctctgagcaatgggtgcgccctcgccaaccacgccccggccctgccatgcatcaacccactcagcgccctgcagtccgtcctgaacaatcacttgggcaaagccacggagcccttgcgctcaccttcctgctccagcccaagttcaagcacaatttccatgttccacaagtcgaatctcaatgtcatggacaagccggtcttgagtcctgcctccacaaggtcagccagcgtgtccaggcgctacctgtttgagaacagcgatcagcccattgacctgaccaagtccaaaagcaagaaagccgagtcctcgcaagcacaatcttgtatgtccccacctcagaagcacgctctgtctgacatcgccgacatggtcaaagtcctccccaaagccaccaccccaaagccagcctcctcctccagggtcccccccatgaagctggaaatggatgtcaggcgctttgaggatgtctccagtgaagtctcaactttgcataaaagaaaaggccggcagtccaactggaatcctcagcatcttctgattctacaagcccagtttgcctcgagcctcttccagacatcagagggcaaatacctgctgtctgatctgggcccacaagagcgtatgcaaatctctaagtttacgggactctcaatgaccactatcagtcactggctggccaacgtcaagtaccagcttaggaaaacgggcgggacaaaatttctgaaaaacatggacaaaggccaccccatcttttattgcagtgactgtgcctcccagttcagaaccccttctacctacatcagtcacttagaatctcacctgggtttccaaatgaaggacatgacccgcttgtcagtggaccagcaaagcaaggtggagcaagagatctcccgggtatcgtcggctcagaggtctccagaaacaatagctgccgaagaggacacagactctaaattcaagtgtaagttgtgctgtcggacatttgtgagcaaacatgcggtaaaactccacctaagcaaaacgcacagcaagtcacccgaacaccattcacagtttgtaacagacgtggatgaagaatagctctgcaggacgaatgccttagtttccactttccagcctggatcccctcacactgaacccttcttcgttgcaccatcctgcttctgacattgaactcattgaactcctcctgacaccctggctctgagaagactgccaaaaaaaaaaaaaaaaaaaaatcaccccagccatttctcttcatcctcactaacaatttggtaatgaagtattgatttccacttctctgcttatgggcggtattagattttcattgataaattgcaatggggctgtctcgtctccacagtacccttttcactgtcacaagaaaacaaagtgccaccgaagaaaagtaatgactgagagcattgatgtacttattttgtcagtttgtaacaggaaagtgggggggagtctaagtcttcatagtctaatgtccaagtgggttgcactagatgtagacacttggaggcttacttttcatggtaatgtccatttcctatttataacccctctgggaacgtttgtctaaaggaaatgtttctgttcagtgtaacaattacagttgcacctggattgcccagtcctgcccctgcactaggggaccattaatcactgcaaagtagaagaattattaagttaaaccagagtttgagccaagaaaacccctgaacaatgttcatcttctgtgaaacttgctcaaatagttaagcttaaccatgttgctgccaaagacttttcctatgcagtggtggggcaccttgatcatcatcattatcttgattggctgaaaaaaaaatagttttaagcacacaccactgtctatgagaactgcaaattgggagaataggtgaaatgcagaatctgagagaacgcgagaagatgagatcattacagggtggaaagttctgcagcagccttttctggtaatccctttctgcagaacctgatgtttatgggctctaaaacgcagcttagctttagaagcaacagaaagcatgaaatagggtgtccattttaaatgtgttcctgcaacttttttcattaaaactttgagggcccaattttaatttgtggaatattcccgttaataatgagatctaattaagacatccattaaaagcccgttaaagttaatttaacgtaaaaattccaatagaactgtattagattttctccattaaattaacgttatggatttttaacggatgtcttaattatacgttattattaacgggaatactgtattacacagattaaaatcaggtcctaagtcaacttggaagagctaagagcatgttttaatattaaaagtcttgcatacctagtgcacagtttggagacgcaaggatagatctgtttactctagttgaacattttctatacaattgaaagcaacctataatagataaatccatcattgcatttaaacaatgaatttccttattctcaaaggacaaatacgtctggattatgtggtaaattgctactcagctatggtgaaatatttatactattctaggcacaacactaggaactaggtgattctgaaacaaaaggaatattttctgttgttgctttaattaccaaggttatttttttttaatctcaacactgacaaaatgaaaccaaatatctcttcctcaccatttctcaaggaggctgcctgttggaattgttttggaaattttgacatgatccctaaattcaacattgggattaaaaaaaaaaaaaaacttcttatttacctcctagggaaagtgttgcccttatgccacatataatagcaaattgctttttttatggcatgcataacctagatgggaaaaaatatggcgcttcggggaaggagggaaaaagtaaatgaagttccaggaatgtcattctgaagtaatgaggcatggacagaaaatatacccctcacatcatcggattgagatggcagtcgaaatagcttcattgaagtgtcagcactcatccatcaatcaatcacccacaaggaaaaatagcaacagtacaacggggtggcttttatgggatttactcatgggcatagggaatagcggctcaaatgtagttctgacatgaaaagcaaggtgctgatattattttttatgatgggaggatcataaagtgaattgagaacagtgaggtctgtctttgcttaacctattcaaccagaaatgaatggagctcgactggaaaggaacagtcttcagatgggttaagattgaagggtggactggactctactgagcaccgtccttcaacaaggaaattctattaaaggaaaatcaatgcattagtattggggttctcgtagctgttaaaaattgtctgctccaatccagggttattaggccaaagttacataattcagatctcactgcaaccatccaaaagtggattctcgagcccttgctccaatggggggaggagatcaatacaattcccaattccatggaaattgtttcccttctaaggaagaaaaaataaatcatctgcttcaacatataatcgatatggttttgttagcgtaatttctatggtgggtggggtgggaggtgagagaaaaaaatattgataaatttggtaagacaggtgaattgccgcctggcaaccgtgcatgtcactgccgagggatggctgctaaggttcaccttagaaaacaagatctgggctggcactggggcatacatcaccactcagcatattcctagaggccaggcctgtcttcactcagccagccctctgaggcttctagaaacttctttctggaggaaaaaaactaaataacataaactcaggagaatgtctttacccaccttcataccactgctttctttttgctgaataaaacacagttctgataagtaagaactttagaattggaaaggaggctgacatgcaaatataatgcaaattaccctcaagtatcgccattcttccaccacctcttggtaccagtgagagcgagagattgccttttcttccccatccctccttccagctaagaccaccaaccagctgcaaattgagatgtccatttaaaaatttatatgtcaatatttaaatgttacatatttggccctattttgtagttcagcaaatcctccaaatacacagcatgttacaaggcactggtggcacagggcacaacaggaaatgatatttatttagcaaattcatttaacaaatattattgggcacctgttatgtgagacactgtcctaggcactgtgggataacaacagcaaacacttcacacaacagcctggccttcctgtgttttacaacagctcctaaagatagctgatatcaagacatttgagggacacagttcatgtagaatcaaaatattagtatttcagaataaggattttttttctgaaaagcatacagagaggaaacagcttaaaaataggtcaagacctaaaaacagaatataatcacggaataaactggataacccagacagtccccacagaatttctttcaggtcacagatttcttaaaactcacccccaaaatgtgcctgcttggttgtttgaatcttgcataattaatgtcacaggcgcaagccgctgaacttagttgagatgcagaaaacaaacaaatgcaatgacatatctgagaagcatttatgtaactccggttaagtggtgaggaggggtgtgtgaagacagtgtgcatgcatgagtgtgtattcatatatatgtgtatacatatgaatttcactgttattttccagggtctatggacaatgtggcagtaagagtctatgatgttctgaaacttttcacagtaaatccaaagattacagaccttacaaggtgcttgcattctgttgcttttccatctgtcacttctcaggttatttgactgtgttcaaaccttcttttctttttcattgagtttcattttttaagcttgttaaatgcttttgtttaaaaaaaaaaaaaaaaccccaaatgtcatttttcacattatcctctcttctctgcaacaaggatagtaagatgtagatgaatgcaaaaataataacaacaataaggaaatatattaaagctttaaaatatgcacatatgtagttctaaagagcaataacggtagtatctatttcgaacatgcattaggcaaaaaagaaatcaaaactgaaattttcgtgtatttttccccttgtaagatgttcaaatgctaacttcattttctcctttcctctatgtggcactttctcaaaatatctatgaaatacttttagacaaagattgagctggagaaagagatacaaatttccatccccccagacagagagacatatttccattgtaggaaggcattaaacattttgaaacttgtgaatcatctttagaatttctactggggaattttacttcttcatccaaagtaaaagccacttatctcctttggttcccagtgacagattcagaggcatacgcagatatacaattttcaggctctagttaatcttcttccaatagttacgaacaatgggctaacaggcgtgggtgtttctccaaaaattattcatgcacaaggcagcccaaagcttcagggaaaactagaaatgtgttatggattagaataggactgttttaaaatgctagtaccaggtggaacgctatttctgcaacaggactctgtccatttcctttggaacaatatattccaagtaaaatggctcttccaaggaatgacacctttacttgacacccttcggcatacaaatgattttaccaatagccatgattattattaaggccttttaaaatacaggctgtttgaaaaaagacagattaaatattcacagcctttgtatcatggttatttgcttaaaacagcttttagaagtacaagtaataactttttgataagaaaccccaggagaaactttttggtaagaaacctcaaaaaatttgaacaaaggcattacaaaaaaaaaaaaaaaactaaccactccattcaactctctcagaaaataaatttcaatgtgttcaatgaattgtcttgaacctgaaacctgcatttagatatcagtcccctgccaatagctaatattaacagaatttgaacaatcatacaattatgtctcaaatgtgaagactttgtacagtaatattttcactttctaaatgacccatataacattcaggaattatagatgtgtatgtatattttttaagtacagaaagttcagccagtcttcagagaagtaaaagtgatgtctattgtgcattgaagtaaatattacaaacattccagtttcgcaatacaatacttgagctttcgaacacctcagacactagaatgtgtaatgcgagtcaaaaaagctgacatacaaaacaattcccatttggctcagggttcctaaatgtcacaatatcttgggtaaaatatactttttgatttcctgatgatgtccttctaatcccttctgactttgattcctaacagccaggcactgttgacatgaatcattaacttccaaacccctttaaaatcaagaagctaggtgatcatacagtcatttcaatggccaaccagttcttgctctacagagcttttacacctttttgggaaacctgatatcaaacacatttatgttatatatttgctcccttgcattaattctagatttttttttaatttcttttagaaagggcaggggggaagtgggtcagagcaaggttcaagaatcacattcatccttgctctaaagtgtttacttgccagcaaagaaaggcaaacacatttttatattcagaaagcagaccggtcattttcaaagaaaaatgactgcaaccatgcctgtagaatgtttctgtgcaagcgcactaattttctatcacctgcatgctgtatataatacatttgcctgtatactaggaagaaaaaccaggctgttttccctgagtacaatgcagcttggatggctgggagcgtaagccttccgtgcatttttatagtgtacatatttgtatatactaactatatcgccatgtatgaacacagattttgttatatttgcttgtttctgtttcctaccaaactggcccacaatggggattcttttgtatagaaaaaatatgcttgtaattttttcctggtcattctctttcaatagcttatgaaagaattagatctgagtttacaaagaaactataagaaccaagtttgtctgtctgcatgagtcccgtccaattgctggatctagggaggaaccaacttcctaattcagagttttccttttaaaggcatgctttacccccatgggaaaactgcacactcatccatgtagaattattctctttgtattttatctaatagtgcctgaaaatttttttaatgtcttcttagaagaagaattcataattgtcaaaatttgaaacattagcttaattttgtttttatgacctcaagattcttctccttatttattcggttgctgttgtaatggggccccaggccattcctgacatcggcgtgttcttcttctgcattaaggatgtttttgaaattacagagattattgagccaacaggctgttttaatcaaaaccatgtttcacttctttttgatgattataaattgtccttgcaatgaaaaaaaaaaaagaacttttctgctaggaagattataccaccctgtggccaaacagattcatcacagataggcatctatgcccatttctctgggatctggaaaattcttcccttggctgaccccaatttcttttactccccattatcctgaatattagctttcaatgcagtcactatttgacatttccaaaggctttgccgcattgtcactgcccaaagacaaacaaccactggaaatgatggctttcctgcttgaaacgaagggggccaggtgcagtggctcaagcctgtaacccctgcactttggaaggctgaggcaggcggatcacttgaggtcaggagtttcagaccaacctggccaacatggcaaaacctcgtctctactaaaaatacaaaaaacattagcagggcatggtggtgcgtgcctgtagtcccagctacttgggaggctgaggcaagagaattgcttgagcccgggaggcgaaggttgcagtgagctgagatggtgccactgcactccagcctgggcaacagagcaagactgtgtctcaaaaaaaaaaaaaagaatggattttcagaaaaagtgctccctttcctgtcctgtggtgccaccatcctgtcctccttcgtaatcatgaacaatctgatcttgaactcccacataacttaaatcaggcaaaaagaaacattcacagcgtccccttgctgaataaaaatgactttgtttggaggcacttaagatgtatgcctgtgtgtggtgccgcagcattgaaattatctgtagaaggggaattttttttaaaaatacaattttatcactagaaataaattccgatggtggaaacgaagaaaacccttaaattatatcacaaaagccattattttttgcatccaaagagtttttttttttaaggaaaatcattctactttgagaactgtaattaaagccctaaataacagacactactttgttgagctattgtgaaaaaaaaacaacacattcgccaaggttatatggagcccctgatttccatcaaaaaggtttctataagtatattatttacatttttatacatgataactcttgcctttgtgttgaaaaaaaaaaagtctcttttttttcccccactcagcagttattggaaatagactgttcccatctgaaaccgtatcgtaatttgcatcaggaaacccaactgctgacattgaggacctgggtgtgttcaattatgattttgctggaggctgtccctcattttaatgctgcagctattgaaccaccttcctgaaacctagctgatacggaatagcagagacatgcctctcaacaccattagctttgcaaatggcttcatttcagtcaacgtcgacttctgctttggccaattgaaaaatgaaaattaaaggagagaagaaaaaaaacacagatgcacttaaaacatgaaaagaattatttatatgataaaaatatatttagcttttcaaagcacaagactgaatagaagtgctctttttatgctttctggagatgttactgttaaatgtctttctacatcaggcttaataaatctgtaatgacatttgatggattgaaaaaaaaaaaaaaaaaa

SEQ ID NO: 1177 - DNA, 4152 bp, HOMO SAPIENS
cgccgttgtcggcaggcagctttagttaggatgtcgtgatgggaccgagctcagcgtaaccctctggccgacgtgggccgagggggccggcccgggctgctgtggcccagacgagcggagagtgcggagcggcttctgggccagcgctaacgagccctggcagtgcgcacctctggtgccagtgtcgccccgcctccggggtagaatccgccccagccctccgggcctgggaccgggcggccgctttcgccagtccgtccggccgttccgcattaggtccgggataactaggtggagtaggtgtgcggcccgccgccggacagcccgctcgctgtttctttaagcccccgcctgcgtcttcacggccctctcccgttctgctggaaagctgacgtggggcaatccgttcagaccctccatggagaagtttgggatgaatttcgggggcggcccgagcaagaaggacttgctggagactatagagacccagaagaagcagcttctccagtaccaggcacggctcaaggatgtggtccgtgcctataaaagcctgctgaaggagaaagaggcattagaggccagcatcaaggtgctgtcggtatcccacgaggcagatgtgggcctcgcaggtgtccagcttccaggcctcacctttcctgactctgtggatgaccggtgctccactcacagcgaggatagcactgggaccgccactagcttggatactgcggccagtctcaccagcaccaagggtgagtttggggtagaagatgacagaccggcccgtggaccaccacctccaaagtccgaagaggccagttggtccgagagtggcgttagcagtagcagtggggatgggccatttgcaggtggggaggtggacaaaagactgcaccagctgaagactcagttggctactttgaccagttctttggctacagtcactcaggagaagtcccgcatggaggcttcttacttggctgacaagaaaaagatgaaacaggacttagaggatgccagtaacaaggcggaggaggagagggcccgcctggagggagaattgaaggggctgcaggagcaaatagcagaaaccaaagcccggcttatcacgcagcagcatgatcgggcccaagagcagagtgaccatgccttgatgctgcgtgagctccagaagctgctgcaggaggagaggacccagcgccaggacttggagcttaggttagaagagacccgagaagccttggcaggacgagcatatgcagctgaacagatggaaggatttgaactgcagaccaagcagctgacccgtgaggtggaggagctgaaaagtgaactgcaggccattcgagatgagaagaatcagccagatccccggctgcaagaacttcaggaagaggctgcccgccttaagagccatttccaggctcagttacagcaggaaatgagaaagacagctcttgcagaggatcaactccgtcagcaatctcaggtagaagaacagagggtggcagccctggagaatcaaatatccgaggtgtctgagctgctaggcacctacgagaaagccaagcagaaggaccagctggccattcagaagctgaaggagcgcattctgcagctggacctggagaacaagacactggctctagcagcctccagcaggtcccctttagacagccatggagaggagtccagtctggatgtcaatgtcctgaaagataagatggagaagctgaagaggctgctgcaggttgcggccaggaaaagccaggtgaccctggatgtggagaagctctgtgacctggagataatgcccagctcggaggctgctgatggggagaaggctactgcactctattaccaacaggagctgaaacagctgaaggaagagtttgagaggtacaagatgagagcccaggttgtcctcaaaagcaagaataccaaagatggtaacctgggaaaggagctggaggcagcccaggaacagcttgcagagctgaaggagaagtatatttccctgcggctctcctgcgaggagctggagcaccaacaccagcaggaggctgatgactggaagcaggagctggcccggctgcagcagctccaccggcaggagctggagcggtgccagctggacttcagggaccgcacactgaaactggaggaggagctgcacaagcagcgggatcgtgccctagctgtgctcaccgagaaggacttggaactggagcaactgcgttctgtggccttggcctctgggctgccaggacgcagaagtcctgtgggtggtggcggtcctggggacccagctgacacatcatcctctgatagcctgacccaagcattacaacttgcagcggccaatgagcccactttctttctgtacgctgagcaactggcccgcaaggaggtggagatcacatcactgaggaagcagaagcacaggctggaggtcgaggtgcatcagctgcaggatcggctgctggaggagggcgaacggcatcgtgaggaggttgcagccctgcagagccacatcgaaaagaacatcagggaccagagcagggagggagccaatctggagtacctcaaaaacatcatctaccgcttcctgaccttacctgactccctgggccgccagcagactctcacagccatactgactatcttgcacttcagtccagaggagaaacaagtgataatgcgactcccaaccagtgccagctggtggccttctggcaagagatgatgccattttcatgaattcctggaatttctgtgcctcttttatgtgggaaagggcaggctctggtttctgctgcctcttctcttacattgtcatttatttcttcactgtgttgagctgggaggagtcttcaatgtgggaagggattttctgccaaatgccattaatgctgctttatccttaggccctagagatactgaaagtcctggggcagtatcttctgatggtgtgcatgtgaggagaagatgaggttaggactgagaagtgcagaagttggaacagtggtaaggctgttttaaaataagatgttttgttttaataatatgctcctggcacaaagctaggagtaaatgtgactccaaagggagttcagttaatctctgaaatgcacaaaacctagctattttctccctctcatcacagtctgagtctggtccattgctaccccaattctctggggacataaaaccaggctggaaagggaccaggaagtttgaaatagtgacatatcatccactagtcccaagggctaaggaatagtgagtttattctggaaggaactgggaagcttagtctaattagtgcctggggatgacctatgcaatcacaccgcttatgaccatcctagagagggccctgagcaccagcttgatcttagggatttccaaagtaacctgctttttgcctggatagggttaaaatagacctttcttgcctatccttgccttaacctatctgcctgaggttggcctgagattgtgagtcaacgactttgctatcttttcctcagtgttgaactttcattaagaaataaagtcctagcttcttacagagaggggtccaaatggtgaatgctcatcctgcctggattcaaggaattagctcagagattggcccctagcttttctgcctttgtagggacagcaaaaggggaaaatttgctgcagaaaattccaaaagattgctgtagctctcacagggaagtggtaaagatcagctaaacctgggttggggtgctttctgcccagtgggtcttggcataagtagattaatcctgctcttttaagaaaaggcaacttattcaggcagtctggaaagggggttctcagaaaactcagtttctttattccttcttttctcccaactactgttactggttatagaggtctttggactctaaagaccaatgtttggccactaactggactaatatgtatctttctgtgatttcatcatagaggtctgttttgtgagggtttggggtgcagaaaactttgattaaatcttaatgggaggctgggtgacctggattatctacagtgagcagacttaaatggaacagaagtttatgtgtccaaatgatggaatcattaaacctgagtgacttgaaaaaaaaaaaaaaaaaaaaa

SEQ ID NO: 1178 - DNA, 1788 bp, HOMO SAPIENS
actggagaggcagagaggagtgaccacagaggcagaggggtgggcgggctggcccatggctgagacctctctcccagagctggggggagaggacaaagccacgccttgccccagcatcctggagctggaggagctcctgcgggcagggaagtcttcttgcagccgtgtggacgaagtttggcccaaccttttcataggagatgcggccacggcaaacaaccgctttgagctgtggaagctgggcatcacccacgtgctgaacgccgcccacaagggcctctactgtcagggcggccctgacttctacggcagcagtgtgagctacctgggggtgccagcccacgacctccctgattttgacatcagtgcctacttctcctctgcggctgacttcatccaccgtgccctcaacacgcctggggccaaggtcctggtgcactgtgtggtgggcgtgagccgctctgccacgctggtcctggcctacctcatgctgcaccagcggctgtccctgcgccaggcggtgatcaccgtgaggcagcaccgatgggtcttccccaaccgaggcttcctgcaccagctctgcaggctggaccagcaactgcggggtgccggccagagctgaggggccagagctggtccttactccctgccatggggctctgccactttgccaccctggcactgatcctgctggtgctgctggaggctctggcccaggcggacacacagaagatggtggaagcccagcgtggggtcggccctagagcctgctactccatctggctcctcctggcgcctacaccccctctcagccactgtcttcagtctccacagaaacagcatcaagtgtgcggagacaggcggctgaaagccagcagcacgaactgcccgtcagagaagtgcacagcctgggccagatactcccacaggatggactcactgcagaagcaggacctccggaggcccaagatccatggggcagtccaggcatctccctaccagccgcccacattggcttcgctgcagcgcttgctgtgggtccgtcaggctgccacactgaaccatatcgatgaggtctggcccagcctcttcctgggagatgcgtacgcagcccgggacaagagcaagctgatccagctgggaatcacccacgttgtgaatgccgctgcaggcaagttccaggtggacacaggtgccaaattctaccgtggaatgtccctggagtactatggcatcgaggcggacgacaaccccttcttcgacctcagtgtctactttctgcctgttgctcgatacatccgagctgccctcagtgttccccaaggccgcgtgctggtacactgtgccatgggggtaagccgctctgccacacttgtcctggccttcctcatgatctgtgagaacatgacgctggtagaggccatccagacggtgcaggcccaccgcaatatctgccctaactcaggcttcctccggcagctccaggttctggacaaccgactggggcgggagacggggcggttctgatctggcaggcagccaggatccctgacccttggcccaaccccaccagcctggccctgggaacagcaggctctgctgtttctagtgaccctgagatgtaaacagcaagtgggggctgaggcagaggcagggatagctgggtggtgacctcttagcgggtggatttccctgacccaattcagagattctttatgcaaaagtgagttcagtccatctctataataaaatattcatcgtcataaagacaaaaaaaaaaaaaaaaaa

SEQ ID NO: 1179 - DNA, 2486 bp, HOMO SAPIENS
gcactgcctctggcacctggggcagccgcgcccgcggagttttccgcccggcgctgacggctgctgcgcccgcggctccccagtgccccgagtgccccgcgggccccgcgagcgggagtgggacccagcccctaggcagaacccaggcgccgcgcccgggacgcccgcggagagagccactcccgcccacgtcccatttcgcccctcgcgtccggagtccccgtggccagatctaaccatgagctaccctggctatcccccgcccccaggtggctacccaccagctgcaccaggtggtggtccctggggaggtgctgcctaccctcctccgcccagcatgccccccatcgggctggataacgtggccacctatgcggggcagttcaaccaggactatctctcgggaatggcggccaacatgtctgggacatttggaggagccaacatgcccaacctgtaccctggggcccctggggctggctacccaccagtgccccctggcggctttgggcagcccccctctgcccagcagcctgttcctccctatgggatgtatccacccccaggaggaaacccaccctccaggatgccctcatatccgccatacccaggggcccctgtgccgggccagcccatgccaccccccggacagcagcccccaggggcctaccctgggcagccaccagtgacctaccctggtcagcctccagtgccactccctgggcagcagcagccagtgccgagctacccaggatacccggggtctgggactgtcacccccgctgtgcccccaacccagtttggaagccgaggcaccatcactgatgctcccggctttgaccccctgcgagatgccgaggtcctgcggaaggccatgaaaggcttcgggacggatgagcaggccatcattgactgcctggggagtcgctccaacaagcagcggcagcagatcctactttccttcaagacggcttacggcaaggatttgatcaaagatctgaaatctgaactgtcaggaaactttgagaagacaatcttggctctgatgaagaccccagtcctctttgacatttatgagataaaggaagccatcaagggggttggcactgatgaagcctgcctgattgagatcctcgcttcccgcagcaatgagcacatccgagaattaaacagagcctacaaagcagaattcaaaaagaccctggaagaggccattcgaagcgacacatcagggcacttccagcggctcctcatctctctctctcagggaaaccgtgatgaaagcacaaacgtggacatgtcactcgcccagagagatgcccaggagctgtatgcggccggggagaaccgcctgggaacagacgagtccaagttcaatgcggttctgtgctcccggagccgggcccacctggtagcagttttcaatgagtaccagagaatgacaggccgggacattgagaagagcatctgccgggagatgtccggggacctggaggagggcatgctggccgtggtgaaatgtctcaagaataccccagccttctttgcggagaggctcaacaaggccatgaggggggcaggaacaaaggaccggaccctgattcgcatcatggtgtctcgcagcgagaccgacctcctggacatcagatcagagtataagcggatgtacggcaagtcgctgtaccacgacatctcgggagatacttcaggggattaccggaagattctgctgaagatctgtggtggcaatgactgaacagtgactggtggctcacttctgcccacctgccggcaacaccagtgccaggaaaaggccaaaagaatgtctgtttctaacaaatccacaaatagccccgagattcaccgtcctagagcttaggcctgtcttccacccctcctgacccgtatagtgtgccacaggacctgggtcggtctagaactctctcaggatgccttttctaccccatccctcacagcctcttgctgctaaaatagatgtttcatttttctgactcatgcaatcattcccctttgcctgtggctaagacttggcttcatttcgtcatgtaattgtatatttttatttggaggcatattttcttttcttacagtcattgccagacagaggcatacaagtctgtttgctgcatacacatttctggtgagggcgactgggtgggtgaagcaccgtgtcctcgctgaggagagaaagggaggcgtgcctgagaaggtagcctgtgcatctggtgagtgtgtcacgagctttgttactgccaaactcactcctttttagaaaaaacaaaaaaaaagggccagaaagtcattccttccatcttccttgcagaaaccacgagaacaaagccagttccctgtcagtgacagggcttcttgtaatttgtggtatgtgccttaaacctgaatgtctgtagccaaaacttgtttccacattaagagtcagccagctctggaatggtctggaaatgtca

SEQ ID NO: 1180 - DNA, 1939 bp, HOMO SAPIENS
accggcgacccggcccgtggagccggcgcgggcgggctgctgaggtggctgtcgccggctccgagctgcggcttcccgggccgagcccccgatggaggccgaggccgcggacgctcccccgggcggggttgagtcggcgctcagctgcttctctttcaaccaggactgcacatccctagcaactggaactaaagccgggtataagctgttttctctgagttctgtggagcagctggatcaagtccacggaagcaatgaaatcccggacgtctacatcgtggagcgcctcttctccagcagcctggtggtggtagtcagtcacacaaaaccacggcagatgaacgtgtatcacttcaagaaaggcacagagatctgtaattacagctactccagcaacatcttgtccataaggctgaaccggcaaaggctgctggtttgcctagaagagtccatttatattcacaacattaaagacatgaagctgttgaagaccctcctggatattcctgcaaacccaacaggtctatgtgctctctctatcaaccattccaattcttacctggcctatcctggaagcctgacttcaggggagattgtgctttatgatggaaactccctgaaaacagtctgcactattgctgcccatgagggaacactagctgccatcaccttcaatgcctcaggctccaaactagcaagtgcgtctgaaaaaggcacagtcatccgggtgttctctgtccctgatgggcaaaagctctatgagttccggagagggatgaaaaggtatgtgacaatcagctctctagtgttcagtatggattcacaattcctctgcgcctccagtaacaccgagacggtacacatcttcaagctggaacaggtcaccaacagtcgaccagaagagccttcgacctggagtggctacatgggaaagatgtttatggctgctaccaactacctccctacccaggtgtcagacatgatgcatcaggacagggcttttgccactgcacgcttgaacttctccggacagaggaacatctgtaccctctcaacgatccagaagttgccacggctgctagttgcgtcatccagtggacacctttatatgtacaatttggatcctcaggatggaggagagtgtgtcttaatcaaaacccacagcttgcttggctcaggaacaacagaagagaataaagaaaatgacctcagaccttccttacctcagtcttatgcagcgaccgtagccagaccaagtgcatcttcagcctccacggtgccaggttattctgaggacggcggggcgctgcgaggagaagttattcctgaacatgagtttgcgacgggaccagtgtgtcttgatgatgagaatgagtttcctcctataatcttgtgccgtggaaatcagaagggcaaaacgaagcagtcatgatgagaagcacacctcagaaatcaggacatcccccctatcaggtggttttggagaaaacaaggaaggcggaagaatggagtgcaattgtgtgagcagaaaggggggcaggaatcccgggtgctccactgcttaaaccacaggacctggttaactcctcaccaagcttcccacgaccctggttgccaatgggcgcgggagacattgtatacacatcatgctatttaaaatacgttcaaactatagtgtaaatgctaattaaccatattggtatataaccggaattttatattaaaaggggcctcctttttaaatatatgccgtgtaaaaaatgtacttataggaacatctctttgaattgtatttcttgtatattacatacttagagagagactcttttagccaggcaaagtcttttttggctgtggctggaataaatcatttattacttgggagtcccattttggacactaataataaaatcatggcaatgcaaaaaaaaaaaaaaaa

SEQ ID NO: 1181 - DNA, 4170 bp, HOMO SAPIENS
ctcttcccttaggtgtttaagttccgcgcgcaggccaggctgcaacctgacggccagatccctcgctgtcctagtcgctgctccttggagtcatgttcccagccgccccttctccgcggaccccgggtaccgggtcccgaaggggcccgctggccggactcgggcccggctccacgccccggacggctagcaggaagggtctgcccctggggtctgcagtcagctccccagtgctcttctcgccggtcggccggcgtagctcgctaagctcgcggggaacaccaacacgaatgttcccacaccactccataactgagtctgtgaactatgatgtgaaaacgtttggatcttctcttcctgttaaagtcatggaagccctaacattggctgaagtcgatgaccagctgaccattaacatagatgaaggtggatgggcttgtctggtgtgcaaagagaagctcattatttggaagattgctctgtcacctattactaagttatccgtttgcaaagaacttcagctgccacctagtgatttccactggagtgccgacttagtggctctttcttactcttctccctcaggtgaagcacattctactcaggctgttgctgtcatggttgccaccagagaaggatctatccgctattggccaagccttgctggtgaagatacctacacagaggcttttgtagattcgggaggtgataagacttacagtttcctaacagcagtgcagggaggaagttttattttgtcttcatcaggaagccaactaattcggttgatacctgagagctcaggaaagattcatcagcatatcctgcctcaggggcaaggcatgctttcaggaattggtcgaaaagtttcttctctttttggaattttatctcctagtagtgatctcacactttcaagtgttctctgggatagagagagatcaagcttttatagcctgacgagttcaaacatcagtaaatgggaattagatgattcttcagaaaagcatgcatacagttgggatataaatagagccctgaaggaaaacattaccgatgctatttggggatctgaaagtaactatgaagctattaaagaaggagtcaacattcgatatttggacttgaagcaaaactgtgatgggctggtgattttggcagcagcatggcactcagcagacaatccatgtctcatctattactctctgataacaatagaagataatggttgccaaatgtcagatgcagttactgtagaagtcactcaatataatccaccttttcagtctgaagacctgattttgtgtcagttgacggtcccaaacttttcaaaccagactgcctatctgtataacgaaagtgctgtctatgtgtgctccacaggaactgggaaattttctcttccccaggagaaaattgtctttaatgcacaaggagatagtgttttaggtgctggtgcctgtggtggtgttcctatcattttttctagaaacagtggactggtgtctattacttcaagggaaaatgtgtctatattggcagaagacttggaagggtctttagcatcttcagttgctggaccaaacagtgagagtatgatttttgagaccactacaaagaatgaaactatagcccaggaagataaaatcaagttgctgaaagctgcctttctgcaatactgcagaaaagatttaggtcatgctcaaatggtggttgatgagctcttttcctctcactctgatttggattctgattctgaactagacagggcagttacccaaatcagtgtagacctgatggatgactacccagcatctgacccacggtgggctgagtctgtccctgaggaagcacctgggttcagcaatacgtcactgattatccttcaccagctagaagacaagatgaaagctcactcttttcttatggactttattcatcaagttggcttatttggacgtctaggcagttttccagttagagggacaccgatggccactcgactgttgctctgtgagcatgccgaaaagctgtcagccgccattgttctcaagaaccaccactcccggctttctgaccttgtcaacacagccatattgattgctttgaacaagagggagtatgaaatcccatccaacctgactcctgcagatgtctttttcagggaggtatcccaagtagataccatctgtgagtgcttactggagcatgaggagcaagtcttgagggatgcacctatggattccattgaatgggctgaagtggtgatcaatgtgaacaatattctcaaggatatgctgcaggctgctagtcattatcgccaaaatagaaactctttgtatagaagagaagaatcactagaaaaagaacctgaatatgttccatggacggcaacaagtggtcctggtggcatccgaacggtaataatacgccagcatgagattgtcctgaaggtggcttatccacaggcagacagcaacctccgaaacatcgtgaccgagcagctggtagccctgatcgattgcttcctggatggttatgtttctcagcttaagtctgtggataaatccagtaatcgggaaagatatgacaatctggagatggaatacctacagaaaagatcagatctcttatctcctcttctttcactaggccagtacctgtgggctgcttctctagcagagaaatactgtgactttgatatattggtacaaatgtgtgagcagactgacaaccagagccgactccagcgctacatgacccagtttgctgatcagaatttttcagactttctcttccgttggtatctggagaaaggaaagcgaggcaaattattatctcagcccatttctcagcatggacagttggcaaattttttgcaagctcatgaacatctcagctggttacatgaaattaatagccaagaattagaaaaggctcatgcaacacttctgggtttggcaaatatggaaactcgttactttgcaaagaagaaaacccttcttggcttgagtaaattggctgcattagcttcagacttttcagaggatatgctacaagaaaaaattgaagaaatggctgagcaggagcgctttctactgcatcaggagaccctacctgaacagctgctggcggagaaacagctaaatctcagtgcgatgccagtattgactgcaccacaactcattggtctatatatctgtgaagaaaatagaagagctaatgaatatgatttcaagaaagctttggacttgttggaatatattgatgaggaagaagatataaatataaatgatctaaaactggaaatcctttgcaaagctcttcagagagataactggtccagttctgatggcaaagatgatccaattgaagtatctaaagacagtatatttgtgaagatcttacagaaacttttaaaagatggcattcagctcagtgagtacttaccggaggtgaaagacctgctacaagcggatcagcttggaagcttaaagtccaatccttacttcgagtttgttttgaaagcaaattatgaatattatgttcagggacaaatataactttttctaaaaatggccattgtttatgaaatctgtataagtgtgtccttatacaaattttaggccataaacaagtgtaagtttgtacaatttcataacatgtatagctgagtttttatactttatatgtaggaagctaatataaaatagttatgtaactgtgattttggttttcagttatgtgacttgttttttccacctgaaatgtgtcagttgttgttcctgtactcggtgccctttctttttactctcacgtggtcccaggttctggagttcttgtcctggttctagctgctcacatgtacaaatcacttctaggcctcagtttctgcgactatgaaaattactagattgcactagcttgtctctaaaattgctgtgactccagatactttgcactgaagagaatctagggtgtttgatatctgtttcagttagggctaatgggaaatgtctagtaagataaatgtcaacttttgctgacttattatgagatgaaaaaccaaaggagagtgggcctaactcatgtgagcttgataactgatgaactcattgggagcattttaaacttttctacataaataataaatgagcactaatgaaagta

SEQ ID NO: 1182 - DNA, 263 bp, HOMO SAPIENS
ttttttacactgttctatctcacgttgaagtcttcctggggaagggcattcaggctagggagaccccaagtcaggattataaggggaagaaacaaagtgagctggggaagggtctggggcagttgcagctactggagggggagggaagttagtggtgtttggtgggggaaggtggtctaaggggtcccacgtgttggttgactttttgggatgagggatattaatttcttgagaagaagtagcttctggcttgtcccccgtat

SEQ ID NO: 1183 - DNA, 352 bp, HOMO SAPIENS
cttgtctgtggcatcttgctgtggagtctgttcctgatgtttcactcggatatgtagttttctttgatcatgctctcagggttaggctttggtaatagaatgctggcttcatggagaatttggaagctttcctccttttcctaggctgtggaacagttaacttagccctggaggcagctggtccttaacaggtctggccaaagtcacttgttctttttttgcagggattgttgccccttgctggcttcctcaggctgctatttgttattttatctacttggattttctgtctcctggggattcgttttgataattcttattttcccagaaagccatttactcatctaagttt

SEQ ID NO: 1184 - DNA, 3073 bp, HOMO SAPIENS
tgtgtcatccgccattttgtgagaagcaaggtggcctccacgtttcctgagcgtcttcttcgcttttgcctcgaccgccccttgaccacagacatgtctcgggatcggttccggagtcgtggcggtggcggtggtggcttccacaggcgtggaggaggcggcggccgcggcggcctccacgacttccgttctccgccgcccggcatgggcctcaatcagaatcgcggccccatgggtcctggcccgggccagagcggccctaagcctccgatcccgccaccgcctccacaccaacagcagcaacagccaccaccgcagcagccaccgccgcagcagccgccaccgcatcagccgccgccgcatccacagccgcatcagcagcagcagccgccgccaccgccgcaggactcttccaagcccgtcgttgctcagggacccggccccgctcccggagtaggcagcgcaccaccagcctccagctcggccccgcccgccactccaccaacctcgggggccccgccagggtccgggccaggcccgactccgaccccgccgcctgcagtcacctcggcccctcccggggcgccgccacccaccccgccaagcagcggggtccctaccacacctcctcaggccggaggcccgccgcctccgcccgcggcagtcccgggcccgggtccagggcctaagcagggcccaggtccgggtggtcccaaaggcggcaaaatgcctggcgggccgaagccaggtggcggcccgggcctaagtacgcctggcggccaccccaagccgccgcatcgaggcggcggggagccccgcgggggccgccagcaccacccgccctaccaccagcagcatcaccaggggcccccgcccggcgggcccggcggccgcagcgaggagaagatctcggactcggaggggtttaaagccaatttgtctctcttgaggaggcctggagagaaaacttacacacagcgatgtcggttgtttgttgggaatctacctgctgatatcacggaggatgaattcaaaagactatttgctaaatatggagaaccaggagaagtttttatcaacaaaggcaaaggattcggatttattaagcttgaatctagagctttggctgaaattgccaaagccgaactggatgatacacccatgagaggtagacagcttcgagttcgctttgccacacatgctgctgccctttctgttcgtaatctttcaccttatgtttccaatgaactgttggaagaagcctttagccaatttggtcctattgaaagggctgttgtaatagtggatgatcgtggaagatctacagggaaaggcattgttgaatttgcttctaagccagcagcaagaaaggcatttgaacgatgcagtgaaggtgttttcttactgacgacaactcctcgtccagtcattgtggaaccacttgaacaactagatgatgaagatggtcttcctgaaaaacttgcccagaagaatccaatgtatcaaaaggagagagaaacccctcctcgttttgcccagcatggcacgtttgagtacgaatattctcagcgatggaagtctttggatgaaatggaaaaacagcaaagggaacaagttgaaaaaaacatgaaagatgcaaaagacaaattggaaagtgaaatggaagatgcctatcatgaacatcaggcaaatcttttgcgccaagatctgatgagacgacaggaagaattaagacgcatggaagaacttcacaatcaagaaatgcagaaacgtaaagaaatgcaattgaggcaagaggaggaacgacgtagaagagaggaagagatgatgattcgtcaacgtgagatggaagaacaaatgaggcgccaaagagaggaaagttacagccgaatgggctacatggatccacgggaaagagacatgcgaatgggtggcggaggagcaatgaacatgggagatccctatggttcaggaggccagaaatttccacctctaggaggtggtggtggcataggttatgaagctaatcctggcgttccaccagcaaccatgagtggttccatgatgggaagtgacatgcgtactgagcgctttgggcagggaggtgcggggcctgtgggtggacagggtcctagaggaatggggcctggaactccagcaggatatggtagagggagagaagagtacgaaggcccaaacaaaaaaccccgattttagatgtgatatttaggctttcattccagtttgttttgtttttttgtttagataccaatcttttaaattcttgcattttagtaagaaagctatctttttatggatgttagcagtttattgacctaatatttgtaaatggtctgtttgggcaggtaaaattatgtaatgcagtgtttggaacaggagaatttttttttcctttttatttctttattttttcttttttactgtataatgtccctcaagtttatggcagtgtaccttgtgccactgaatttccaaagtgtaccaatttttttttttttactgtgcttcaaataaatagaaaaatagttataatattgatcttcaactttgccattcatgcttctatgcatattaggctacgtattccacattgaaagcatgagagtgtctaggcctttgaatggcatatgccatttctgggaaatgcatctggaggctaagtattgctttctacaaataattgccccctttgttttaaaaagaagaaatgcatattgaagtagtttgatgatttgtttggcatataggaagcacgctggtgctaagtattttttaaatggttatgtaagcaaagctgaactgtaaatcttcaggaatatgtattaagattgtggaatgggtgtaagacaattggtagggggtgaaagtgggtttgattaaatggatcttttatggccctatgatctatcctttacttgaaagcttttgaaaagtggaaaggtcattttgttgcatttccccatttcttgtttttaaaagaccaacaaatctcaagccctataaatggcttgtattgaacttttacatttgaattaaagatgttaaacatgaa

SEQ ID NO: 1185 - DNA, 236 bp, HOMO SAPIENS
  misc_feature (67)..(68): n is a, c, g, or t
ataactggtgtgcacctgcgtactaatctcacgactgttaacttccaactttgacgaggccatgcgnncgacacgcgcgactggggaaggtgcaatactgtcctgggcatatgcactttggtttatcagggatattttattagtgttttgtatgtatttaatgacgtattctataggttccattgtctttgcttttctggttttttttatgagacgttagcgtgtgccaaagtgac

SEQ ID NO: 1186 - DNA, 1311 bp, HOMO SAPIENS
tcttgccttccggcccggcgcccgatttccgccttccgacccagctgtgggctgcgccccacgccagcccgcgccccgcatggctgccgccggggccaggcctgtggagctgggcttcgccgagtcggcgccggcgtggcgactgcgcagcgagcagttccccagcaaggtgggcgggcggccggcatggctgggcgcggccgggctgccggggccccaggccctggcctgcgagctgtgcggccgcccgctctccttcctgctgcaggtgtatgcgccgctgcctggccgcccggacgccttccaccgctgcatcttcctcttctgctgccgcgagcagccgtgctgtgccggcctgcgagtttttaggaatcaactacccaggaaaaacgatttttactcatatgagccaccttctgagaatcctcccccagaaacaggagaatcagtgtgtctccagcttaagtctggtgctcatctctgcagggtttgtggctgtttaggccccaaaacgtgctccagatgccacaaagcatattactgcagcaaggagcatcagaccctagactggagattgggacataagcaggcttgtgcacaaccagatcatctggaccatataattccagaccacaacttcctttttccagaatttgaaattgtaatagaaacagaagatgagattatgcctgaggttgtggaaaaggaagattactcagagattatagggagcatgggtgaagcacttgaggaagaactggattccatggcaaaacatgaatccagggaagataaaatttttcagaagtttaaaactcagatagcccttgaaccagaacagattcttagatatggcagaggtattgcccccatctggatttctggtgaaaatattcctcaagaaaaggatattccagattgcccctgtggtgccaagagaatattggaattccaggtcatgcctcagctcctaaactacctgaaggctgacagactgggcaagagcattgactggggcatcctggctgtcttcacctgtgctgagagctgcagcttgggtactggctatacagaagaatttgtgtggaagcaggatgtaacagatacaccgtaaaggcatcttaaagccttgaaaaatgttaataatcttttataccttgcaattccatttctgggattttatcctaaggaaatacttataccaaaaatagaggtgcagagatgttgacagattgcttacacagtgtctacttattagtgaaacaaaagtgtccagtgacagggaattaaataaattttggtacatccaca

SEQ ID NO: 1187 - DNA, 2318 bp, HOMO SAPIENS
taaagtgtcgagcttctcctcgcgagagacttagtgctcatgctcgctgcaggggtcggaggtcagggcgagcgtctcgcaggccgtaggaggaagatggcggtggagtcgcgcgttacccaggaggaaattaagaaggagccagagaaaccgatcgaccgcgagaagacatgcccactgttgctacgggtcttcaccaccaataacggccgccaccaccgaatggacgagttctcccggggaaatgtaccgtccagcgagttgcagatctacacttggatggatgcaaccttgaaagaactgacaagcttagtaaaagaagtctacccagaagctagaaagaagggcactcacttcaattttgcaatcgtttttacagatgttaaaagacctggctatcgagttaaggagattggcagcaccatgtctggcagaaaggggactgatgattccatgaccctgcagtcgcagaagttccagataggagattacttggacatagcaattacccctccaaatcgggcaccacctccttcagggcgcatgagaccatattaaattctatttactatttgttgaatttatttttccgtcagttatgtaaaataaacatactcttcttcctcccctgattattgccattaagcctttaaattctaaacaaattataatgcatcatctatttaggagttagatttggatgtgctattgtatgattacgaatagtctgtatgtttcaagcccttctgtaaaatatgaagaaaagtgctcttagcattctgtgtaaaactgtactgttaaatatatgtgtgtaatcagcctgagtgtgaaagttaatggaggcctgggaacagggtttatactaagtagtggaggagcgtatggttaagcccaaaggggcagaacaagaaagccacgggattgtatgaaatcaaacatgagtttgtggtgtagactgctgtatgcagttggaaaggacacgtgagagtgagctcaagtggcagcagaggcagtttggaataagctgcggcaagttgaagaagctgtgttggacgagattgccccgccttgatcagggtaccatgacataaaaggttaaagaacaggcaacacaatgagcacttaagtttttaacatgtggggaatagggcattttaaaggctggaaccagttcagaggaaacaagggtttgggtagaggtagaaaggtttaattaaccctggagatctgcaaatggagggaggggtgaaggaggaatcttaagaccgagggagaagagccaaggacaaggtcaggttgaatgagtaggaggtgttcacacatcctcttgtgtgctaggtagtggcgtgcatctgatctgagaggcagtaaagcagtgatgaagacagtgcagcagaacattgaagtcctgattgcagcagtgactctgcaaccttggataaattatttcaatctttattttgtaaaacggagataacggcctataggattgttaagactgaatattttaaaagagcttagaatggtgcctgacaaatgagaaacaataaatactgattattggccataaagtggtattaaaactggatctcttttcttccatggcactactctcattttgaagtttatgaacagtacgacagtgtattgtaaattccctttagtttgttacagtagccaattgaaaatgtatatcccaaaatttaaaaaaaaaagtaccagcagcaataaaattgcactagttttatctggtacatacaaaaacagccatttaaaatctgatgattctgtggaattggtgtccctgttagcaatggcagagaccagcctggagcctagatctggtgcttcttctgtgctgtggtttaccccaaacctttaggttgtttattcattcagattagatagactggagccataaagttaatttgcacctagctttttggagaatagccatgattaactgctattcgtggtgggggtgggggggaaccctatgatttactatgcagatgaagagggtaggaactaaataaaggactttgtaagccaaagtggttgggctgctttgtcaaattccaccctttgcttggttccaacatggaatttctcctttaaagatttcaatatcccatcaaaagtacagttagagaatacctagtgaatttattgaatataatgctaagaatcaaaagacttgtactagtttacctctggctttggtaagtgtggctttgagtaataactgagctgtttccccgcatataaaatagaaataaataagtagtcatcatgacagcaaaaaaaaaaaaaaaaaa

SEQ ID NO: 1188 - DNA, 7124 bp, HOMO SAPIENS
gccccagatcggaagtgacggagacgtgctagcgcgtcgaaggtagctctatggttttcctcgcgttcttgagtcgggaaatggccgctgtgtggttgcaacggagataaattcccggaaccgcgattcggcgtgtcaggaattcgaatttagagtttaatttctcagagcattctctccaggaagaatttttacagtatctcaaagacttcacttgacttcttgatcctgcataaaaccaaggagaaaagaaatgggtcgctccaattctagatcacattcttcaaggtcaaagtctagatcacagtctagttctcgatcaagatcaagatctcattctagaaagaagcgatacaggtctcgttccagaacatattcaaggtctcgtagtagagatcgtatgtattctagagattatcgtcgcgattacagaaataatagaggaatgagacgaccttatgggtacagaggaaggggtagagggtattatcaaggaggaggaggtagatatcatcgaggtggttatagacctgtctggaatagaaggcactctaggagtcctagacgaggtcgttcacgttccaggagtccaaaaagaagatccgtttcttctcaaagatccagaagcagatctcgccggtcatatagatcttctaggtctccaagatcatcctcttctcgttcttcatccccatatagcaaatctcctgtttctaaaagacgagggtctcaggaaaaacaaaccaaaaaagctgaaggggaaccccaagaagagagtccgttgaaaagtaaatcacaggaggaaccgaaagatacatttgaacatgacccatctgagtctatcgatgaatttaataagtcatcagccacatccggtgatatttggcctggcctttcagcttatgataatagtcctagatcaccccatagtccttcacctattgctacaccacctagtcagagttcatcttgctctgatgctcccatgctcagtacagttcactctgcaaaaaatactccttctcagcattcacattccattcagcatagtcctgaaaggtctgggtctggttctgttggaaatggatctagtcgatacagtccttctcagaatagtccaattcatcacatcccttcacgaagaagtcctgcaaagacaatcgcaccacagaatgctccaagagatgagtctaggggccgttcctcgttttatcctgatggtggagatcaggaaactgcaaagactgggaagttcttaaaaaggttcacagatgaagagtctagagtattcctgcttgataggggtaataccagggataaagaggcttcaaaagagaaaggatcagagaaagggagggcagagggagaatgggaagatcaggaagctctagattacttcagtgataaagagtctggaaaacaaaagtttaatgattcagaaggggatgacacagaggagacagaggattatagacagttcaggaagtcagtcctcgcagatcagggtaaaagttttgctactgcatctcaccggaatactgaggaggaaggactcaagtacaagtccaaagtttcactgaaaggcaatagagaaagtgatggatttagagaagaaaaaaattataaacttaaagagactggatatgtagtggaaaggcctagcactacaaaagataagcacaaagaagaagacaaaaattctgaaagaataacagtaaagaaagaaactcagtcacctgagcaggtaaagtctgaaaagctcaaagacctctttgattacagtccccctctacacaagaatctggatgcacgagaaaagtctaccttcagagaggaaagcccacttaggatcaaaatgatagcgagtgattctcaccgtcctgaagtcaaactcaaaatggcacctgttcctcttgatgattctaacagacctgcttccttgactaaagacaggctgcttgctagtacacttgtccattctgtcaagaaggagcaagaattccgatccatctttgaccacattaagttgccacaggccagcaaaagcacttcagagtcatttattcaacacattgtgtccttggttcatcatgttaaagagcaatacttcaagtcagctgcaatgaccctaaacgagcggttcacttcgtatcagaaagccactgaagaacatagtactcggcaaaagagccctgaaatacacaggagaattgacatctcaccaagtaccctgaggaagcatacccgtttagcaggggaagagagagtttttaaagaagaaaatcaaaagggagataaaaaattaaggtgtgactctgctgaccttcggcatgacattgatcgccgtagaaaagaaagaagtaaagaacggggagattccaagggctccagggaatccagtggatcaagaaagcaggaaaaaactccaaaagattacaaggaatacaaatcttacaaagatgacagtaaacataaaagagagcaagatcattctcgatcttcatcctcttcagcatcaccttcttctcccagttctcgagaagaaaaggagagtaagaaggaaagagaagaagaatttaaaactcaccatgaaatgaaagaatactcaggctttgcaggagttagccgaccacgaggaacctttcatgacgacagagatgatggtgtggattattgggccaaaagaggaagaggtcgtggtacttttcaacgtggcagagggcgctttaacttcaaaaaatcaggtagcagtcctaaatggactcatgacaaataccaaggggatgggattgttgaagatgaagaagagaccatggaaaataatgaagaaaagaaggacagacgcaaggaagaaaaggaataataaatatgaagtaagattacaacagagcagaacttgcacccaccattttttttacctgatttttgttttcaaataagaatgtaagcattttacttaaattttactgtttgcaagtagtctatagaaattttgttttaagtcttcaaatatcttgagaaatagtagactgtatgttgaaaattgtactgaaataaagtagaaaattgttacgtaccatatttgtaactatcaacttttaaaacttttaacgtttttgttacatgcattgtaattctgctttgtctataagatatggtcaagtacagctctgtgaaagttctgattctcttccttccctgtttgtcaatgttttattctgaagtaaacgttagctctacatataaatcctggaacagaaattgtttatagagactacactaattattttaactgtatacatctgtttaatttgaacacactacatcgtagggtgactgatttttgaagtataccacagacaaaaagttgttactatggtaaactaagctagtttaacacttgagcaaatgcttaagaaggaattaaaaaaaaaaagctttgccaatagctaaaaagtacaagctattaaaaatcagattgaaaagttttgagaaaatgttatttttactgaaagcaagcagtggcctataaagaacattcttaggagccttttctatttgcgttcaaaactgtgtgttctctttctattcctatttgatagtttgagtcatggtcttagatattagctatttgtgagaggaaactggtttgtaacaatactgcaaatagaaaccccatttctactgaacatcctagttttaaacagaagaaaaactgtaatcctggggttggtatgtaggaggtctatcctgcagaataagttgatacattagtacctgatttcatatcttacatatttatttgagctgaacattagtttgtagtgtaactattagtaaaaatagagaaacacagcatactgttcattaatagtattttaaaaaaattgtttttcaaatgtcaccaataaaagttttggcaggaagcttgttgcggcattgatctaacctttttcccccccatttcagttgcagtttttgtagaatggctttttctttttcctcttaagagttctattcttcaggtagataatttttcaaatgtgaattatcttttgtgtctatattgatagctcttaaaggagtgaaaatctaaaatagtaaatttcaatgttaagtgtctgctttatgggcatatataaaagtagacacatttcatttgttaatttagttgtgtgtgtgtgttaaaaggagctaatgcttattctgttaatgtaaacttttgaagatcttaagtgtattgctctttcatcttaaacactttcgaggatttgcagtgcgtctagcacctagattacagccaggaacattggttaagaactgttggaaacaaaactaaaagcaaactcaacatatgtgatgtttatggccctcagatccttagtattgtgtgattttcccccgttaacatgtctttctaaaattgtctattaaagcagaggaaatacctgccaaaggaagtatgtattgcattaatcagggcataactaatattctcctgttcagaataatacttatttacgtgtgaaagcaacatggatgtgattcccaacacagaattttcatgacccttttattgtatacaaataaataccataacagttacttggttagacatcaaatctgtgtgcatgactatgtgcttatccacttaagacaataggtaaaaggggatctgagaaattatgtaatagggagtgggaataaaactacttaattcctgtgggcaggttatattttaagttcaaatgcattgctttaacctttggttacttttattctgttaaacagaattgaagaaagagtattataccagagtgtagtaggctagggtgattgtaagaactctgtaatagaatgtcattgtggatgttacctttttcagatccaagcatataaaaagcctgtatattttttaaaaacacatcttaactccacgctttacgatattataaaagttgaatggttcctcttggtaaggatatttgcttacaagtgctaggaaataactcactgatacctgcgttaacatactttgttttgcctagagaggggcaataaaaatgaaccaaaggatatttccagaaaggattaagaaagctgtttaagaaggccatgactctttaggtgtgtatgtgtacctttcagcatcctaggaatttttatactaaaagcaaaatgttttttccagttagtcttcttcaaggaattactattgttccttttgtcacaggtaaaatcagtgttgggaattataatttgagaaaaatattacccagtaacattgaatgtagatggctaaacgattcttactcagtgtgatgtataatgatgcaacagggacccttgtaaattgtcatacgccaataaaatgtcacaagtaataactgctgttgtttgtttacctgtgtctatttcacacatcttatttctgtggcctattttagaatatcagcgcatctgttaggaagattactggtgtggtaaggcttgataaatgctttataaactccctcaaacctttctttactgtttttttgttttgtcttgtttttgtttttgtttttgtttttgtttttgtttttgtttttcccttgtctcccctgggaaaatgggaaattttacagttggtaaatctaagccaaaattattttgaaataaaggaattctggatgtccagtttagtcctcgttttcttacgttaatctgggaccttatcacccataatatggtgattacttctctttctaaaaacatagtagctagtaaataagtaaaaagaattgtcttttcattcactttaagtaagatgtggtataattcttaccatgtgccatcctgtcagttttaacaaagcattttcacagaaatttgtgtactaagacaaactgacacattttgactcatacaaatggcaaattagtccttaaaaattctgtgagagaaataactctgtgtgtacatacatatgcatgtaaagtgttgtgtaagatcattggtagcttaattatactggataattgtaatgttatatacaaatttcttatataaaagtatgctgcattattaacatttgtttaacttttcttatttttctttttctgggtttcaactggaatcccattggtggggatgtaccttaagtttccttgtggaataatagactttcacatccagaaagagaagttcagaggcctttctcaatttacagagttgaagaggaaaggcaaatggaggaataaacttcattgtcattgggattaatttggctagactcaatctcttgagccttaaaatgagaaagtaatatccattacatgtttagagttctcaaatagttgatactattattaaatgtttcaaattttattggggtagatactaaaaattagtacactgtcctaatgaagtttaaatgaacaagttttacatttcttaggattcaggaatatatggaatctagttgtatttaattgacttgagagccacagagattgtgttgatttatgagctggactcctattgttttagaaacatgcagtaatgattaacttgtgtcaatgatggtaatgagaccaaacttgtacatttaattaagggtaccagttctttttatgttactagactataccttggcctttaaaaatgaatctcactgattaaagagaacaggcattattaggatagcattccaccacaactagaaacattcaaataatgtgtcttaattgtaatctgtatataggaaaatttttcctatggatatttttggtgttttaccacagtgaactgatttgtagcacttatgaagtgcagaaggtaatattcttgaaaatagaaaaaggttgggtgagcaggctttaatgcctttcccccaagaatatacatcgaatttttcttaatcttttggggttggccagcttccagatttcattaataatgagctctgcctttaataaaagtacatgatcatagctacactgtatgtttaggtggtgtgaaatgatttataatcacagcttgaactgtgtttgcttggtactgtcatagtgattacaaatttcatggaatgcgaagagcaacaataaataaaaaataccactcaccctcaaaaaaaaaaaaaa

SEQ ID NO: 1189 - DNA, 2324 bp, HOMO SAPIENS
tttttttttctttcaaaagacgaacagagaagtttcattttctttttctcctgaaaccgaatctggccggcctggctaggcatctatttccgggctgtaagcagctgacacctgcccagtggaagctggcatccctccccttgtgggttcagagctgcaagaagcaccaggctcggccacttcagaagccccagcctcgacctagcccaccctctcagggccacagtgcagaagcctgcacacctgccaagtctctccgactccttgcagctgctgtcagcatggcccaggctcctgctgacccgggcagagaaggccaccttgaacaaagaatcctgcaggtgctgacagaggctggctccccggtgaaacttgcccagctggtgaaggaatgccaagcacccaagagggagctcaaccaagtcctctaccgaatgaaaaaggagttgaaagtctccctcacatcccctgccacctggtgcttgggcgggactgatcctgaaggcgagggtcctgcagagctggccttgtccagccctgccgagaggccccagcaacatgcagctacaattccagagacccctggccctcagttcagccaacaacgggaggaagacatctacaggtttctcaaagacaatggtccccagagggccctggtcatcgcccaagcactgggaatgaggacagcaaaagatgtgaaccgagacttgtacaggatgaagagcaggcaccttctggacatggatgagcagtccaaagcatggacgatttaccgcccagattctggaagaagagcaaagtcagcctcaattatttaccagcacaatccaatcaacatgatctgccagaatggacccaacagctggatttccattgcaaactccgaagccatccagattggacacgggaacatcattacaagacagacagtctccagggaggacggttccgccggtccacgccacctcccttcaatggcaccaggtgattcctcaacttgggggaccctagttgatccctgggggccccaggacatccacatggagcagtccatactgagacgggtgcagctgggacacagcaatgagatgaggctccacggcgtcccgtccgagggccctgcccacatcccccctggcagccccccagtctctgccactgctgccggcccagaagcttcgtttgaagcaagaattcccagtccaggaactcaccctgagggggaagccgcccagagaatccacatgaaatcgtgctttctcgaggacgccaccatcggcaacagcaacaaaatgtctatcagcccaggggtggctggcccaggaggagtcgcagggtctggagagggggagccaggggaggacgcaggtcgtcgtcccgcagacacacaatccagaagtcactttcctcgagacattggtcagcccatcactcccagccactcgaagctcacccccaagctggaaactatgactcttggaaacaggagtcacaaagctgcagaaggcagccactatgtggatgaagcctcacacgaggggagctggtggggaggtgggatttagtgcacagcctcacgtggggcttggacacaggctgggggtgggcgcatgctagggagactagcctgctgctctctgcattccttagcgtcttgtttgacctgcttgcttccagacataacctgcatgaatcagttttgggggaatggacctggcatggggatgggttcaggccaggtcttttgatggccaggagtagatgacagggagttgccttggggaacctttggtgtgccaagaggaggtgggtagatgggagtggggctcggtcccccaggcccaggggactctctccactctttcctgggctcggggcatctgcctggagttaccttccatcatggctacctgctgtggtttgaatgtttgagtcccaacaaaattcatatcaaaacataatcccaactgggtgcagtggctcacgcctgtaatcccagcactttgggaggccgaggcgggcggatcaataggtcaggaaatccagaccgtcctggctaacatggtgaaaccccgtctctactaaaaaaaaaaatacaaaaaattagccgggcgttgtggcgggcacctggagtcccagctactccggaggctgagggaggagaatggtgtgaacccgggaggtggagcttccagtgagccgagatcgcgccactgcactccaggctgggcgacagagcgagactccgtctcaaaaaaataaatacataaataaaaaataaaccaaccataaaaaaaaaaaaaaaaaaaaaaaaaaaaaaa

SEQ ID NO: 1190 - DNA, 937 bp, HOMO SAPIENS
gcgtgccgtccgggtcgcctaggcctggggtcgggagcgcgcacgctgtgcgccctgggcgcgctcgggattctcgcctggcgcggctggggaaggtgaacagtgtggcccgccatgttcttctccgcggcgctccgggcccgggcggctggcctcaccgcccactggggaagacatgtaaggaatttgcataagacagttatgcaaaatggagctggaggagctttatttgtgcacagagatactcctgagaataaccctgatactccatttgatttcacaccagaaaactataagaggatagaggcaattgtaaaaaactatccagaaggccataaagcagcagctgttcttccagtcctggatttagcccaaaggcagaatgggtggttgcccatctctgctatgaacaaggttgcagaagttttacaagtacctccaatgagagtatatgaagtagcaactttttatacaatgtataatcgaaagccagttggaaagtatcacattcaggtctgcactactacaccctgcatgcttcgaaactctgacagcatactggaggccattcagaaaaagcttggaataaaggttggggagactacacctgacaaacttttcactcttatagaagtggaatgtttaggggcctgtgtgaacgcaccaatggttcaaataaatgacaattactatgaggatttgacagctaaggatattgaagaaattattgatgagctcaaggctggcaaaatcccaaaaccagggccaaggagtggacgcttctcttgtgagccagctggaggtcttacctctttgactgaaccacccaagggacctggatttggtgtacaagcaggcctttaatttatattgaactgtaaatatgtcactagagaaataaaatatggacttccaatctacgtaaacttaaaaaaaa

SEQ ID NO: 1191 - DNA, 403 bp, HOMO SAPIENS
taaccaagaattccatatcctgccaaactaagctacatgagcaaagaagaaataaaatctttcccagacaagcaactgctaaaagaatttgttatcaccagactggccctacaagagagtcttgagagttctaaacatggaaatgaaagaatggtgacacctgctaccacaaaaatacacataagcacatagcccacagaccctgtaaagcaactacacaatccaaactacagagcaaccagctaatgacaccatgttaggaataaagcctcatgtctcaatattaaccttgaatgtaaacaacctaaacaccccacctaaaagacttggagtggcaaattggattaaaaacaagacccagccttctgctgtcttcaagagacctctctcacatgtaacagga

SEQ ID NO: 1192 - DNA, 2011 bp, HOMO SAPIENS
gccacacggtctttgagctgagtcgaggtggaccctttgaacgcagtcgccctacagccgctgattccccccgcatcgcctcccgtggaagcccaggcccgcttcgcagctttctccctttgtctcataaccatgtccaccaacgagaatgctaatacaccagctgcccgtcttcacagattcaagaacaagggaaaagacagtacagaaatgaggcgtcgcagaatagaggtcaatgtggagctgaggaaagctaagaaggatgaccagatgctgaagaggagaaatgtaagctcatttcctgatgatgctacttctccgctgcaggaaaaccgcaacaaccagggcactgtaaattggtctgttgatgacattgtcaaaggcataaatagcagcaatgtggaaaatcagctccaagctactcaagctgccaggaaactactttccagagaaaaacagccccccatagacaacataatccgggctggtttgattccgaaatttgtgtccttcttgggcagaactgattgtagtcccattcagtttgaatctgcttgggcactcactaacattgcttctgggacatcagaacaaaccaaggctgtggtagatggaggtgccatcccagcattcatttctctgttggcatctccccatgctcacatcagtgaacaagctgtctgggctctaggaaacattgcaggtgatggctcagtgttccgagacttggttattaagtacggtgcagttgacccactgttggctctccttgcagttcctgatatgtcatctttagcatgtggctacttacgtaatcttacctggacactttctaatctttgccgcaacaagaatcctgcacccccgatagatgctgttgagcagattcttcctaccttagttcggctcctgcatcatgatgatccagaagtattagcagatacctgctgggctatttcctaccttactgatggtccaaatgaacgaattggcatggtggtgaaaacaggagttgtgccccaacttgtgaagcttctaggagcttctgaattgccaattgtgactcctgccctaagagccatagggaatattgtcactggtacagatgaacagactcaggttgtgattgatgcaggagcactcgccgtctttcccagcctgctcaccaaccccaaaactaacattcagaaggaagctacgtggacaatgtcaaacatcacagccggccgccaggaccagatacagcaagttgtgaatcatggattagtcccattccttgtcagtgttctctctaaggcagattttaagacacaaaaggaagctgtgtgggccgtgaccaactataccagtggtggaacagttgaacagattgtgtaccttgttcactgtggcataatagaaccgttgatgaacctcttaactgcaaaagataccaagattattctggttatcctggatgccatttcaaatatctttcaggctgctgagaaactaggtgaaactgagaaacttagtataatgattgaagaatgtggaggcttagacaaaattgaagctctacaaaaccatgaaaatgagtctgtgtataaggcttcgttaagcttaattgagaagtatttctctgtagaggaagaggaagatcaaaacgttgtaccagaaactacctctgaaggctacactttccaagttcaggatggggctcctgggacctttaacttttagatcatgtagctgagacataaatttgttgtgtactacgtttggtattttgtcttattgtttctctactaagaactctttcttaaatgtggtttgttactgtagcactttttacactgaaactatacttgaacagttccaactgtacatacatactgtatgaagcttgtcctctgactaggtttctaatttctatgtggaatttcctatcttgcagcatcctgtaaataaacattcaagtccacccttttcttgacttcaaaaaaaaaaaaaaaaaaaaaaaaaaaaaaaa

SEQ ID NO: 1193 - DNA, 248 bp, HOMO SAPIENS
ctgttgctcataccagtgctggggatgatttttgccctgagagatgccagagcccagtctgtgagccagcataaccaccacgtaattctctctgaagcagcctcactggagttgggatgcaactattcctatggtggaactgttaatctcttctggtatgtccagtaccctggtcaacaccttcagcttctcctcaagtacttttcaggggatccactggttaaaggcatcaagggctttgaggctga

SEQ ID NO: 1194 - DNA, 140 bp, HOMO SAPIENS
gtttacctcgctaatacttcttaataacatgcatcaaatgatattccctatggtgaagtatattctcaaagttatgttatctttcatttttggcatttggtgcttatggacttagtacccaggcaacaaagatctattat

SEQ ID NO: 1195 - DNA, 519 bp, HOMO SAPIENS
aggaacgcgggcggtgcggactcagcgggccgggtgcaggcgcggagctgggcctctgcgcccggcccgacctccgtctataaatagagcagccagttgcagggctccattctgctttccaactgcctgactgcttgttcgtctcactggtgtgagctccagcatcccctttgctcgaaatggaccccaactgctcttgcgccactggtggctcctgcacgtgcgccggctcctgcaagtgcaaagagtgcaaatgcacctcctgcaagaagagctgctgttcctgctgccccgtgggctgtgccaagtgtgcccagggctgcgtctgcaaaggggcatcggagaagtgcagctgctgtgcctgatgtgggaacagctcttctcccagatgtaaatagaacaacctgcacaacctggatttttttaaaaatacaacactgagccatttgctgcatttctttttatactaaatatgtgactgacaataaaaacaattttgactttaaaaaaaaaaaaaaa

SEQ ID NO: 1196 - DNA, 3500 bp, HOMO SAPIENS
atatccgcctgggcgtcacgcttcgtggggcgggacgaggagaagccaaacgtaaagacaccaggagtttctcgggcccagctgtggctgctgccggggagccccaagccttggcgggtccttgcggcgaataggagtctggtcaggcgtcaggctagtccgacgaagagtgggtaggtggaagccttccaaagagcggcggttgtctgggagccgtctcagttggccgcgacccgggcgcatgcgcggggcgggcggtgcgccttgggtagcttgtcctctccgaccccgggcgctgagggcctctgtacggcgccgcgtagggtctcggccgcagaacgtggccgagaggcccgggcgagacttcgggaccgtgtcctgagcgctctccatgcgcccggcgcgaggtgtgatcagcactggaaaagatgcctgcccctgctgccacatatgaaagagtagtttacaaaaacccttccgagtaccactacatgaaagtctgcctagaatttcaagattgtggagttggactgaatgctgcacagttcaaacagctgcttatttcggctgtgaaggacctgtttggggaggttgatgccgccttacctttggacatcctaacctatgaagagaagaccttgtcagccatcttgagaatatgtagcagtggtcttgtcaaattgtggagctctttgaccctgttaggatcctataaaggcaaaaaatgtgctttccgggtgattcaggtttctccatttcttcttgcattatctggtaatagtagggaactagtattggattgaatgaatagtcttccattttggaaacgttcatccactctcatatttattttttggtgcctgcatgtttgaagactgaagcaggctaaaagctcttgatgaaatttgagggtgctgaagatgttcccactaatttccagccatcacctttggtggggtgggcttcggaggacagtctgtctgaacctgccagtgctgaccctgcagcactttcagcatatgcacatcaaagttggagaccgcgctgaacttaggagggccttcacacagactgatgtggctaccttctcagaattaacaggggatgtcaatcctttgcatttgaatgaagactttgcaaaacacaccaagtttggaaatacaattgtacatggagttttgatcaacggacttatctcagctctcctaggaactaaaatgccagggccaggctgtgtatttctttcccaggaaattagctttccagcccctttatatattggagaagttgttttagcttctgcagaagtgaaaaagctgaagcggttcattgctattattgcagtgtcatgttctgtaatagaaagtaaaaagactgttatggaaggctgggttaaagttatggttccagaagcttccaaatcctgaaatagatgttttaaagatgcaacctcaaacaccaatgctgttgttaaagagcctatggggaattgctgctctttaccaaagaatggttgataggcccagaagcccatcttagttaggggaagggagcaggaagagggttgttcaaatgcccactttccagtttggccttatgcttcatgcagacttgagtgtatgcaggatttcattatctgcctgggttttttgtttgttttttgttttttaattcaagaagtaggctgggcccggtggctcatgcctgtaatcctggcactttgggaggctgcggcaggcggatcacttgaggtcaggagtccaagaccagcctggccaacatggtgaaaccccatctctaccaaaaaaaaaaaaaaaaaaaaagtgcaactagctgtgcttggtgacttggccctgtagtcccagttgcttgggaggctgaggtgggagaattgcttgggcctgagagctggaggttatggtgagaaactgagattgcaccactgcactgtagcctgagtgacagagcgagaccctgtctcaagaaagaagtattgggaaggttatttaaagactctacttttaaatcaggcgtggcagctcacgcctgtaatcccagcattttgggaggctgaggcaggcgaatcacttgaggtcaggagttcaagaccagcctggccaacatgtgaaaccccatctctactaaaaatacaaaaactaaccgggcatggtggcgggcacctgtaatcccagctacttgggaggctgaggcaggagaatctcttgaacctgggaggttgcagtgagctgaaatcacaccactgcacttcagcctgggtgacagagcaaaactccacctcaaaaaaaaaaaaaagattctacttttagaaattcagacctagatagatttgcatttggataacaaatccctacctatagccatgtggaagcagcttgtcactgtattttaactgtgtaacaattattgaaggcgaaaatagaagttgggtcatctttgaacacctaccttttatcaatgaatatttttagactgttcttcagtatctgagtcagagtttattgtaatttgttatttacaccaaggtggcatcttagtctaccttcagtgagacttgcgtttcaggggaggggcgtatgtgcatcctcggtctcagttatgtaaacggtctgatctgtaaaatagtggtagcacatgccatgtgggatagttggtggagatgatagatggagttaagcacagggcccagcctgtcagcagtagctactattattgttgcccatttcccctgcaactgaggtgagaggttttcctgagtttgaagctgactggcccacagttaaacgtaacagaccagtttttcagggtgtcagccaacctctattagtgttcttaagtacagtttctgttataaaagttcagattattccttgaaaatttggatctacctcccattattatgagtaatacatgcttatagtaaaaaaaaaaaaattgtaagaaataaatattaagaagattatggaggccaaattcttaagactttgggggctggggtcagggaggttatattgaaggggagatgtgcctaacatgttactactaaatggccatcccaacacagccaacacttttgtttcccatttttttttgtttcccgttttttaataaaattgagatataattcacataccataaaattcaccttttaaaagtgtacagtttagtggttttcagaatatccacaaagttgtacaaccatcaccaaatcaattttttatagcatttttcatcacccccaaaagaacctcccattagcagtcaatccatttctctcctccagtctttgggaatcaccagtctactttctgtctctatgggtttccctgttctggacatttcataaaagttcatacaatgtatgatcctttggaactggcttctttgatatagcatgttttcagggttcatccatgttacagcatgtatcagtacatcattttattttatggctgaataatattccattgtatttacccata

SEQ ID NO: 1197 - DNA, 6985 bp, HOMO SAPIENS
gcatctggtgttttcgctgccgaggataggacgacgagcgcaatcgggagctccgccgcccggattcctgcttccctggggcccggaggctgctgcgtaccccactgtgacctggaacccagggacccgagtcccgacccggattatcgtggcgcttttcccggccggctctggtgctcggtgtccctccgccgccgctcccgtttccggcgggggagatggccaggatctgacccgggaggaggccgcacccgcgccgcgctctgcggctggctctaggcgatgccgagcagctcggacacggcgctggggggaggcgggggcctgagctgggcggagaagaagttggaggaacgccgcaagcggaggcgattcctgtcccctcagcagccgccgctgctgttgccgctcctgcagccgcagctcctgcaaccgccgccgcccccgccgcctctgctcttcctggctgctcccggcacggccgccgccgcagccgccgccgccgcggcctcctcctcttgcttcagcccgggcccccctctggaggtcaagcggctggcgagaggcaagaggcgcgcaggagggcggcagaagcggcgtcgcgggccccgcgccgggcaggaggcggagaagcgtcgggtcttctcgctgccccagccgcagcaggacggcggtggcggtgctagtagcggcgggggtgtgaccccgctggtggaatacgaggatgtgagctcccagtccgagcaggggctgctgctggggggggccagcgcggcaacggcggcgacggctgccgggggaacggggggcagcggcgggagtccggcctcctcctccggcacccagcggcgcggggaggggtcggagcgcaggccccgccgggaccgccgcagcagcagtggccgcagcaaggagcgccaccgcgagcaccggcggcgggatgggcagcgcggtggcagcgaggcctccaagtcccgcagccgccacagccacagcggcgaggaacgggccgaggtcgccaagagcggcagcagcagcagcagcggcggccgccggaaaagcgcttcggccacatccagcagcagtagcagccgcaaggaccgggactcgaaggcccaccgcagccggactaagtcgtccaaggagccgccttcggcctacaaggaaccgcccaaggcctaccgggaggacaagaccgagcctaaggcctacaggcggcggcggtccctcagcccactgggaggccgggacgacagcccggtgtcccacagggcctctcagagcctgaggagccgcaagtcccccagcccggcaggaggtggcagcagcccctattctcggcggctgccgcgctccccgagcccctacagtcgccgccgctcccccagctacagccgccacagctcctacgagcggggcggcgacgtgtcccctagtccctacagcagcagcagctggcgccgctctcgcagtccctacagccctgtgctcagacggtctggaaaatcccgaagcagaagcccgtattcatctaggcattcaagatctcgtagcaggcacagattgtctagatccagaagtcgtcattctagtatttctcctagcacactaactctgaagagtagcctggcagctgaattgaacaagaataaaaaagcacgagcagcagaggcagcaagagccgcagaagcagcgaaagctgcagaagcaactaaggctgctgaggctgctgccaaggctgcaaaagcttcaaacacttctacacctaccaaggggaacacggaaactagtgccagtgcatcacaaacaaaccatgtgaaggatgtgaagaaaattaaaattgaacatgcaccttctccctcaagtggtggaactttaaaaaatgacaaagcaaaaacaaagccacctcttcaggtaacgaaggtggaaaataatttgattgtagataaagccaccaagaaagcagtcatagttggaaaggagagtaaatctgctgctacaaaggaggaatcagtatctcttaaagagaaaaccaaaccacttacaccaagcataggagccaaggagaaggagcaacatgtagctttagtcacctctacattaccaccgttacctttgcctcccatgctgcctgaagataaagaagctgatagcttacgaggaaatatttcagtaaaagcagttaaaaaagaagtagaaaagaaactccgatgtcttcttgctgatttaccgctgccccctgagctaccaggaggagatgatctttcaaagagtccagaggaaaagaaaacagcaacacagttacatagtaaaaggaggcctaaaatatgtgggcctcgctatggtgaaaccaaagaaaaagatattgactggggaaaacgctgcgtggataaatttgatatcatcggaattattggagaaggtacttacggacaagtttacaaagccagggataaagacactggagaaatggtagccttaaaaaaagtacgtctggataatgaaaaggaaggctttccaattacagcaattcgagaaattaaaattctccggcagcttacccatcagagtattatcaatatgaaggaaatagtgactgataaagaagatgctttggatttcaagaaggacaaaggtgcattttatctggtgtttgaatatatggaccatgatctgatgggactactggaatcaggcttggttcattttaatgaaaatcacataaagtcatttatgagacagctcatggagggtctggattattgtcataagaagaactttttgcatagagatattaaatgttccaatatccttctaaataatagagggcagataaaacttgcagactttggacttgctcgattgtatagctcagaagaaagtcggccgtatactaacaaggtaattactttatggtaccgtccacctgaactgctactgggagaagaacgatacacaccagccattgatgtatggagctgtggctgtatccttggcgaactcttcactaaaaaacctatatttcaagcaaatcaggaacttgcacaactagaattaataagccgaatatgtgggagtccatgtcctgcagtgtggcctgatgtaatcaaactaccatatttcaacaccatgaaaccaaagaagcaatatcgtcgaaagttaagagaagaatttgtttttattcctgcagctgcgctagacttatttgattacatgcttgccttggatcctagtaagcgctgcactgctgaacaggctcttcagtgcgagttcctccgagatgtggaaccctcaaaaatgcctccaccagatctccctttatggcaagattgtcatgagttatggagtaaaaagcgaagaagacagaagcagatgggcatgactgatgatgtttccacaattaaagcccccaggaaggacttgtctctgggcttggatgacagcagaaccaacacaccccagggtgtgctgccatcttcacagctgaaatctcagggcagctcaaatgtggcacctgtaaaaacaggccctggacagcacttaaaccacagtgaattggcaattctactaaacctactacaatctaaaacaagtgttaatatggctgattttgtccaagtgttgaacattaaggtaaactctgagactcaacagcagctaaataaaataaaccttcctgctggaattttggcaacaggtgaaaaacagacagatccatcaacaccacaacaggagtcttcgaaaccgttgggaggaattcagccttcttctcagaccatccagcctaaagtggagactgatgctgcccaggcggctgtgcagagtgcatttgcagttctgttgactcagttaataaaggctcagcagtcaaagcagaaagatgtgctactagaagagagggaaaatggatcgggacatgaagcgtcattacaactcaggccacctccagaacctagcactccggtgtcgggacaagatgacctcatccagcatcaagatatgaggatcttggagctaacgccagaaccagaccggcctcgaattctgcctcctgaccaacgacctcccgagcctcctgaaccaccaccagtcactgaggaagatctagattatcggacagaaaaccagcatgtacccaccaccagttcttcattaactgaccctcatgccggagtgaaggcagccctgttacagctgcttgctcagcatcagccccaggatgaccccaaaagagaaggtgggattgattatcaagcaggagacacttacgtgtccacttcagactacaaggacaactttggatcctcttctttctcttctgctccttatgttagcaatgatggtctaggaagcagttctgctccaccactagaacgacgtagtttcattggaaattcagatattcagtctttggataactacagtactgcttcatctcattctggtggtccacctcagccttctgccttttctgagtcatttcccagttcagtagctggatatggagacatttacctcaatgctggtcccatgttgtttagtggagacaaggaccatagatttgaatatagccatggtcctattgcagtcctggcaaacagcagtgacccttccacggggccagagagtactcatcctttgccagcaaagatgcacaactataactatggtggtaacttacaggaaaatccgagtggccccagcctcatgcatggacagacctggacttctcctgcccaaggacctggatattcacaaggatacaggggacatattagcacatcaactggcagaggcagaggcagagggttaccatactgagtatctgtttttcctcaggcacatcatttttatctggaaagacttttctagctgcaatttaaggcagcaatccaagagacttgaataataataattcaacaacagctttatttttatgtggagaagggtcttgcatacaatagtttaaaaaagacaaaaaaaacctttgcttaaattcatgctgttctaaaaactagatcgattgtacatcttcacaaattctagttaacaattttattttgtattcttgcagttttaagtggatgctaattttaggggcataagccttttatggccctcttgcagatcttctgaactatgcacatttgtgctttttttgtaagtttggaccaacttttatgtaacaaacagcccctccccacctccagttttacaacaatcagaaagggcactgatttatttggtatttttctttttacaaagctacctttagtcaaaggtcactgtcagtctttgcacctgctttcagtgttattgtgaaaggtgtactttgtgctcatttcagaaaataaaacacaacctttctcttgatgcaacagttttataaaaaaaaaaatggtcaacgttatttttgttttgttttgcagattatcaaagcctagcaaaatgcatttaaatgaaatagtgggttttatatgaaaactatgggtggggtggggagggaaagtaagtgccttaacaggtaagcttaaggtctgaaaaaaatagttaacttttacccccatttgtcttttaaagggaatcaatgcattaaaaaggcaagaaactctgaagtttcaggggctgcctgttcagttcctgttaggtccattccctctgcttgtcacactttctccttttctgcctgtctttgggctgtgttgcctttcactaccaccttctcttgataggggagtgagagcaaagaaagggagtagaactgcaatcagtacatattgtttgagaagttctacaaagttttgtcatttaaatggttgaaagtaatagctccaggagaattttagagtaccattttctttcaggctgccatattatccctgtttccatttgccatggataattggagggtcatggtatagaagcaagagttaataacagaacttgcctaaatgtgttaaagttcatgggggaggggtggcaaataccgtattttaagttatgcaattgcccttttaagaaagtcaattctattcacttgttaactagaaacattgcttagattgaatttattgaagcaaaaagaaaaggcaatgagagagaacttttatcttccttcctgtcacattctgtaaagttgattatgacttctgccagacttagagcaacaactttagttcattttaacatttttttttaatgaagagcatcaaagaatggagtagtccttatttaaactgtaatggtgtcaagtctcactgtgtgcacactctcacacatacacacacaattatactaattctagaaaggaaccaaaggtaaataaccagtgtttccattatcactaaatggaaaaattgactggaagttagagttgtgccaattaatcattttgttcatcaactgttctggtaacttatttttttttattggaatcttaaattggaacaactgttacagaatgtatattgctccagttctaaagccagttaaccctgtgccctctaacttatgaaccttcatttcaaaacagtatgtgggaagtcctgtagtttgataagagtaaaattattttaaagaggataatttaccattttactactataaaataagttgatatcagttgaccattttattttttgatggactctttttgttgggagaaagaaatgaatggaagaaaaaaatatgttgcttttatttgaatattgattactaacaacttataaactacattgcaggaaatgaagaaatattttgaaattagcaaaatagcaacagtattcaagtatctgaaattttaatatggtgagtcttagagctttagactttcctataagtgacagtatctaagttattcttaatagtcacacttgataattctgctgaccataagcagctaacctacagttgaagatatttatgtgacatgaatagcctgtgttttaaaaattaaatattttatataaaattgaaaaaaaaaaaa

SEQ ID NO: 1198 - DNA, 1560 bp, HOMO SAPIENS
agaggaaacgtgtgggtggggaggggtagtgggtgagggacccaggttcctgacacagacagactacacccagggaatgaagagcaagcgccatgttgaagccatcattaccattcacatccctcttattcctgcagctgcccctgctgggagtggggctgaacacgacaattctgacgcccaatgggaatgaagacaccacagctgatttcttcctgaccactatgcccactgactccctcagtgtttccactctgcccctcccagaggttcagtgttttgtgttcaatgtcgagtacatgaattgcacttggaacagcagctctgagccccagcctaccaacctcactctgcattattggtacaagaactcggataatgataaagtccagaagtgcagccactatctattctctgaagaaatcacttctggctgtcagttgcaaaaaaaggagatccacctctaccaaacatttgttgttcagctccaggacccacgggaacccaggagacaggccacacagatgctaaaactgcagaatctggtgatcccctgggctccagagaacctaacacttcacaaactgagtgaatcccagctagaactgaactggaacaacagattcttgaaccactgtttggagcacttggtgcagtaccggactgactgggaccacagctggactgaacaatcagtggattatagacataagttctccttgcctagtgtggatgggcagaaacgctacacgtttcgtgttcggagccgctttaacccactctgtggaagtgctcagcattggagtgaatggagccacccaatccactgggggagcaatacttcaaaagagaatcctttcctgtttgcattggaagccgtggttatctctgttggctccatgggattgattatcagccttctctgtgtgtatttctggctggaacggacgatgccccgaattcccaccctgaagaacctagaggatcttgttactgaataccacgggaacttttcggcctggagtggtgtgtctaagggactggctgagagtctgcagccagactacagtgaacgactctgcctcgtcagtgagattcccccaaaaggaggggcccttggggaggggcctggggcctccccatgcaaccagcatagcccctactgggcccccccatgttacaccctaaagcctgaaacctgaaccccaatcctctgacagaagaaccccagggtcctgtagccctaagtggtactaactttccttcattcaacccacctgcgtctcatactcacctcaccccactgtggctgatttggaattttgtgcccccatgtaagcaccccttcatttggcattccccacttgagaattacccttttgccccgaacatgtttttcttctccctcagtctggcccttccttttcgcaggattcttcctccctccctctttccctcccttcctctttccatctaccctccgattgttcctgaaccgatgagaaataaagtttctgttgataatcatcaaaaaaaaaaaaaaaaaaaaaaaaaaaaaaa

SEQ ID NO: 1199 - DNA, 2531 bp, HOMO SAPIENS
gttaaactcgtcatttcctccagctagaggagctcaactgatctgttttctttcgcccagccaaaatcacagaatgaaggcggtgaagagcgaacgggagcgagggagccggcgaagacaccgggacggggacgtggtgctgccggcgggggtggtagtgaagcaggagcgtctcagcccagaagtcgcacctcccgcccaccgccgtccggaccactccggtggtagcccgtctccgccgaccagcgagccggcccgctcgggccaccgcgggaaccgagcccgaggagttagccggtccccacccaaaaagaaaaacaaggcctcagggagaagaagcaagtctcctcgcagtaagagaaaccgaagtcctcaccactcaacagtcaaagtgaagcaggagcgtgaggatcatccccggagaggacgggaggatcggcagcacagggaaccatcagaacaggaacacaggagagctaggaacagtgaccgggacagacaccggggccattcccaccaaaggagaacgtctaacgagaggcctgggagtgggcagggtcagggacgggatcgagacactcagaacctgcaggctcaggaagaagagcgggagttttataatgccaggcgacgggagcatcgccagaggaatgacgttggtggtggcggcagtgagtctcaggagttggttcctcggcctggtggcaacaacaaagaaaaagaggtgcccgctaaagaaaaaccaagctttgaactttctggggcacttcttgaggacaccaacactttccggggtgtagtcattaaatatagtgagcccccagaagcacgtatccccaaaaaacggtggcgtctctacccatttaaaaatgatgaggtgcttccagtcatgtacatacatcgacagagtgcgtacctactgggtcgacaccgccgcattgcagacattccaattgatcacccgtcttgttcaaagcagcatgcggtctttcaatatcggcttgtggaatatacccgtgctgatggcacagttggccgaagagtgaagccctacatcattgaccttggctcaggcaatggaaccttcttaaacaacaaacgtattgagccacagagatactatgaactaaaagaaaaggatgtactcaaatttggattcagtagcagagaatacgtcttgctccatgagtcgtcggacacttctgaaatagacaggaaagatgacgaggatgaggaggaggaggaagaagtgtctgacagctagcaaactaagaacccaaactattgatacacggtttccttcttggaagtctttgattgactcagagagcactatggtggtgggtccagcactatggtgctctctgtaatgcctcttactgccttaagtctttcctctgttgctgaccagattgtgttaccatttgaatacactgactaatgtttgttaaactttttctgtggcaccttggccacatgcctgcaggcatttgttttcagaacagtctcaccaattacaacacaccgtgttttagtagaagtgttgtggttttagttggtgctttcagaactgctgcctaggaaactataaacccttggttaaggggaaatcatggcttgttctctttgtacagttactttatttatataggtgttaagctttgtggaccaggtgtttttcttttggggcgaacccctgagcagagaatcttactaggctttggttatcaccaaaacaacctccagtatataccaaagctttgacttgtttgagctcttgagcttagaagttgattttgcacttatttttttggggggtgggaatgtactgcagtcagtaaacattattgactgtttaacttaaacagatgctttatggcacctgctcaagcccgtgactgtacagaaggatcctggttgctaccagtgggtgctgattcagcatcacaagtgactgaaattggctgtggatctgttctttgtgaaagaattcctgatttctccatggagcatgtacacaacaattttgatcatattaactgtacttcagttttgcatttttattcaaatgttatctctttttttctttgagaaataaactgtcactgatgtgacagcgttctttctttattctaataacatgtatagatctaaagcaggttgtgttgtttacatgtttctacacatttcatcctttaaaaagttgttgagagaggttgtatttaccttcccaaggttggaaagcaggggaatttcccagtgtcctagttttccaccagaggaatatgtgtaagtagcaaagtatttgctgcttacatatagtgtgtatgtatgtatatatgtaaattgtgtgttaaagagctgatactgattttcatatgacaatgttaggcaaaggcctccctgcatttgaagagcaggttttcatttatatgtatttttgggataaaaaaataaaatttgtaaatataaaaaaaaaaaaaaaaaaaaaaaaaaaaaaaaaaaaaaaaaaaaaaaaaaaaaaaaaaaaa

SEQ ID NO: 1200 - DNA, 1352 bp, HOMO SAPIENS
cgtgaagtgggcggagcgagcgatttgaacgcgagcggcgcggacttctgccaagcaccggctcatgtgaggctcgcggcacagcgttctctgggctccccagaagccagcctttcgctcccggacccggcagcccgagcaggagccgtgggaccgggcgccagcaccctctgcggcgtgtcatgggcccgcgccgccggagccgaaagcccgaggccccgaggaggcgcagcccgagcccgaccccgacccccggcccctcccggcggggcccctccttaggcgcttcctcccatcaacacagtcggcggagacaaggttggctaaaggagatccgaaagcttcagaagagcacacacctcttgataaggaagctgcccttcagccgcctggcagcagaagcatttctagttcatctctttgaggacgcctatctcctcaccttacatgcaggccgagttactctcttcccaaaggatgtgcaactggcccggaggatccggggccttgaggagggactcggctgagctcctgcacccagtgtttctgtcagtctttcctgctcagccaggggggatgataccggggactctccagagccatgactagatccaatggattctgcgatgctgtctggactttgctgtctctgaacagtatgtgtgtgttgctttaaatatttttcttttttttgagaaggagaagactgcatgactttcctctgtaacagaggtaatatatgagacaatcaacaccgttccaaaggcctgaaaataattttcagataaagagactccaaggttgactttagtttgtgagttactcatgtgactatttgaggattttgaaaacatcagatttgctgtggtatgggagaaaaggctatgtacttattattttagctctttctgtaatatttacattttttaccatatgtacatttgtacttttattttacacataagggaaaaaataagaccactttgagcagttgcctggaaggctgggcatttccatcatatagacctctgcccttcagagtagcctcaccattagtggcagcatcatgtaactgagtggactgtgcttgtcaacggatgtgtagcttttcagaaacttaattggggatgaatagaaaacctgtaagctttgatgttctggttacttctagtaaattcctgtcaaaatcaattcagaaattctaacttggagaatttaacattttactcttgtaaatcatagaagatgtatcataacagttcagaattttaaagtacattttcgatgcttttatgggtatttttgtagtttctttgtagagagataataaaaatcaaaatatttaatgaaaa

SEQ ID NO: 1201 - DNA, 3589 bp, HOMO SAPIENS
tctcgccggacgctaaagaccgacgcacaaattaagaatggaccattcttttaactcagtcatttatccaaactcgagacattcgccaggaaatctatcgaaaatttcccagaaccattttttcacttatattctataatactggtaaaatcgagacgtaaaaggagaacttgagaacaagtcattctgctttcccctctcaagtttgagcctgaactacttgggctcgcttatcgtcacttccggggatcgaactgtgaatcccggaaactgcacgcgccgagccgggaagcttcgtccagcggtcgtgttgccatgggccggaggagagccccggccggtgggtcgctgggacgggcccttatgcgccatcagactcagcggagccgaagccatcgtcacactgactcctggttgcacacaagtgaactcaatgatggctatgattggggtcgtcttaatcttcagtcagtgactgaacagagctcccttgatgacttccttgctactgcagaacttgcaggaacagagtttgtagctgagaaacttaatattaagtttgtgcctgctgaggctagaactggactactgtctttcgaggagagccagagaattaagaagctccatgaagaaaacaaacagttcttgtgtataccgaggagaccaaactggaaccaaaatactaccccagaagaactcaaacaagcagagaaagataactttctagaatggagacgtcagcttgtccggctagaagaggaacagaagctgatattgactccatttgaacgaaatttggacttttggcgccagctctggagagtcattgagagaagtgatattgtggtccagatagtagatgctcgaaacccactcctgtttagatgtgaggatttggaatgttatgtgaaagaaatggatgccaataaggagaacgtcattctgatcaacaaggcagacttgctgactgctgagcagcggagtgcctgggccatgtacttcgaaaaagaagatgtgaaggttattttctggtcagctttggccggagccattcccctgaatggtgactctgaggaagaggcaaacagagatgatagacaaagcaacacaaccaagtttggacattccagtttcgaccaggctgaaatttcccacagtgaatccgaacatctcccagctagggattctccttcacttagtgaaaatcccacaacggatgaagatgacagtgagtatgaggactgtccagaggaggaggaagacgactggcagacgtgctcagaagaagacggtcccaaggaagaggactgcagccaggactggaaggaaagctctactgcagattctgaggctcggagcaggaaaaccccacagaagaggcagatacacaattttagccatctggtatccaagcaggagttactggagctctttaaggagctacacactgggagaaaggtgaaagatgggcaacttacggtcggactggtgggctaccctaatgttggtaagagttcaacaatcaacaccatcatgggcaacaagaaagtatctgtgtctgccacacctggtcacacaaagcactttcagactctctatgtggagcctggcctctgcctgtgtgactgtcctggcttggtgatgccatcttttgtgtctaccaaggcagaaatgacttgcagcggaatcctcccaattgatcagatgagagatcatgttcctcctgtatcactagtttgccagaatattccaagacatgttttagaagctacctatggcattaacatcataacgcctagagaggatgaagatccccaccgacctccaacatcggaagaactgttgacagcttatggatacatgcgaggattcatgacagcgcatggacagccagaccagcctcgatctgcgcgctacatcctgaaggactatgtcagtggtaagctgctgtactgccatcctcctcctggaagagatcctgtaacttttcagcatcaacaccagcgactcctagagaacaaaatgaacagtgatgaaataaaaatgcagctaggcagaaataaaaaagcaaagcagattgaaaatatcgttgacaaaacttttttccatcaagagaatgtgagggctttgaccaaaggagtccaggctgtgatgggttacaagcccgggagtggtgtagtgactgcatccactgcgagctctgagaacggggcggggaagccctggaaaaaacatggcaacagaaataaaaaagaaaaaagtcgtagactctacaagcacctggatatgtgaggttgggctgcaacagaaatgtcatctgcattgtgcagatggaaaagagcagaagctgcctgttgcctgtggaaccgtcccaagacactagcactgtagaacgggccctgctcttgcagagcacggctgcacccaacagtctccatgtcaagaccaagggcctcctggaaacaccaactctgacaaaaaggagtcatctgggagcccgagaatcctactcctggccgggcacagtggctcacgcaccaacatggagaaaccccgtctctactaaaaatacaaaaaaattagccaggcgtggtggcgcgcacctgtaatcccagctactcgggaggctgaggcaggagaatcacttgaaccagggaggcagagtttgcagtgaatggagattgcgccgctgcactccagcctgggcgacagagtgagactgcatcacaagaaaaaaaatttgcaagggatggttcacgagacacatttgggacgaaggtgaaagagaaattccccattctgagtgtcctagttgggttcctccgactctaaacaagggacttgggttcagttagtgtacagcgggggctcacgtccactaaggaacatgtagaatgtaaccaccgggtgacagggaagctgcggtatttactacctagcccccatcttcactggttattccacttatttaaaatgtccagaataagcaaatctccatatagaggaagtagattagtggttgcttcgggatgggaggaatgggaagattgaggtctttcttttgcagtgataaaaatgtcctaaaattgactgtagcgatggtcacacaactctgaatatgcttaagaccattgaattacacactttacgttggtgaattgtatggtatgtaaattatagttcaataacatagttacaaaagataatcaaaagcatgaaagcactgttgatgtggtttggatctgtgtcctcaccgagtctcatgttgaaatgtaagccccctggtgggaggcgatgggattatggggcagagtcctcacgaacggtttagcaccacccgctcagtgctgttctcctgatattgagtcctcatcacatctggttgcttcaaagtgtgtggtgcctcccctctgtctccctcctgctctggccatataagatgtgcctgcttctccttcgccttctaacatgattgtaagtttcctgaggcctccctagaagcaaaagctgctgtgcttcctgtaccatctacaggaccgtgagccaattaaacctcttttctttataaattaaaaaaaaaaaaaaaaaa

SEQ ID NO: 1202 - DNA, 5454 bp, HOMO SAPIENS; identical to SEQ ID NO: 723

SEQ ID NO: 1203 - DNA, 3000 bp, HOMO SAPIENS
gctgtttccggaagtcgcggccggcgtcaccgctgcggctgcctcagctactgccgcagtcgccgcggaattcgattttaagagtaatcttcacaaagtgtaccaggccatagaggaggccgacttcttcgccatcgatggggagttttcaggaatcagtgatggaccttcagtctctgcattaacaaatggttttgacactccagaagagaggtatcagaagcttaaaaagcattccatggactttttgctatttcagtttggcctttgcacttttaagtatgactacacagattcaaagtatataacgaagtcatttaacttctatgttttcccgaaacccttcaatagatcctcaccagatgtcaaatttgtttgtcagagctccagcattgactttctagcaagccagggatttgattttaataaagtttttcgaaatggaattccatatttaaatcaggaagaagaaagacagttaagagagcagtatgatgaaaaacgttcacaggcgaatggtgcaggagctctgtcctatgtatctcctaacacttcaaaatgtcctgtcacgattcctgaggatcaaaagaagtttattgaccaagtggtagagaaaatagaggatttattacaaagtgaagaaaacaagaacttggatttagagccatgtaccgggttccaaagaaaactaatttatcagactttgagctggaagtatccgaaaggcattcatgttgagactttagaaactgaaaagaaggagcgatatatagttatcagcaaagtagatgaagaagaacgcaaaagaagagagcagcagaaacatgccaaagaacaggaggagctgaatgatgctgtgggattttctagagtcattcacgccattgctaattcgggaaaacttgttattggacacaatatgctcttggacgtcatgcacacagttcatcagttctactgccctctgcctgcggacttaagtgagtttaaagagatgacaacatgtgttttccccagactcttggatactaaattgatggccagcacacaaccttttaaggatatcattaacaacacatcccttgcggaattggaaaagcggttaaaagagacacctttcaaccctcctaaagttgaaagtgccgaaggttttccaagttatgacacagcctctgaacaactccacgaggcaggctacgatgcctacatcacagggctgtgcttcatctccatggccaattacctaggttcttttctcagccctccaaaaattcatgtgtctgccagatcaaaactcattgaacctttttttaacaagttatttcttatgagggtcatggatatcccctatctaaacttggaaggaccagacttgcagcctaaacgtgatcatgttctccatgtgacattccccaaagaatggaaaaccagcgacctttaccagcttttcagtgcctttggtaacattcagatatcctggattgatgacacatcagcatttgtttcccttagccagcccgagcaagtaaagattgctgtcaataccagcaaatatgcagaaagctatcggatccaaacctatgctgaatatatggggagaaaacaggaagagaagcagatcaaaagaaagtggactgaagatagctggaaggaggctgacagcaaacggttaaacccccagtgcataccctacaccctgcagaatcactattaccgcaacaatagttttacagctcccagcacagtaggaaagagaaatttgagtcctagtcaagaggaagctggcctggaggacggagtgtcaggggagatttccgacactgagcttgagcagaccgattcctgtgcagagcccctctcagagggaaggaaaaaggccaagaaattaaaaagaatgaagaaggagctttctccagcaggaagcatctcgaagaacagccctgccacactctttgaagttcctgacacatggtaaccaagacctgagggcagcaaaccgctggtgctgtcgctgtgagcaagagccggctggcacatttggaagccgcactgtatttaacttaatcaaatgtggtatgggaggggttggaaaccaagttgtctcctgggggggagaaaacaggttttatttttgtggctgtggttttttcccctttttaatctaactgcctgttgacattgacactcatcacggttgtaggctgtcatgaatgtgtacgtgcttaaccagtgaattccgtgttgctcttgtgaggcctttcctgtcatgacccagtgtgcttaagaacctgcctgatggggagtgtcggctgtgaaatctgcaaaaagagctgacattccagctgctgtgatcatgaatttgggggtgtactgtcctgcctgtgcatcttctcgcactgagattttgaggcagttgcagccctcggttagtctcccagtggaaaaatcggttgtgcctccctgcttcccaccatagctgcctgaaaacatgacgctctcaagcttgtccttccttcaggaagatgtccactcatgcccacccatgagagggcttgccgtatgccctggcctttgggcatatttatgtagagttcctttctcctaagacgtgagtttctcatgggggatgtacgagtaaaaaggttaacttctgttcttatgcgtggcgctgtgttcactttccagagtctctgttcgtttgtttggatggcggtctcggggtacggcagcgtgtgtgcgtacgtgtctgtgtgtgtgtgtgtgtgtgtgtgtgtgtgtgtgtgtgtgtgtgtgtgaaatcgtgcaaatctacaacatgtcccagcccattctccgttgaaacagatcacagcaacgacaaacgctcatggcgctgctttgctccacccgcttcagatagatcattgttagatatttcacatttttgtatggtggaaataaaaatgaaaaatgtatttccaaaagatgaaaattaaaaacattttcataggaaaaaaaaaa

SEQ ID NO: 1204 - DNA, 5420 bp, HOMO SAPIENS
ggcggggagcgcgggctgcggagaggcgggccgggccaagcggagccgagcgagcgggagcgcggcgtccgggaggcggcggagacgcggggctcggagggtcagcctcttatcgtagcaggtctcctcggcacgccccccttgtttcgccccacggccaagcccgccgcgggccggcgtgcgctggtcactgaggcccaggtcgccgccgcggcgcgtttttgaaatcatgaatcctgtttatagtcctggatcttctggggttccctatgcaaatgccaaaggaattggttatccagctggttttcccatgggctatgcagcagcagctcctgcctattctcctaacatgtatcctggagcgaatcctaccttccaaacaggttacactcctggcacaccttacaaagtgtcctgttcccccaccagcggggctgtgccaccgtactcctcctccccgaacccctaccagactgccgtgtaccctgtgcgaagtgcctacccccagcagagcccgtatgcacagcaaggcacgtactacacacagccgctgtatgcagcacctcctcacgtcatccaccacaccacggtggtgcagcccaacggcatgcctgcaacggtgtaccctgctcccatcccccctcctagaggcaacggggtcaccatgggcatggtggctgggaccaccatggccatgtcagcaggtaccctgctgactgctcactccccaactcctgtcgccccccacccggtcactgtgcccacgtaccgggccccaggaacgcccacttacagctatgtgccccctcagtggtgatcacctgcaaatgtttgaggacggagctgtgcagtcacattattggggattccacagctggtgctgcaggccttgcgcctccaaccaggactttcttcttaatgctctcgacacttagctaaacacgactatatcccggcccagcaggccccagcgccgttagtctccagctgactctgtgggttggtcttaaagcaaattctgttttgtggactgcctggcaattttttagctaactgtaatgataaaaagggagtattaatctattctgaatcatatctagttgaatgcatgtttaaaaaaacaaacacaaaaagcttgctcaatctacctgcagtgactgatgcaaaaccatcatatgcaaaatccaaaggaatggaaacgtattttacaacttgtatcactaatgcactgttgtaatgtatgcaaagtcttacagttataagtgttaaagtgaatttcttcatagagcatctgaaatatcttagatgattcttcaaccttttggggttgatgtgggttgccagttagggatgtggacattttagttttcagcgacctgtttctttggcactgactgtcctgggagggagttgcgaggtttgggagagagtagggaagccacagctgcttgggtgcagctggttcatggacatccctttgagtttaggcttggtggagtcagtggaacagggacatgcttaaagctcatcatgaaagattatggtagtgtggccagtgaaatttggggcgaggggggtggtttatgtgtcagcaaagcagtttctctgctatctaaattttcattacagttctcttagagagatgatgtttttatatgtctttattggaaaagtcctatgtaaaactaaattattttcctgggatggaagaaatgtgaaagagaaacagccatgcttgcaggaggtattgtcctctgctttatttagcttagaaaatcattcctttttttttttttttcctggagaaatgtttgaatcagctgaaaacaggtaggcattgctgtttttccccaacaaagaagggcaaaggtttcagctgtatgttatgaagaaagtggtatatttaagaatgagttaaaagggaacaaaactttatttaaaattcctccaatttcttgtagaaaggcagggccgtggatatgtctggaaatgtagaaacctgtagctgcttctgggatcacccacctgatggtggtgacttgtctgctgaggccggctggaggggacgcttagagatggggcgagggggaggccagtgtctgttgtctgcgagcctctcctgccatctcttttgcagctgagggcacttggcacaaagcaagcacagacagcagagagggccaggcagtgctggagtgcgtttgctggcagggtttattgtgggagaggaatttgagtttaggatctgaatcttgtacataagaaatgaaaaggcttccctccaccccgcccccaaaatatgcccgtcctgtatccatgagagtgcatgtcggttctcagtgagggtcagagtgggggtgggggatgtaaggcctgggtccctttcagcggcctctagggcaggagcgtgcgtcttcttcccagtgcagtggtggtttgagtgctgtgggctctggtggggagggggctctgctcctcttcatttgctggtagctgggtcagggcactggcgcccagtgaggatgcccactagcattctgccccagttggttggtggggggacacctgaccactgagcctttggtaaccttattttttatagtaagtacttcttataattttctttttcacatcttattttataagaagtttaggaatatttttgcatggatcattgtaaacagcagattctttattcctgatgtctattaacatagaatgtttactgataagtactttaaattgcttcatgagcacttaatccatcttagtgtctatgtgtgggggcagacatttaccgcaggcacacagtttgtgcccctttcttcaagtctctgttggtaattccatctgtttagtggatggttggcaggattagtaggttctaacggttccaggggttcagctgaccaagtagcagagaagtcttttttcccaattgagtgctaatagattaggataaaatactcacaatgttagtgtatgcttttaaaaagccccacacaacaaaatggaaacatacatgtacaactcctgtgagggctggagtcttggggttcaggaggaggttagaagttacaggcatctcttcaggcttgcttggtacttggcacacacaggatggtgttttaaagagtgggctgcaccccccacacgccatttacatcagcttcataaacacttttcttcctccctgtaacttaaccttttttcccttttatgaagttgagaggctttatgaaataagtttgcattgcacatccgtgcagaaatctttctgactttgaaatttttaggacgtcagctgtcagatacgaaaggtagatatcaggtaagaatctggacttaggaaatagtcacaaaactgtcataggttgtaattttatcaacattcgcttctagtaaaattaaagtcaattaagaaatagaacttgggtcaaaattctgttacaaagcttcataatttgtcccgaagcatatggtggagcattctgagaaatttgctttttgtgtgtttgacattcctaatttgggagtccttcagctgaattactattcttttagaagttgagacagcaggtaagcaaaggacctagttcatgtaaacatggacatcatgatggctatttaaaaaatatttgttctacaccttctcccctgaggcttggggagtgtgttcagccgctgcagtttctctgctcatggaggtcttgtttggatctgtgctggcggctgagcatttagtgtgagccagtgacccatgaacttgccgctctgtgagggccagagtcagggccagtcatggtaatgggcctgaaggcacttccagaaccttttatgtctctcgtgagccatctgttaagaacgttcttcttggtgtggtttgtaggcctacctgtcgctattctgggaaaccttcttgagtgctatgcaaatgtgttcacaggcaatgggggtggtcctgagccttggggtgggcacctggtcagtgagtgtcttgcccttccccagctgggcatacagtaccttgctctttctggtggcatcatctggctgtgatgaatgaggtctaggaaataatttgcatgtgtcttgggggacacaacagtaacgagaggaaatacattattacagcaacttgcgacgtactaatacctgtcagtgttggcccccgtaaggtatgtaaggcacctgtgagtgccagtgagtgctggtgaaaggccaacatgtactagttatgtaagtattggtgtctgctttaaaaaaggagacccagacttcacctgtcctttttaaacatttgagaacagtgttactctgagcagttgggccaccttcaccttatccgacagctgactgttggatgtgtccattgtcgccagtttggctgttgcccggacaggacaggacctccattgggcgcagcagcaggtggcaggggtgtggcttgaggtgggtggcagcgtctggtcctcctctctggtgctttctgagagggtctctaaagcagagtgtggttggcctgggggaaggcagagcacgtatttctcccctctagtacctctgcatttgtgagtgttccctctggctttctgaagggcagcagactcttgagtatactgcagaggacatgctttatcagtaggtcctgagggctccaggggctcaactgaccaagtaacacagaagttggggtatgtggcctatttgggtcggaaactgcatgtttcagaaagtttgtctctttttcctactcattatttgaagaagagagagcctgtggggatagccttatcttggtccacaggactgaagtgaagtcacttgggaaggggagacagaggatgagcggcgtctgtgtagggacccccccccgggcctgcagaagggtggtgtgctcccaggactggcatgacaggtgtctcctcctcaccacaggctgtgcccatgagtccctgtgcagaccagtgggcaaggcagctgggccagatctcaggccagccgtttgtgctcctagcagggttgctgtgctggccacacggagaggccctagagagcctcatggattgtaactaaagaagaaacggttcctttttgtttttttaaaaatgatttttaaataccgttttttacaccgttctctcggtactttttttaagctaagtcagcattgtcttccagtgttaaaggcatccctcacctctgcattgaacttacgtatccatgccaaggaatggaatttccatcctgagccagttcagttaggtgtcaattgatactattttaattttttatgcaatctgatgagatgagctcagatttaaaaatctcaaaagcacgtttattgtaacaagaattgttatgtattaatactgcagttttcaataaagattgacttgtgttgcaaaaaaaaaaaaaaa

SEQ ID NO: 1205 - DNA, 3387 bp, HOMO SAPIENS
gaagaactggaactggtctggccatagggggaagcggcgcgttaaatccgccccctctccataccctactttcaaggggtgggcggtagaggggaggttggggttggagcagcggcgagggggcccctcccttgcacctccccccaccggacttggtcgcgcccgaagtgtaacactttctctttgtcggaggagctcctctgtttcctgtgcagtagctcccgttgcggcggcacccgtggcagccctggcggacgcaggagcgatggcagcgaccgatatagctcgccaggtgggtgaaggttgccgaactgtccccctggctggacatgtggggtttgacagcttgcctgaccagctggtgaataagtccgtcagccagggcttctgcttcaacatcctgtgcgtgggagagacaggtttgggcaagtccaccctcatggacaccctgttcaacaccaaattcgaaggggagccagccacccacacacagccgggtgtccagctccagtctaatacctatgacctccaagagagcaacgtgaggctaaagctcacgatcgttagcacagttggctttggggaccagatcaacaaagaggacagctacaagcctatcgtggaattcatcgatgcacaattcgaggcctacctgcaggaagagctaaagatccgaagagtgctacacacctaccatgactcccgaatccatgtctgcttgtatttcattgcccccacgggtcattccctgaagtctctggacctagtgactatgaagaagctggacagtaaggtgaacatcatccccatcattgccaaagcagatgccatttcgaagagtgagctaacaaagttcaaaatcaaaatcaccagcgagcttgtcagcaacggagtccagatctatcagtttcctacagatgatgagtcggtggcagagatcaatggaaccatgaacgcccacctgccgtttgctgtcattggcagcacagaagaactgaagataggcaacaagatgatgagggcgcggcagtatccttggggcactgtgcaggttgaaaacgaggcccactgcgactttgtgaagctgcgggagatgctgattcgggtcaacatggaggatctgcgggagcagacccacacccggcactatgagctgtatcgccgctgtaagctggaggagatgggcttcaaggacaccgaccctgacagcaaacccttcagtttacaggagacatatgaggccaaaaggaacgagttcctaggggaactccagaaaaaagaagaggagatgagacagatgttcgtccagcgagtcaaagagaaagaagcggagctcaaagaggcagagaaagagctgcacgagaagtttgaccgtctgaagaaactgcaccaggacgagaagaagaaactggaggataagaagaaatccctggatgatgaagtgaatgctttcaagcaaagaaagacggcggctgagctgctccagtcccagggctcccaggctggaggctcacagactctgaagagagacaaagagaagaaaaataatccatggctgtgtactgaatagtattccccgctacagctggactggactccatttagccttttaagccgaggttcctattttaactgacagctttcctttggggtgccaggcagcgaggccccccacccctatcctgccatgtacttcaagctcacttcttctttttgagttccgcaacttgctcctgcctcccagccccactggcactgaccatgaccacctacttctattttttttttagagtttctttttttgatcacttactttcaaagcacacagtcaaacaaggttatgccaaatttccaggcctttttgaagtattgagaaggggaaggggatttctcacttcaattatagatcataataggaagcaaaaagaaaaaaatgaaaagcaaacatatgcacgcacttttcttgttgacaaagcaagaatataggtttgctgtgtaggtttggtgctctattgattggtgagtgaccagagcaagtatgaaggtgatgctgccaaagcacaagccagtttcttgggaaaattcaagttacagtggagtatttttttgaagaccatatgcttggaggtagaaacaaaccaacgaccaaaaaaaaaaaaaaaaaaatctgctcagatactcagccagtagctcagagagatgctgagttaggcctgtcaggtctccttgggaaaggcttcatatttgcaactttgatgattctatgtccagcttcagagctgctttcccagaaattcacgcttaaacaaccaaccggtaaccaccacttccccacaccgccgcccggtaattatttgcattacaaaccggaggcgccctcatttgcatttgtgtacagattaactagttaaggcttgagaagctctgaataattcaaaagtattagacccacacagccttggagagaccttcagaaactaaggaggagttttatattaagggagacattttagtcagtaagacgatataacctacttactccgtaaggggaaatgaaggcccagagaagggaagggacttgaccgaggtcccacttctgtttcgaggcagaagccagactaattttcatgcctcctgactcccaatcagtttcacaaagggattcaatctgtttatatacgttacattcctggatacgaggtcttttgatgttcagagtaactgactagttagtattagaagaccctcgaggtttttttccacagaaaaacatctgaagatggattgggtgagggctggcaaaacgaaggcatgccgggccagctccttaacccaatgacccagtgatgctgcaaggctggaacggggtccaggagactgtgtgtaacaggtgccctaggtgacccttataatcagggaagtttggtgaacaaaaatcgaacccatgagtgaacataaattaaaaagttgatcaacctattaaaatgtgtatttcattgggtagcttttctcactgtagacagattttttccttcttcaatgaaaaggcttttaaattagtacaactgttactatttaaaaaaaaaataccctaagtactctgtttacttctggtgaaacaaaaccagtcattagaaatggtctgtgcttttattttcccagactggagtggcttttctgaaacacacacacacacacacacacacacacacacacacacacacacacacacgtacacacatccctcacttctcttaagccaagaagtttgctttccctagctgcagtgtagatggctcttgtttttgtttttttgttttaatcatttggcattcacatgtggctgttaatatgtgcttgtttttaattaaaacaagaagctttaaa

SEQ ID NO: 1206 - DNA, 2483 bp, HOMO SAPIENS
gaattctgggaagtggagtccaaacattcggtggagtcgcggacacttccgctcggggactgaggttgctgcagtttttccgcgatagtttggggcagttccgcgcgttgcaggcccttctgaatttcctggacctacgcattggatcctcaaagaactgctgaataccactagaaacatacctgtaaccagagacagctgattatagctttctgcagcaaggaagcccacgtaccaggggctgtcttggcacaattctgctttcccaggaactgcatcactcaggactctgcaagtttccagaagtaagagggaaaatgaccacgttcaaggaggcaatgaccttcaaggacgtggctgtggtcttcactgaggaagagctggggctgctggaccttgctcagaggaagctgtatcgagatgtgatgctggagaacttcaggaacctgctctcagtgggacatcaagcattccacagggatactttccacttcctaagggaagaaaagatttggatgatgaagacagcaatccaaagggaagggaattcaggagacaagatccaaactgagatggagactgtttcagaagcaggaacacatcaagagtggtccttccagcaaatctgggaaaaaattgcaagtgatttaaccaggtctcaagacttgatgataaatagctctcagttctccaaagaaggtgatttcccctgccagactgaggcaggactatctgtaattcacacaagacagaaatcttcccagggcaatggatataaaccatccttcagtgatgtctcccactttgattttcatcaacaattacactcaggagagaaatctcatacgtgtgatgagtgtggaaagaacttttgttacatctcagcccttcgtattcatcagagagtccacatgggagagaaatgctataagtgtgacgtgtgtggtaaggaattcagtcagagttcacatctgcaaactcatcagagagtccacactggagagaaaccgttcaaatgtgtggaatgtgggaaaggcttcagtcgtagatcagcacttaatgttcatcataaattacacacaggagagaaaccttataattgtgaggaatgcgggaaggccttcattcacgattcccagcttcaagaacatcagagaatccatacgggggagaagccattcaaatgtgatatatgtggtaagagcttctgtggtagatcaagacttaataggcattccatggttcacacggcagagaaaccattccgatgtgatacgtgtgataagagctttcgtcagagatcagcacttaatagtcatcgcatgatccacacaggagagaaaccatacaaatgtgaggagtgtggaaaaggctttatttgtaggcgagatctttatacgcatcatatggtccacacgggagaaaagccatataattgtaaagagtgtgggaagagcttcagatgggcctcgtgtcttttgaaacatcagcgagtccacagtggagaaaaaccattcaaatgtgaagaatgtgggaaaggattttacacaaattcacaatgctattcccaccagagatcccatagtggagaaaaaccatacaaatgtgtggagtgtgggaagggctacaaaaggaggttggatcttgactttcaccagcgcgtccatacaggagagaaactgtataattgtaaggaatgtgggaagagctttagtcgggccccatgtcttttgaaacatgagagactccacagtggagaaaaaccattccaatgtgaagagtgtgggaagagatttactcaaaattcacatcttcattcccatcagagagttcacactggagaaaagccatacaaatgtgagaagtgtggaaagggctacaatagtaagtttaatcttgatatgcaccagaaggtccacacaggagagagaccatacaattgtaaggaatgtgggaagagttttggctgggcctcgtgtcttttgaaacatcagagactgcacagtggagaaaaaccattcaaatgtgaagagtgtgggaaaagatttactcagaattcacagcttcattctcatcaaagagtgcacactggagaaaagccatacaaatgtgatgagtgtgggaagggcttcagctggtcctcaactcgtctgacccatcagagacgccacagcagagaaacacctctcaaatgtgagcagcatgggaagaacattgtacagaattcattctctaaagtgcaagaaaaagttcacagtgtagaaaagccatacaaatgtgaggactgtgggaagggctacaacaggcgcttgaatcttgatatgcatcagagggtccacatgggagagaaaacatggaagtgtagggagtgtgatatgtgctttagtcaggcctcaagccttcgacttcatcagaatgttcatgttggagaaaaaccttagtgatgtgatggtgcaataaagtcttcactcagtcttcatgaa

SEQ ID NO: 1207 - DNA, 4635 bp, HOMO SAPIENS
attctttggaatactactgctagaagtctgacttaagacccagcttatgggccacatggcacccagctgcttctgcagagaaggcaggccactgatgggtacagcaaagtgtggtgctgctggccaagccaaagacccgtgtaggatgactgggcctctgccccttgtgggtgttgccactgtgcttgagtgcctggtgaagaatgtgatgggatcactagcatgtctgcggagagcggccctgggacgagattgagaaatctgccagtaatgggggatggactagaaacttcccaaatgtctacaacacaggcccaggcccaaccccagccagccaacgcagccagcaccaaccccccgcccccagagacctccaaccctaacaagcccaagaggcagaccaaccaactgcaatacctgctcagagtggtgctcaagacactatggaaacaccagtttgcatggcctttccagcagcctgtggatgccgtcaagctgaacctccctgattactataagatcattaaaacgcctatggatatgggaacaataaagaagcgcttggaaaacaactattactggaatgctcaggaatgtatccaggacttcaacactatgtttacaaattgttacatctacaacaagcctggagatgacatagtcttaatggcagaagctctggaaaagctcttcttgcaaaaaataaatgagctacccacagaagaaaccgagatcatgatagtccaggcaaaaggaagaggacgtgggaggaaagaaacagggacagcaaaacctggcgtttccacggtaccaaacacaactcaagcatcgactcctccgcagacccagacccctcagccgaatcctcctcctgtgcaggccacgcctcaccccttccctgccgtcaccccggacctcatcgtccagacccctgtcatgacagtggtgcctccccagccactgcagacgcccccgccagtgcccccccagccacaacccccacccgctccagctccccagcccgtacagagccacccacccatcatcgcggccaccccacagcctgtgaagacaaagaagggagtgaagaggaaagcagacaccaccacccccaccaccattgaccccattcacgagccaccctcgctgcccccggagcccaagaccaccaagctgggccagcggcgggagagcagccggcctgtgaaacctccaaagaaggacgtgcccgactctcagcagcacccagcaccagagaagagcagcaaggtctcggagcagctcaagtgctgcagcggcatcctcaaggagatgtttgccaagaagcacgccgcctacgcctggcccttctacaagcctgtggacgtggaggcactgggcctacacgactactgtgacatcatcaagcaccccatggacatgagcacaatcaagtctaaactggaggcccgtgagtaccgtgatgctcaggagtttggtgctgacgtccgattgatgttctccaactgctataagtacaaccctcctgaccatgaggtggtggccatggcccgcaagctccaggatgtgttcgaaatgcgctttgccaagatgccggacgagcctgaggagccagtggtggccgtgtcctccccggcagtgccccctcccaccaaggttgtggccccgccctcatccagcgacagcagcagcgatagctcctcggacagtgacagttcgactgatgactctgaggaggagcgagcccagcggctggctgagctccaggagcagctcaaagccgtgcacgagcagcttgcagccctctctcagccccagcagaacaaaccaaagaaaaaggagaaagacaagaaggaaaagaaaaaagaaaagcacaaaaggaaagaggaagtggaagagaataaaaaaagcaaagccaaggaacctcctcctaaaaagacgaagaaaaataatagcagcaacagcaatgtgagcaagaaggagccagcgcccatgaagagcaagccccctcccacgtatgagtcggaggaagaggacaagtgcaagcctatgtcctatgaggagaagcggcagctcagcttggacatcaacaagctccccggcgagaagctgggccgcgtggtgcacatcatccagtcacgggagccctccctgaagaattccaaccccgacgagattgaaatcgactttgagaccctgaagccgtccacactgcgtgagctggagcgctatgtcacctcctgtttgcggaagaaaaggaaacctcaagctgagaaagttgatgtgattgccggctcctccaagatgaagggcttctcgtcctcagagtcggagagctccagtgagtccagctcctctgacagcgaagactccgaaacaggtcctgcctaatcattggacacggactcttaataaaacggtcttcagttccagattccttcccagcaagctatagcttaagtccattttcttccgtgaaagggacaggactccatcaagttatggaattcctcagagccctgggcctgtcccccggggtggattagtcatgtccagcagcacacgcctagtcccgccttcgggaaggctgcctgcctggccagccgcccaggcctctctgtgtaaagactgcctggctgtcctgcccagccttcctggttctctggggtcctctgggtgggtggcatctcctggagggtgatgacaatccccaacacatgcattcatgtggtgctactctgtgtgcaaagccagaccccaagtatgttttctctctttgtcccatccctctttttctgggactttggaccctaactacttccctcctgaaccttgcagtgacatcagtccaggagagctctcgttcagtgtgcggaagaacactctgacctctagagctgtcctagataaggagtgggagctttagaggcaaggcctctagaccctggaaggctcagtgaggctcttcccacagcatgcttctcactggtgccctgtaaggctcgagccaccgctgactctgagccttttggagtctttcctccttcgtctccattgttcccgtgcatttccaaaagcttaagttgcctggtgggcatttccccagtttctttggcctccgtcttctcaagtcacatagggaaagtacctcctggaaccaggctgcagtatgcaggacctgccaggcaggcactggtgaagggccttgggcctatcatccccccaaccccacctcaccccacccgcctcctctagtggggtgagtctgggctggtggaccagagagggtgtcacagaccctcagggactgccccatggacacctctgactggtgttaacagtgtgaacattttccccgtcttcagtcccttagaatgacgacagcccctggggttggggcaggcgagtgtggccacatcatccaagccctcccagagacacaaataggcttttttgctctaaaaataaataccagcccttttttggtcacaaatccagcatctcagcagaaaactgcctgacatgaaaagtcccctgaggaactgcatctgcgtttcaggggcttttcattttttctccttttttaaagtgtagattgtgggtgcttcctagaggcctgccttcttctggaactggaagtgggctatcaccatgggcaagcccttgggtgcaggctccccacctgcctgggaactctggcagctctcctcagctccttgggcttgagcagctgcaactgccccagatttgctgtggaagcaggggctagccctggcctcaccagggcctcccggggccctgcattgatgctcaggagttcctgggctgctcttgatcctttctgggcatccagcttccagttaagctctgtttgccaaacaaactattctcagctgccctttggcctgcgcctgatgtgttcctgttgcagtcccgcctgcctgagacaggagcaggcaggagagccttcatgcccagattcccacaggacaattggggagctgctggcattgtctttctgggaagattctgctttcttggaccaaatggcagcctgattaccagtgtcgggcctgcatgctgcccccgacacacgcacgcacgcgcacacacgtgtgcacatgggccatagccacaagccagctctcctccagggtcctttcaacctcgctgtccagggaccctgtccttcttgcccgtggggcttccatctggcagagaacgttcagggcttgttgaacttgaaagctcattagacttaagctgtcacctgtgcttggtgccccaggaacagccagagaggacagtgcccactcacttcttgttggcagcctcctgtgcaggaagtgccagccgggcctcgacgcaccagctggctgtgggtcctgaggaggggcgggaggcggccgctcagtgcagatggggactcctctcctctgccctgaccttaccctccattacctccttcactggagtggggctggggggtgggtggaatcagtgttttaatcggatttttaaaaaacattttatttctttgtacaattaccatcctatgtaaagatgaaatttgtgttgagttgaagattgtcatggaataaagatcacaccgtacttgaggccatcttcatgtaa

SEQ ID NO: 1208 - DNA, 6202 bp, HOMO SAPIENS; identical to SEQ ID NO: 418

SEQ ID NO: 1209 - DNA, 1329 bp, HOMO SAPIENS
tggctgctgggtgccgcacgccttcccatcctcctcctctcccctcccccatccctccccgccccctcggccgctccgctccctggcgtgactcggcactgagagtcccgggagaagactcggcggtcgccacctcttctgtccaggcctcggccttcctgagcatctctccttcctctcccagatcgtcttctccttcagtttcaaagccagtggcgtcgcggccaccctgccgggctctctgtgaggatggtgggggtgaagcccgtcgggagcgacccggatttccagccagagctgagcggcgcgggctccagactcgccgtggtcaagttcaccatgagagggtgtgggccatgtttgaggattgccccagcattcagttctatgagtaataaatatccacaggctgttttcttggaagtcgatgtacatcagtgtcagggaacagctgccaccaacaatatatcagcaacacctacatttttgttttttcgaaacaaagtgagaattgatcaatatcaaggagcagatgctgtgggattagaagaaaaaatcaagcagcacttagaaaatgaccctggaagcaatgaggacacagatattccaaaaggctatatggatttaatgccttttattaacaaagctggttgtgaatgtcttaatgaaagtgatgagcatggatttgacaactgtttacgaaaagacacaaccttcttggaatctgactgtgatgaacagctgcttattactgtggcattcaatcaacctgttaagctttattccatgaaatttcaagggccagataatggtcagggccctaaatatgtaaaaatttttatcaacctaccccgatctatggattttgaagaggcagaaagaagtgaaccaactcaagctctggaactgacagaggatgatattaaagaagatggcattgttccacttcgttatgttaagtttcagaatgttaacagtgtaactatatttgttcagtcgaatcaaggtgaagaggaaacaacaagaatttcatattttacttttattggtactccagtccaggcaacaaatatgaatgacttcaaacgagtagttggcaaaaaaggagaaagccactaaggtacaaaagacactggacaaccatattgcaatcagatctacagctcctggataattgcttgattctcgccagagactgtcaatgtttcattcattgccattaccaataaatcattgcttttgttcagatggtatcactagtgtttccattgtaatcttgacacatgcaattgtaaataaaagtcaccacttttgccaagcttaaaaaaa

SEQ ID NO: 1210 - DNA, 1714 bp, HOMO SAPIENS
ccagaagccagatggtcccgggacaggcccagccccagagcccagagatgctgctgctgcccctgctgctgcccgtgctgggggcggggtccctgaacaaggatcccagttacagtcttcaagtgcagaggcaggtgccggtgccggagggcctgtgtgtcatcgtgtcttgcaacctctcctacccccgggatggctgggacgagtctactgctgcttatggctactggttcaaaggatggaccagcccaaagacgggtgctcctgtggccactaacaaccagagtcgagaggtggaaatgagcacccgggaccgattccagctcactggggatcccggcaaagggagctgctccttggtgatcagagacgcgcagagggaggatgaggcatggtacttctttcgggtggagagaggaagccgtgtgagacatagtttcgtgaacaatttgttctaaaagtaacagccctgactcagaagcctgatgtctacatccccgagaccctggagcccgggcgcctgtagtcccagctactcgggaggctgaggcagaagaatcatttgagccaggaggtggaggttgcagtgagccgagatcgcatcactgcactccagcctgggcgacagagcaagactgtctcaaaaactaaaacaaaaaaacaccaccaccaccaccaatgtctgattaaatctaagccacggttccattttggggcaaggggcagggtgtgggtgtggtggacagagaacgggctccagccaccatcagctgcacgtcctggtagcacctgagccattcccagtctcctgtgctgggagatcatcatctaatcctgatgatgacgccctcctctcagagctcgggggatgagctgccaaaacccatggaggttcaaaacccgggctctggagacagaagacactgggctcagagacatggggccactgtccaggctttccctgggcctggacctgggctccttccactgtctgagcagggtcagcctgggctggctgtgctggttcaagagatgagggaggaggacacagcggttgccaggaccctgaggcactggactgggcactgccccaaggggcagaggatggaacccggtgttgatattgtgatgctgacccgtctgctcacctgatttgggtgctgaagggcagctgacccccctaatcttttatagacttgtgaaacgaaaataaataaaagtcaagctgggaacagcttagggcaaacctgcctcccattctattcaaagccacccctctgctcactgagatagatgcatgtctgatcacctcagttgggaaaggctaatcagaaactccaaagaatgcatctgttcatctctcacccatctgtgacctggaagccccctccccacttcgagtcttcctgcctttgcttcaagttttcccgcctttccaaatggaaccaaagtacttcttacatatagtgactcatgtctcaagtctccctaaaacgtataaaactaagctgtgccccaaccacgctgaccatgtcatcaggacctcctgaggctgtgtcacggcctgtgtcctcaaccttggcaaaataaactttctaaattaactggaaaaaaaaaaaaaaaaaaaaaaaaaaaaaaaaaaaaaaaaaaaaaaaaaaaaaaaaaaaaaaaaaaaaaaaaaaaaaaaaaaaaaaaaaaaaaaaaaaaaaaaaaa

SEQ ID NO: 1211 - DNA, 2317 bp, HOMO SAPIENS
cggacgcgtgggtgagcagggacggtgcaccggacggcgggatcgagcaaatgggtctggccatggagcacggagggtcctacgctcgggcggggggcagctctcggggctgctggtattacctgcgctacttcttcctcttcgtctccctcatccaattcctcatcatcctggggctcgtgctcttcatggtctatggcaacgtgcacgtgagcacagagtccaacctgcaggccaccgagcgccgagccgagggcctatacagtcagctcctagggctcacggcctcccagtccaacttgaccaaggagctcaacttcaccacccgcgccaaggatgccatcatgcagatgtggctgaatgctcgccgcgacctggaccgcatcaatgccagcttccgccagtgccagggtgaccgggtcatctacacgaacaatcagaggtacatggctgccatcatcttgagtgagaagcaatgcagagatcaattcaaggacatgaacaagagctgcgatgccttgctcttcatgctgaatcagaaggtgaagacgctggaggtggagatagccaaggagaagaccatttgcactaaggataaggaaagcgtgctgctgaacaaacgcgtggcggaggaacagctggttgaatgcgtgaaaacccgggagctgcagcaccaagagcgccagctggccaaggagcaactgcaaaaggtgcaagccctctgcctgcccctggacaaggacaagtttgagatggaccttcgtaacctgtggagggactccattatcccacgcagcctggacaacctgggttacaacctctaccatcccctgggctcggaattggcctccatccgcagagcctgcgaccacatgcccagcctcatgagctccaaggtggaggagctggcccggagcctccgggcggatatcgaacgcgtggcccgcgagaactcagacctccaacgccagaagctggaagcccagcagggcctgcgggccagtcaggaggcgaaacagaaggtggagaaggaggctcaggcccgggaggccaagctccaagctgaatgctcccggcagacccagctagcgctggaggagaaggcggtgctgcggaaggaacgagacaacctggccaaggagctggaagagaagaagagggaggcggagcagctcaggatggagctggccatcagaaactcagccctggacacctgcatcaagaccaagtcgcagccgatgatgccagtgtcaaggcccatgggccctgtccccaacccccagcccatcgacccagctagcctggaggagttcaagaggaagatcctggagtcccagaggccccctgcaggcatccctgtagccccatccagtggctgaggaggctccaggcctgaggaccaagggatggcccgactcggcggtttgcggaggatgcagggatatgctcacagcgcccgacacaaccccctcccgccgcccccaaccacccagggccaccatcagacaactccctgcatgcaaacccctagtaccctctcacacccgcacccgcgcctcacgatccctcacccagagcacacggccgcggagatgacgtcacgcaagcaacggcgctgacgtcacatatcaccgtggtgatggcgtcacgtggccatgtagacgtcacgaagagatatagcgatggcgtcgtgcagatgcagcacgtcgcacacagacatggggaacttggcatgacgtcacaccgagatgcagcaacgacgtcacgggccatgtcgacgtcacacatattaatgtcacacagacgcggcgatggcatcacacagacggtgatgatgtcacacacagacacagtgacaacacacaccatgacaacgacacctatagatatggcaccaacatcacatgcacgcatgccctttcacacacactttctacccaattctcacctagtgtcacgttcccccgaccctggcacacgggccaaggtacccacaggatcccatcccctcccgcacagccctgggccccagcacctcccctcctccagcttcctggcctcccagccacttcctcacccccagtgcctggacccggaggtgagaacaggaagccattcacctccgctccttgagcgtgagtgtttccaggaccccctcggggccctgagccgggggtgagggtcacctgttgtcgggaggggagccactccttctcccccaactcccagccctgcctgtggcccgttgaaatgttggtggcacttaataaatattagtaaatccttaaaaaaaaaaaaaaaaaaaaaaaaaaaaaaa

SEQ ID NO: 1212 - DNA, 5175 bp, HOMO SAPIENS
agaatgtcttctgctcagtgcccggcactagtgtgtgtcatgtcccggctgcgtttctggggcccatggcccctccttatgtggcaactattgtggctactagttaaggaggctcagcctctggagtgggtcaaggacccgctccagctcacctctaatcccctggggccgcctgactcctggtcttcccactcctcccatttcccacgggaatctccccatgcgcctactctcccagcagacccgtgggactttgatcacctggggccctctgcttcctcagagatgccagccccaccccaggaatcgactgaaaatttggttccattcctggacacctgggattcagctggagagcagcccctggagccagagcagttcttggcttcacagcaggatttaaaggacaagctgagtccacaggaaagactccctgtttcgcccaagaagctgaagaaagatccagctcagcgttggagccttgctgagattattggaattacacgccaattatccacacctcagagtcagaaacagactttgcagaatgaatattccagtacagatacaccgtatcccggtagcctgcctccagaactccgggtgaagtcagatgagcctccagggccctctgagcaagttggaccttctcaattccatctagagcccgaaactcaaaatccagagacccttgaagacatccagtcctcttcactccagcaagaagccccagcacagcttccacagctccttgaggaagaaccttcttcaatgcagcaggaggccccagctctgcctccagagtcctctatggagagtctaactctaccgaatcatgaggtgtcagttcaacctccaggtgaggatcaagcttattatcacttgcccaacattacagttaaacctgcagatgtggaggttaccataacttcagagcctaccaatgagacagaatcttcccaagcccagcaggagaccccaattcagtttccagaggaggtggaaccttctgcaacccaacaggaggccccaattgagcctccagttcctcctatggagcatgaactttccatcagtgagcagcagcagccagttcagccttctgagtctcctagggaggtcgaatcttctccgacccagcaggagaccccaggtcagcctccagaacatcatgaagtcacagtttcacctccaggtcaccatcaaactcatcatttagcttcacccagtgtctctgtgaagcctccagacgtgcagctcaccatagcagcagagcctagtgcagaggtgggaacttctctagtccaccaggaggctacaactcggctctcagggtcaggtaatgatgtagaacctcccgccatccagcacgggggcccacctctgcttccagagtcatcagaagaagctggacctttagcagttcaacaggagacttcatttcaatctccggaacctattaataatgagaacccctctccaacccagcaggaggctgcagctgagcatccacagaccgctgaggagggtgagtcttccctaacccatcaggaggccccagctcagactccagagttccctaatgtagttgtagctcaacctccagagcattcacacctgactcaagccacagttcaacctttggatctggggtttaccatcactccagaatccaagacagaggttgaactttctccaaccatgaaggagaccccaactcagcctcctaagaaagttgtaccccaacttcgagtatatcaaggggtaacaaatccaacaccaggtcaggatcaagctcagcatccagtgtcacccagcgttacagttcaacttttggacctgggacttaccatcactccagaacctactacggaggttggacattctacacccccgaagaggactatagtttctccaaagcatcctgaggtgacacttccacatccagaccaggttcagactcagcattcacacctgactcgagccacagttcaacctttggacctggggtttaccatcactccaaaatccatgacagaggttgaaccttctacagccctgatgactacagctcctcctccaggacaccctgaggtgacacttccaccttcagacaagggtcaggctcagcattcacacctgactcaagccaccgttcaacctctggacctggagcttaccataactacaaaacctactacagaggttaaaccatctccaaccacggaggagacctcaactcagcctccagacctgggacttgccatcattccagaacccactacagagactagacattctacagccctggagaagactacagctcctcgtccagaccgggttcagactctgcatcgaagcctgactgaagtcacaggtccacctactgaactagaacctgctcaggattcactggtgcagtctgaaagttacacccaaaataaggctttaactgcaccagaggaacacaaggcctccacaagcaccaacatatgtgagctctgtacctgcggagatgagatgttgtcatgtattgatctcaacccagagcagaggctccgccaagtgcctgtgccagagcccaacacccacaatggcaccttcaccatcttaaatttccaaggaaactatatttcttacattgatggaaatgtatggaaagcatacagttggaccgagaaactaattctcagagaaaataacttgactgaattacacaaggattcatttgaaggcctgctatccctccagtatttagatttatcctgcaataaaatacagtctattgaaagacatacatttgaaccactaccatttttgaagtttataaatcttagttgcaatgtaattacagaactcagctttggaacatttcaggcctggcacggaatgcagtttttacataagttaattctcaatcacaatcctctgacaactgttgaagatccgtatctctttaaattgccagcattaaaatatctagacatgggaacaacgctagtcccacttacaacacttaagaacattctcatgatgactgttgaactggaaaaactgatcttacctagccatatggcctgctgcctctgccaatttaaaaacagcattgaggctgtctgcaagacagtcaagctgcattgcaacagtgcatgtctgacaaacaccacacattgtcctgaagaagcatcggtagggaatccagaaggagcgttcatgaaggtgttacaagcccggaagaactacacaagcactgagctgattgttgagccagaggagccctcagacagcagtggcatcaacttgtcaggctttgggagtgagcagctagacaccaatgacgagagtgattttatcagtacactaagttacatcttgccttatttctcagcggtaaacctagatgtgaaatcactgttactaccgttcattaaactgccaaccacaggaaacagcctggcaaagattcaaactgtaggccaaaaccggcagagagtgaagagagtcctcatgggcccaaggagcatccagaaaaggcacttcaaagaggtaggaaggcagagcatcaggagggaacagggtgcccaggcatctgtggagaacgctgccgaagaaaaaaggctcgggagtccagccccaagggaggtggaacagccccacacacagcaggggcctgagaagttagcgggaaacgccgtctacaccaagccttccttcacccaagagcataaggcagcagtctctgtgctgaaacccttctccaagggcgcgccttctacctccagccctgcaaaagccctaccacaggtgagagacagatggaaagacttaacccacgctatttccattttagaaagtgcaaaggctagagttacaaatacgaagacgtctaaaccaatcgtacatgccagaaaaaaataccgctttcacaaaactcgctcccacgtgacccacagaacacccaaagtcaaaaagagtccaaaggtcagaaagaaaagttatctgagtagactgatgctcgcaaacaggcttccattctctgcagcgaagagcctcataaattccccttcacaaggggctttttcatccttaggagacctgagtcctcaagaaaacccttttctggaagtatctgctccttcagaacattttatagaaaacaataatacaaaacacacaactgcaagaaatgcctttgaagaaaatgattttatggaaaacactaacatgccagaaggaaccatctctgaaaacacaaactacaatcatcctcatgaggcagattccgctgggactgcattcaacttagggccaactgttaaacaaactgagacaaaatgggaatacaacaacgtgggcactgacctgtcccccgagcccaaaagcttcaattacccattgctctcgtccccaggtgatcagtttgaaattcagctaacccagcagctacagtcccttatccccaacaacaatgtgagaaggctcattgctcatgttatccggaccttgaagatggactgctctggggcccatgtgcaagtgacctgtgccaagctcatctccaggacaggccacctgatgaagcttctcagtgggcagcaggaagtaaaggcatccaagatagaatgggatacggaccaatggaagattgagaactacattaatgagagcacagaagcccagagtgaacagaaagagaagtcgcttgagctcaaaaaagaagttccaggatatggctatactgacaaactcatcttggcattaattgttactggaatactaacgattttgattatacttttctgcctcattgtgatatgttgtcaccgaaggtcattacaagaagatgaagaaggattctcaaggggcattttcagatttctgccatggaggggatgctcttcgcgaagggagagtcaggatggactttcctcatttggacagccgctctggtttaaagatatgtacaaacctctcagtgccacaagaataaataatcatgcatggaagctgcacaagaagtcatctaatgaggacaagatcctcaacagggaccctggggacagcgaagccccaacggaggaggaggagagtgaagccctgccataggaggagaacacagcccacctcaggcctcctgcaaaaatacatagaataaacaacaacagttactaaatg

SEQ ID NO: 1213 - DNA, 829 bp, HOMO SAPIENS
tggggagtgaaagcgaaagcccgggcgactagccgggagaccagagatctagcgactgaagcagcatggccaagccgtgtggggtgcgcctgagcggggaagcccgcaaacaggtggaggtcttcagacagaatcttttccaggaggctgaggaattcctctacagattcttgccacagaaaatcatatacctgaatcagctcttgcaagaggactccctcaatgtggctgacttgacttccctccgggccccactggacatccccatcccagaccctccacccaaggatgatgagatggaaacagataagcaggagaagaaagaagtccataagtgtggatttctccctgggaatgagaaagtcctgtccctgcttgccctggttaagccagaagtctggactctcaaagagaaatgcattctggtgattacatggatccaacacctgatccccaagattgaagatggaaatgattttggggtagcaatccaggagaaggtgctggagagggtgaatgccgtcaagaccaaagtggaagctttccagacaaccatttccaagtacttctcagaacgtggggatgctgtggccaaggcctccaaggagactcatgtaatggattaccgggccttggtgcatgagcgagatgaggcagcctatggggagctcagggccatggtgctggacctgagggccttctatgctgagctttatcatatcatcagcagcaacctggagaaaattgtcaacccaaagggtgaagaaaagccatctatgtactgaacccgggactagaaggaaaataaatgatctatatgttgtgtgga

SEQ ID NO: 1214 - DNA, 2996 bp, HOMO SAPIENS; identical to SEQ ID NO: 611

SEQ ID NO: 1215 - DNA, 6243 bp, HOMO SAPIENS
acttccgctgtcccgcgaagggcggggggagcgaactgttgtggtgcggagcgttcggcgggcggcggccgggcggcccaggggctgccgcgggactcggggcgcagccgagtggctgcaggggtggagtgggccggacgagccgcggggcccgggtgccgcgggttcgaggccgggccccgcgcgaggaggccgcgccaccccgggggagctgcccggcagcgagtttgccccgctgccgaaagaaggcgggagccggcaggggccttcgaaaccccctggcaacccaggcccggagtccttggggagcggctgtttcctgggacgccctcccggacacccccgctgcagggttacggttctgggcccccggcagaaggctcctccgggtgacccccggcggggccctgcgagccgcgggagccgaccccggggcctcgagccgggaggaagggggcttccggaggcggagggccgggggccgagggagccgggcctctcggacgcggggcagggcagcgcccgggctggagacggactctgggaccctcggctgcgggggtctcagcgacctgccccgcggcaagcgcggccgcggagtggcctaccggggaccctcccccagagggaccggcccggggcggggagatgaacggcttcagcacggaggaggacagccgcgaagggccccccgccgccccagctgccgccgccccgggctacggccagagctgctgcctcatcgaggacggcgagcgctgcgtccggcccgcgggcaacgcctccttcagcaagagggtccagaagagcatctcgcagaagaaactcaagctggacatcgacaagagcgtaaggcacctatatatctgtgattttcacaaaaatttcatccagagtgtccgaaataaaaggaagaggaagacaagtgacgatggcggagattctcccgagcacgacactgacattcctgaggttgatctgttccagctgcaggtgaacaccctacgacgttataaacgacactacaagttgcagaccagaccaggcttcaataaggcccagttagcagaaactgtgagtcgacacttcaggaacatacctgtgaatgaaaaagagacccttgcctacttcatctacatggtgaagagtaacaagagtagactggaccagaaatcggagggtggcaagcagcttgagtgaggatgaagcacatcttaaaggaatgaagtgtaatgcttgatgcacaggtgatatctactacatttaagcccataaagactgttaaatattattgtaaataaaaaagtttgaatgatgaatactgtaaatctttttggtcaggaggattatattctcatgattcagcatgtgtatagaaagactttcttttacgataactctggactaaaaaaatcaggatcattaaaagaattaaaaactatgtatttcagcattcaacaaagcattaaatcaattctactggaaatgtgggataagaaatattttggtaatcaccttatccaccaggctgccacgtgtgagctgtagcttggaatagcagcaaggtgcaattggccatggaagtgcatgagcagacccacatctggacttgcatgctgcccgctggcgacatagatatcccgcccgctttgttgcaagctttgtcatttatcagcagatcagtttgacactggtccccctcactcaccctgtgccttgtacacagtaggcactcaatcagtaggtattggctaattgagctgtcactaatagtgccagccttgtaacatccgcttcacacctctcatgactgagacctctgccatttctgttgctcaccacttaactgctagaatgtggaggaaatcctgatgcaccaacaaggaagtttctgatcagataaggatttcaggacagttgcatgtgcaaaactattcgttgaggttccagaaacactgatatagagaccctcacagaagatacggtcccttatgcaccccactatgcttcactctttggggtgcagttagatattatgacttcagccaagcttcttggtaataaatgcattgacacactgacatatttagtaggttggggcaagtatttttagaagttttcatcctaagttcacaaccaccatgcaagctgccaggggccatgtgattcctgcccagaagttcagcttaggattgaaagtctggctggccttgactccctgggctctggtcatcagcaaatcatgagtttgggcaacaaaggtcaattccatctgatgctcatttttgtgaacaatttgcctccctcttagggagaaagattgctaaaataatttttgaaaattacctaatttttttgttgttcaaaacgttgaactcctcaatctaattatatcagagccaaagtatcctgtgaaaacaaagctttatatccaaaaatgtgcttttgcaaaattctttaatctgtgtaatggagggcagagggtatggggtaggagggtgggagaaagaaaagaaaagaatttggattctaatttatgaccatcttgacatatggtcaaaggtgtcattttcctactcagtttcaattctgagttaatttcttaagccttaaataataagaacaatggacagcctggcctggcagagagtttcacagatgacttaatctgagcaccatcacagagaagtcaggactaaaccccctactgagcagggcggcggagtgtccaaaggtctcagttctgtggagcagagtaccacgctttctgtggaatggggacagggtcaccacgctcactaaaatgcagtatgttccattgcagcaaagctttcgcctgtgttcaaaatgcatgtctagcagattgcagccttttaaattaaatatatataaatggttgtatatagaatatactctggactgtgagggcatcctattttggtatgcctcctggctgtggatggcatgtccagtgctctgtgagtgttttcagtcattcacattcactatgtgtttagagattctctccctgcttacagctgaaggatgttgatacaggcatcaagaaggctgaggggcagatggggcctgcaggttaaggcattgttaacttgctccatggaaatgtccatatcttaatgagtaaaaaagtgtatttttctgatacgtaaaccagaattgtgggcgtgtaggtcacatcactatttctttagcagcaaatctgttttcccagttgagagagacaatagcttctgcacaagaatatatgatggtaggatccatctgttcaattgtgtctgaaagaatctttattccaaagcgaaacctggggaaatgttttaccttcagccagatgctgtgtgtgtacttgggtcccttgtctttcctctaaggagaggtgcttgtggaaagtggaggttgtgggcatcttttcaaccttttcaatctgacctttcaacaggtcaggtgagagaaaagacaaagctatttgaacctatgtttttcttatgtccagaaatctgttctttcatcaaaccactaaaccactcgccttagcctcttctgcagtttctggtggctctatctgtgggcaagggactcctgcctgtgagaagtggccaggccctccagagcaacggggtctggcttcagggagcagtggggtgtggggaaagcaatgttcatcttggctgctccatttttataccatccatcaaggactcttgcgcttctctccacctgtgacgtagcagcattgccttctttcctcttggtgcttctgggcaaaactggaatttgaaatccagaactggcgttgtcttcttaaagagtatggttcctgcctcagttccagcctggtatggttctttgatatgccctgaaggttctcacatggaaacatcagtatcctgccattcatgttgttttaagatgttttaaaaaccaatggacaaacttcttgcttcaaggaacaaactcttaggttggcaacagcatataaaaaaaaagatcacagctgaatctcatgaaagattaaaaaccaaaggattcaagaccggtgttgtaaaatgaagaggaattttacttacatgttacagctgccaagtttttagatgttcctgtcatagctaaatagtcactgctagcctttcagagaacagatagtaacaattgtttgcagctgcagtgttgcatctaattttggtgtttaggctttttattttgtgggaagctttttgttaatatcctgcagggcaactgcctgttgggagggagaggatggaagaaggagcttactctgggggccttgcctattgagggaggctgttgcccagagcagttgcttcatggaagtcatccaaaggcgctctcagtcattacaatgacaggatctcaaagttgggaaagggctgttaagtcatccagtctagtctccacataggtgctgacattctgcctacaaccatcccaccaaggggttgagcagtctggacttaaacacctccgaggacagagaacccactacctcgtggagaagcctgttctttgtaaacctctggcttttctatgttctctgtaatttccatcttagtctctgccccatgggggccacatgggacaagttatttttggcaaagcacctaattgctggcactgtcccaaagcatagcgtttgccttttggaaagaaacaatgctaggacatggacactttggtacactgtccttacccctgagtattagtccactcagttccttgttggagaatgttgagaaaaccctactggctggcttgtttctgccaaagcttggggagaggagagggggatgagaagatgttagcagcctgctaaacctcagacagatgaggactcagttctgtgcttgccccacaaaaacggatgctcacatcatcaggaaattgttcagctggaggatttataacttcgttgctttgcatgaagtttaaagttttcatggttgcccagggcttgtaccttagattcctgtaaggactttgcactgtttttgctgagaaaacaacgcttcaggacttaaggtctaagcgtcagagaagtgccgtattttcaaggtggaaagtctgttaagcttgctgttgtccaatcatccgtttttagagatggggaaactaaaactcaaaaagatgtgcctgaggtcatatggcattatcagaaccaacctctggccctcttgacctgtctagcattctttctttctgacctataggatgactctaattcagtctaaatcggctgccctcagattcttgagaacttaaaattgagcagaaattcccaaggccaacctagctctcagggaccaacctgcagaactcaagattgagcgaaatgtttaggccagttgagttttgcaaaatgagtggtaagggaaaacagatctagcctgttatttaaaaccagggttcaaaagccctattgggagaggtagtattgtcctagcatttaaattctcatgaaatgtgcttggtctgtgatctcttggtcagatatctgccttccaggcgatcctttgaggttgtgtaattcagctggccctggctcctggtccctgttactgagctgggcagtcgaaccgaagggcagatgagctcaagatcatgccttgggaagcatggtgctctaggggtgcctttttattcctttcattgtattatagactgtttccaagtttatggttagaaatggtaaagtgggtctggtgttttgaggtagaacccagcctagggcaagatatgaactgttcttgaggtagaaatgtctacagtcagttgtttcatctagcttgcatcttaaaacacaaacccttcagttgctttcacttaatgcacacatttgccaatgacagagggttatacaggatccttcttttacatttctattgtctgctacgctcatcagagtatattttggggtacaaggttttgggggttttttttcccattttgtaactgccttattgaaaagtaagtgcccttccattccaggcctcctcatattgtacttgtttcctgccaaatctgggggatcatttgtattttaacttcgtaatctatggctctgtactgttgaaaggctctcaattctgtggggtctccttagtatgtatgtgacttttcatgttgcaatatcacacgatgggatggcccgacttttgctcttaataaataatctgaatgagtaagagaaaaaaaaaaaaaaaaaaa

SEQ ID NO: 1216 - DNA, 4544 bp, HOMO SAPIENS; identical to SEQ ID NO: 1005

SEQ ID NO: 1217 - DNA, 5215 bp, HOMO SAPIENS
cgagcgcggcgcccttgagctgcaccgcggcgcaggtttgcgagccgacttgtcagccggccaagaaaaggaagctccgtcccttcccgctcacccggcttccccaccccttgtactctaaactctgcagagggcgagcggcgcggccacggaggcgccgaggaggagcgagccgccgccgggcagcggcgtgccctcgggggagagggcgccggagaggaggcggcggcgcggcggcgagggcgcggcgcgcgatggcagctgcttagcccggcgggcgcggagcagccccgagctgtggctggccaggcggtgcggctgggcgggggacgccgccgccgttgctgcccggcccggagagatgagcacggaggcggacgagggcatcactttctctgtgccacccttcgccccctcgggcttctgcaccatccccgagggcggcatctgcaggaggggaggagcggcggcggtgggcgagggcgaggagcaccagctgccaccgccgccgccgggcagcttctggaacgtggagagcgccgctgcccctggcatcggttgtccggcggccacctcctcgagcagtgccacccgaggccggggcagctctgttggcgggggcagccgacggaccacggtggcatatgtgatcaacgaagcgagccaagggcaactggtggtggccgagagcgaggccctgcagagcttgcgggaggcgtgcgagacagtgggcgccaccctggaaaccctgcattttgggaaactcgactttggagaaaccaccgtgctggaccgcttttacaatgcagatattgcggtggtggagatgagcgatgccttccggcagccgtccttgttttaccaccttggggtgagagaaagtttcagcatggccaacaacatcatcctctactgtgatactaactcggactctctgcagtcactgaaggaaataatttgccagaagaatactatgtgcactgggaactacacctttgttccttacatgataactccacataacaaagtctactgctgtgacagcagcttcatgaaggggttgacagagctcatgcaaccgaacttcgagctgcttcttggacccatctgcttacctcttgtggatcgttttattcaacttttgaaggtggcacaagcaagttctagccagtacttccgggaatctatactcaatgacatcaggaaagctcgtaatttatacactggtaaagaattggcagctgagttggcaagaattcggcagcgagtagataatatcgaagtcttgacagcagatattgtcataaatctgttactttcctacagagatatccaggactatgattctattgtgaagctggtagagactttagaaaaactgccaacctttgatttggcctcccatcaccatgtgaagtttcattatgcatttgcactgaataggagaaatctccctggtgacagagcaaaagctcttgatattatgattcccatggtgcaaagcgaaggacaagttgcttcagatatgtattgcctagttggtcgaatctacaaagatatgtttttggactctaatttcacggacactgaaagcagagaccatggagcttcttggttcaaaaaggcatttgaatctgagccaacactacagtcaggaattaattatgcggtcctcctcctggcagctggacaccagtttgaatcttcctttgagctccggaaagttggggtgaagctaagtagtcttcttggtaaaaagggaaacttggaaaaactccagagctactgggaagttggattttttctgggggccagcgtcctagccaatgaccacatgagagtcattcaagcatctgaaaagctttttaaactgaagacaccagcatggtacctcaagtctattgtagagacaattttaatatataagcattttgtgaaactgaccacagaacagcctgtggccaagcaagaacttgtggacttttggatggatttcctggtcgaggccacaaagacagatgttactgtggttaggtttccagtattaatattagaaccaaccaaaatctatcaaccttcttatttgtctatcaacaatgaagttgaggaaaagacaatctctatttggcacgtgcttcctgatgacaagaaaggtatacatgagtggaattttagtgcctcttctgtcaggggagtgagtatttctaaatttgaagaaagatgctgctttctttatgtgcttcacaattctgatgatttccaaatctatttctgtacagaacttcattgtaaaaagttttttgagatggtgaacaccattaccgaagagaaggggagaagcacagaggaaggagactgtgaaagtgacttgctggagtatgactatgaatatgatgaaaatggtgacagagtcgttttaggaaaaggcacttatgggatagtctacgcaggtcgggacttgagcaaccaagtcagaattgctattaaggaaatcccagagagagacagcagatactctcagcccctgcatgaagaaatagcattgcataaacacctgaagcacaaaaatattgtccagtatctgggctctttcagtgagaatggtttcattaaaatcttcatggagcaggtccctggaggaagtctttctgctctccttcgttccaaatggggtccattaaaagacaatgagcaaacaattggcttttatacaaagcaaatactggaaggattaaaatatctccatgacaatcagatagttcaccgggacataaagggtgacaatgtgttgattaatacctacagtggtgttctcaagatctctgacttcggaacatcaaagaggcttgctggcataaacccctgtactgaaacttttactggtaccctccagtatatggcaccagaaataatagataaaggaccaagaggctacggaaaagcagcagacatctggtctctgggctgtacaatcattgaaatggccacaggaaaacccccattttatgaactgggagaaccacaagcagctatgttcaaggtgggaatgtttaaagtccaccctgagatcccagagtccatgtctgcagaggccaaggcattcatactgaaatgttttgaaccagatcctgacaagagagcctgtgctaacgacttgcttgttgatgagtttttaaaagtttcaagcaaaaagaaaaagacacaacctaagctttcagctctttcagctggatcaaatgaatatctcaggagtatatccttgccggtacctgtgctggtggaggacaccagcagcagcagtgagtacggctcagtttcacccgacacggagttgaaagtggaccccttctctttcaaaacaagagccaagtcctgcggagaaagagatgtcaagggaattcggacactctttttgggcattccagatgagaattttgaagatcacagtgctcctccttcccctgaagaaaaagattctggattcttcatgctgaggaaggacagtgagaggcgagctacccttcacaggatcctgacggaagaccaagacaaaattgtgagaaacctaatggaatctttagctcagggggctgaagaaccgaaactaaaatgggaacacatcacaaccctcattgcaagcctcagagaatttgtgagatccactgaccgaaaaatcatagccaccacactgtcaaagctgaaactggagctggacttcgacagccatggcattagccaagtccaggtggtactctttggttttcaagatgctgtcaataaagttcttcggaatcataacatcaagccgcactggatgtttgccttagacagtatcattcggaaggcggtacagacagccattaccatcctggttccagaactaaggccacatttcagccttgcatctgagagtgatactgctgatcaagaagacttggatgtagaagatgaccatgaggaacagccttcaaatcaaactgtccgaagacctcaggctgtcattgaagatgctgtggctacctcaggcgtgagcacgctcagttctactgtgtctcatgattcccagagtgctcaccggtcactgaatgtacagcttggaaggatgaaaatagaaaccaatagattactggaagaattggttcggaaagagaaagaattacaagcactccttcatcgagctattgaagaaaaagaccaagaaattaaacacctgaagcttaagtcccaacccatagaaattcctgaattgcctgtatttcatctaaattcttctggcacaaatactgaagattctgaacttaccgactggctgagagtgaatggagctgatgaagacactataagccggtttttggctgaagattatacactattggatgttctctactatgttacacgtgatgacttaaaatgcttgagactaaggggagggatgctgtgcacactgtggaaggctatcattgactttcgaaacaaacagacttgactgttgctcaatctaatcttcgatggaaattctaaaaattaatacagagctgatcttcttgggggtgggaaaatcgaagggagaggagaaaggcgctgcactttaaatccagtatttgtttactcatgttaaaaaaaaaaaaaacagacaaaacacactgaaatttcctaactacatctatttctataatttttaaggactcttcataaggactcttaaaataatcctgaacattagaaccctaatgttcaggaagattttaatctaagcatttttatggaaatatttttaatgcagcagctattgcacttcagccaaatgtttatttcacacaaaacggatgtaacatttcatgtgatcgtgcaccactggaacaaaaccaaaatgtgaccataactgtttaggcttctgtgtgtttgtaatatgctctaataatctgagtagaaatgcgtaatttcaattactgtataaagtttatgtttttttaagtgtgcagaatctgagagcaatggtttttacttctctgtgttaattgtaatattgactctattttgtaacttaagtttctgacctgtcgtacatttgtttgagtcgtttatgtactactgaactgtaccagttgcacatgcttgaactgtagtaatgttagcttgttctaaagctatccattgtgtcatatttactctaaaaattaaagagactctcaacaaaaaaaaaaaaaaaaaaaaa

SEQ ID NO: 1218 - DNA, 3869 bp, HOMO SAPIENS
agaagggagcgagagccccagagcgcggcggcagcggcggcctggcccttccagagggccagagccagggacatgcgggcgcccgggactccgcgttccgcgcggcccggcgcctgagcgcctccgttccccgtcccggagctgccggcggcatgatccgacacgccggggcgcccgcgcgcggggaccccacgggtccggttccagttgttggcaaaggagaggaagaggaagaggaagatggcatgcggctttgtctgccagccaacccgaaaaactgccttcctcaccgccggggcatcagcatcctggagaagctcatcaaaacatgcccggtgtggctgcagctgagtctgggccaggcagaggtggccaggatcctgcaccgggtggtggctgggatgttcctggttcgccgggacagcagctcgaagcagctggtgctctgtgtccactttccttctctgaacgaaagctcggccgaggtgctcgaatacaccattaaggaagaaaagtcgatattgtacctggaaggctcggctcttgtgtttgaggacatcttcagattgattgcgttctactgtgtcagtagagacttactgcccttcacactgcggctaccccaggccatccttgaggccagcagcttcacggaccttgagaccatcgccaacctgggtctgggtttctgggactcctcgctgaatcctccacaagaaagagggaagccagcagagcccccaagagaccgggcccccggattccccctagtctccagcctcaggcccacagcccatgacgcaaactgtgcctgtgaaatcgagctgtcggtaggaaatgaccgcctgtggtttgtgaatcctattttcatcgaggactgcagcagcgccctgcccaccgaccagccacctcttggaaattgccctgcacgccctttgccgcccacctctgatgccacctcacccacctccaggtgggccccacgccgcccaccaccccctcccccagtgctgcccctgcagccctgcagcccagcccagccccctgtgctccctgctcttgcccccgcccctgcctgtcctttgcccacctctcccccagtgcctgccccccacgtcacaccccatgccccaggtcccccagaccatccgaaccagccgcccatgatgacctgcgagagactcccatgccccactgcaggcctgggccccctcagggaggaagcgatgaagccaggggcagcctccagtcccttgcagcaggtccccgccccgccactgcctgcgaagaagaaccttcccactgcccctcccagacgccgcgtttccgagagggtgtccttagaagaccaaagtccggggatggcggcagagggggaccagctcagcctgcctccccaagggacctcagacggccctgaggacacgccccgggagagcacggagcaaggccaggacacagaggtgaaagccagcgatcctcacagcatgccagagctgcccaggacagccaaacaacccccagtcccgccccccaggaaaaaacggatctctcgacaactggcctcgaccctcccagctcccttagagaacgctgagctctgcacacaggcgatggccttggagacacccacgccgggtccacccagagagggccaaagccctgcttctcaggctgggactcagcaccctcctgcccaggccactgcccattcccagagctctccagagttcaagggctccctggcctccctctcagacagcttgggggtgtctgtcatggccaccgaccaggactcctactccaccagcagcacggaggaggagctggagcagttcagcagccccagcgtgaagaagaagccctccatgatcctgggcaaggctcggcaccggctgagctttgccagtttcagcagcatgttccacgctttcctctccaacaaccgcaagctgtacaagaaggtggtggagctggcgcaggacaagggctcgtactttggcagcctggtgcaggactacaaggtgtacagcctggagatgatggcgcgccagacctccagcacggagatgctgcaggagattcgcaccatgatgacccagctcaagagctacctgctgcagagcaccgagctcaaggccctggtggaccccgccctgcactccgaggaggagctcgaagcaattgtagagtctgccttgtacaaatgtgtcctgaagcccctgaaggaagccatcaactcatgcctgcatcagatccacagcaaggatggttcgctgcagcagctcaaggagaaccagttagtgatcctggccaccaccaccactgacctaggtgtgaccaccagcgtgccggaggtgcccatgatggagaagatcctgcagaagttcaccagcatgcacaaggcctactcacctgagaagaagatctccatcctgctcaagacctgcaaactcatctacgactccatggccctcggcaacccagggaagccctatggggcggatgacttcctgcctgtgctcatgtatgtgctggcccgcagcaacctcacggagatgcttctcaatgtggagtacatgatggagctcatggaccccgccctgcagctgggggagggttcctactatctgaccaccacctacggggccctggagcacatcaagagctacgacaagatcacggtgacccggcagctgagtgtggaggtgcaggactccatccaccgctgggagcgccggcgtactctcaacaaggcccgggcctcccgctcctccgtacaggacttcatctgcgtgtcgtacctggagcccgagcagcaggcgcggacgctggcgtcgcgggcggacacccaggcccaggcgctgtgcgcgcagtgcgcggagaagttcgcggtggagcggccgcaggcgcaccggctgttcgtgctggtggacgggcgctgcttccagctggcggacgacgcgctgccgcactgcatcaagggctacctgctgcgcagcgagcccaagcgcgacttccactttgtctaccggcccctggacggtggtggcggcggcggcggcgggagcccgccctgcctggtggtgcgggagcccaacttcctgtgaggccctcccggggcgcctcccctcacccccaggcgcacgtctggccccgcctctggctgcgcactcccgaccgcgacgtccacgcagcagagggacatgggccattccatgacgtgcccaggccaacgtcgcaggacagttgtgaaaataacatgacgctcgtccaaggccacttcctgagggcaagtcctaatagccctgagacaccgagacggcatgttcttcattagacggaaagggaaactgaggctcaggagagaggcgctccaggccgctgcagccaacaaaccggcgccctcttcacacgtagctcctcaggccattccccatgagtcccccacacccaccccatcctcggtctttgcaaagaagggcccgagcttagtttccccaggactggcctaggaaggagcaccggccacagctgctccccgtgccactcagggtggacccagcatctcaggagcacctcagggtgtcggttaagagacaggcctccacccctgcaccagagcctgctcttagctcccggtgcccccagaccccgcagctctgtgcccggcaagaagcagctagacacacgccagggcgccaagcacggccagctccgcggacccatggacaagcccagccccgcctcagggaaaacagggcctttccctacaggacacgccccagagctgtggcagattgcaggagccatcgtgtggggagaatttaataaaagcccttttgaaaaaaaaaaaaaaaaaaaaaaaa

SEQ ID NO: 1219 - DNA, 519 bp, HOMO SAPIENS
  misc_feature (284)..(284): n is a, c, g, or t
tgactccagatactgcctgagcagccgcctgagggtctcggccaccttctggcagaacccccgcaaccacttccgctgtcaagtccagttctacgggctctcggagaatgacgagtggacccaggatagggccaaacccgtcacccagatcgtcagcgccgaggcctggggtagagcagactgtggctttacctcggtgtcctaccagcaaggggtcctgtctgccaccatcctctatgagatcctgctagggaaggccaccctgtatgctgtgctggtcagcncccttgtgttgatggccatggtcaagagaaaggatttctgaaggcagccctggaagtggagttaggagcttctaacccgtcatggtttcaatacacattcttcttttgccagcgcttctgaagagctgctctcacctctctgcatcccaatagatatccccctatgtgcatgcacacctgcacactcacggctgaaatctccctaacccagggggaccttagcatgcctaagtga

SEQ ID NO: 1220 - DNA, 3704 bp, HOMO SAPIENS
cgtagctcccgctttcgcctcttcgtttatgactccgttgggctccggccctcctagagaggcctccatagcgcaggttcgtgggttctcgcggacctttttccgtgtagctttctgcttcttcccggcattcctgtttccgttttctcacagccctctggcttttccaccactgagacactttgcgctcaggacttcagtgacgtcatctttctgcggcgcgcggacacccgccggtggaagaagaaacagctccgccgtccttcgcttcttttgctgggctgctgctccttcggcatcatggcgccgtcgctgtggaaggggctggtgggcatcggtctctttgccctagcccacgccgccttttccgctgcgcagcatcgttcttatatgcgattaacagaaaaagaagatgaatcactgccaatagatatagttcttcagacacttctggcctttgcagttacctgttacggtatagttcatattgcaggagagtttaaagacatggatgccacttcagaactgaaaaataagacatttgatacgttaaggaatcacccatccttttatgtatttaatcatcgtggtcgagtacttttccggccttcggatacagcaaattcttcaaaccaagatgcattgtcctctaacacatcattgaagttacgaaaactcgaatcactgcgtcgttaagatttttacaaattataataataggacaggacacagagctggaatattggagtttggggtataaaacactcctccctgcccccattagtatttatattgatctttcagacctactttagtaaaaaaaaccatggcccttgtttatatactgttaatccaatcattaatgcagtgtaagttatatgtgaaatgagtctttggtatttcatataggaattattttttttttcatttaaaacaaatccacatcttttgtaaaagccactgttttgaacacatttccttgaaaaatgttggtggtttttgtgattatttatttttttagatttcttttcttttgcactacaatttttggaatccttttggaaatactgtgtgactgctgtgttttgcagcatgaattatagtaaaatggtcttcaattcttaacaaatggacttccctgatgagaccaaaatggtgatttaacagtttttcttgtgtcccctaaaaagtggctctgcttcagaagtacttgccagtttttaatttatttgtgacttttcaccctaccctgctcccatataccttctaccatcagctgtcttgtttcatcatttctctgagattctgtgtgcagtgagcaatttttgtgtcagaaattctttgtcagaacaaatatatgtaacaggctcaacttactgtaaagctacttgtgttctcttcatttgtctgtaaaaatttccctaattgattatatagtgtaagaatagttgaagactagttgaagaccttttgtgatttcattatcatgcctatgcagaagaaaaatcattgaggaaaattgtcattagccagtttaactgattcaaactctgtttatttcatactaaactagtgaataagtgaaataaaggaaactcgtcattaatctaaagacagagttcaaaggaattgggccaaatatattctcagtatttggaactaatgtttttaaggtttttaggaaaatcaggtcatttaagaaattgttttgtagtttctggtttatagcagtcttcaagttttccatcttcactgtatgttgctgaaagtgaggatgaggatacagagttgatatttttagaaacagtaattttacttttaaggaaattggctagctctttgagctagagagctgtaggaagctcaacatttctttgtagagaacgttgctttttttggattgtacaggtataaaaacattgcttttgttgaattgtataggtgtaaaaagggaataactgtatgcaggtttgaaaaggaaatgtgctttaggcatgagtcataagatgccattgtacttgtaggcattttattttcctttagaaatggacatcagctcttctcttctgactggtaacacatagccccaaagcatgagattatttttcattgggtttttattgttgtttagttttggtttgttacgccagcccagtctgtctgcggaacactgactctgctctctaatgagaacaaagttagaaatctgccgataacctaaaataatttagaaatgaattaaaaatgtgaaatcgggttaaagtgatgatgataaaatagcatgcaagaaacaagctccttccatcagacttggctactgttttcttctggtacgatttggtttggaagagcctcttgtttccttctctttggggtatgtcttcgtttcttaatatgtttgtaacattattgagatataattcacataccttacaattcacttattttaagggtacaatttagtggtttttagtgtattcacaaagttgtgtaaccgtgaccacagtcaattttagaacatttcgttaccccaaaaagaaaccctgtacccttgagcagtcacctctcattttctcccagtgcccaccccatccccgagcccctggcaaccactaatctatttctctctctgtagatttgcttattctggtcatttcatataaatggaattctacaatattcggtcttttgggactggcttcccaaatatgattttctatatggagtgagaaaattcttctcatcttgagaactcttattgctgtgaaagggagtggttggtaaaatcaatagatttcaggcaagagggccagatacctaacaggtttttctccgtgaatcttatgctgagtagtttttcctcataaccaagcatttatgatatattactacttataatactgtggctagtctctagaatggatgttgaaatctttgcctcctcagtcgggaagagtcctgctaaaaatcaggctaaaaatcaggccaaaaatcaggccaaatgacttggcaaataattgacaaagtggttttcacgtgtgtctatctttgctagcagcttgtatacctcaggccaggtgagctccccaaatttcttttttcatttactccagtgagtttctgctgtctttttcaagtatgtaccataggacttaaaggtgatttggatgcgttgtaacactgctaaatatgctaagtacagaattttatctacagtactgtgagacagtcaattattgcctagggtagttcaaaaatatgatgtgagctagttaagcctttgcttgactgatttcagtgatattcagaagtgtgtaccaatcaaggctctttaaaatacggaacgactcacttaataaccagggaaccagccaaatactgtgcagccgcagaatatgcatatcaatgagttggaggtgattattctctgtaactccctaatgattgttttctaagcattgtggcttctcagtggcttgacagcatcttcctggttgtatgtggcctgtttacatgatgtattgaataatgttgtttgttgtgagcatcaatgcctgtaacaccaaactaaacacgtgtttttgggatatgtttccaatctttaaatgaccttgccctgtccaataaataaatgattgtctcaccctgaaaaaaaaaaaaaaaaaaaaaaaaaaaaaaaaaaaaaaaaaaaaaaaaaaaaaaaa

SEQ ID NO: 1221 - DNA, 1308 bp, HOMO SAPIENS; identical to SEQ ID NO: 942

SEQ ID NO: 1222 - DNA, 1256 bp, HOMO SAPIENS
gtaagatgcctatcctagtccctctcttcgggctcttcatctcaagaggaacaaacaagagcaaactcagtgttgagaggccccaaaccggactctcccacagagaggtgctcggtcccaagccccggaggcccgggaaggccgcctccggaggagcccccgcagacgccatactaaaagccaaaatggctgccccgaggaggcccgcaccgcgtagccagtgaaggttggggagcaagcttatgcgggaaagagggagggggactccaggaaaagccgttgagaggaccatcacaacctgagcagcacaggttccagttacagccatcccttgtcataacttttgaactgtatttggaaaaatactggccaggaaagaaaaatgataaaatttttcctcatggtgaataaacaagggcagactcgactttctaagtactatgaacatgtggatattaataagcgtacacttctggaaacagaagtcataaagagctgtctctctcgatccaatgaacaatgctctttcattgaatataaggattttaagctgatatatcggcagtatgcagctctcttcattgtggttggagttaatgacactgagaacgagatggctatttatgaattcattcataactttgtggaagttttagatgagtatttcagccgagtgagtgaattagatataatgtttaatttggataaagtacacatcattttggatgagatggtgttaaatggctgcattgtggaaactaacagggcaagaattcttgcccctctactaattcttgataagatgtcagaaagctgaaaggaagtctcttcgagacaatatggatttatcagaaatgcgagtaccgtggaatacatctcaacatgttaacccagaagaatctggaagaccacaattacaaaatggggtatccttccaaagacattataaataggcattttccacagttcctaaaaagaaaacacaactgtactttaaaatatgtacaaagaaaaaaatttctttaaactgagagagaagttttattttctaattgtaaacatatctgtcgcactttaaattctgttgagcacctaaggaacccttcttggtctatgcttcttttgcaaattgaattcaggaatagcaggatggtagtgggaagaaagtatggcagttttccgtcagccaataaagttttaaaatttaaacacaaaaaaaaaaaaaaaaaaaaaaaaaaaaaaaaaaaaaaaaaaaa

SEQ ID NO: 1223 - DNA, 5227 bp, HOMO SAPIENS
gctgttggctgggctcgggagggaacgctccaggtaaagcgctgggggaggaagcgacgccgaggagctacggtttcctccagaggtctccgcccctctgcccctatattcccagagctcgagtctgatccgggccttgccgggcaccctggaaaggcgggggtgatagtacagatggagacgcaactgcagagcattttcgaagaggtggtgaaaacggaagttatagaagaggcttttcctggcatgtttatggatactcctgaagatgagaaaacaaaactaattagctgtttgggggccttcagacagttttggggtggtctttctcaggagtctcatgaacagtgtatccagtggattgttaagtttattcatggtcagcatagtcctaaaagaatttcttttctttatgactgcttagcaatggcagttgagactggtctccttccacccaggctggtttgtgaatccctgataaactctgacactcttgagtgggaaagaacacagctttgggccttaacatttaaactggttcggaaaataattgggggagtggattacaagggtgttcgagatctcttaaaagtgattttggagaagattttgacaattcctaatacagtgagctctgctgttgtacagcagcttctggcagcaagagaggttatagcatatatcttggaaagaaatgcctgcttattaccagcctattttgcagtcactgagatcaggaaactgtatcctgaaggcaaacttccacactggttacttggaaacctagtatcagactttgtggataccttcaggcccacagcaaggataaactccatttgtggtcgctgtagtcttctgccagttgtaaataattcgggtgccatttgtaattcatggaaactggatcctgctactcttcgttttcctttgaaaggccttttgccatatgataaggatctgtttgaaccacagactgctttgttgagatatgtattggagcagccttattccagggatatggtctgcaatatgctaggtttaaataagcagcacaagcagcgctgccctgtgctggaggaccagttggtggatctggttgtttatgccatggagcgatctgagaccgaggagaagtttgacgatgggggaacaagccaactcctgtggcagcatctctcaagtcagctcattttctttgtgcttttccagtttgcaagttttccacatatggtgctttctcttcatcagaagttagcagggcgaggactgattaaaggcagagatcatcttatgtgggttctcctgcaattcatttctggaagtattcagaaaaatgcactagctgattttctccctgtgatgaagctcttcgacttgctatacccagaaaaagaatatatcccagttcctgatattaacaaaccccagtcaacccatgcctttgcaatgacctgtatttggattcatctcaatagaaaagctcaaaatgacaactccaagctacagattccaatacctcattccctaagacttcaccatgagttcctgcagcagagtctaagaaataaaagtttacagatgaatgactataagattgctctattgtgtaatgcatactctacaaattcagaatgttttacattacccatgggagctctggtagaaactatttatggaaatggaattatgaggatacctctccctggaacaaactgtatggcttcaggatctattacccccttacctatgaacctcctggattcactgacagttcatgccaaaatgagccttattcacagcattgcaaccagggtgataaaacttgctcatgcaaagtccagtgtggccttggctccagccctagtggaaacttacagtcgtttattggtctatatggaaatagagtctttgggcatcaaaggatttatcagtcagcttttgccaactgttttcaaatcacatgcatgggggatcttacacacactccttgagatgtttagctaccggatgcatcatattcagcctcattacagagttcagctcctgagtcatcttcatactttggctgcagttgcacaaacaaaccagaaccagctccatctttgtgtcgagagcactgctctcaggcttataacagcattaggtagctcagaggtacaaccgcagtttacacgcttccttagtgatcccaaaacagtgctctcagcagaatctgaagaactgaaccgagccttgatattgaccttggctagagcaactcatgtaacagatttttttacaggctctgattcaattcagggaacttggtgtaaagacatacttcagaccatcatgagtttcactcctcataattgggcttcacacaccctgagctgttttccaggcccactacaggcattcttcaaacaaaataatgtgcctcaggaaagccgttttaatctgaaaaaaaatgtggaggaggagtataggaagtggaagtcaatgagcaacgaaaacgacattattacccacttctctatgcagggctcccctcctctctttctttgtcttctctggaaaatgctcttggaaacagatcatattaatcagattggctatagagtattagagagaattggagccagggccttggtagcccatgtgaggacatttgcagatttcctggtatatgagttttctacatcagcagggggtcagcaactcaataaatgcattgaaattcttaatgacatggtatggaagtataacattgttacactggacagattaattctctgcctggccatgcgtagtcacgaaggaaatgaagcccaggtttgttatttcataattcagttgctgttactcaaaccaaacgattttagaaatcgagtaagtgactttgtgaaggaaaattccccagagcactggttacagaatgactggcacaccaagcacatgaattatcacaagaaatatccagagaagttgtattttgagggcctcgcggaacaggtggatcctcctgtacagatccagtctccctatctgcccatctattttgggaatgtgtgtcttcgattccttccagtatttgatatagtaatccacagatttttagagttgcttccggtatccaaatcactggagactctactggatcatctaggaggcttatataaatttcatgatcgtccagtgacttatctgtataacactctgcactattatgaaatgcacctgagagaccgcgcatttctcaaacgaaaactcgtccatgcgatcattggctctctgaaggataatcgaccgcagggctggtgtctaagtgacacttacctgaaatgcgctatgaatgcacgagaggaaaatccttgggttccagatgacacctactattgcagattgattggcagactagtcgatacgatggctggcaaatctcctggtccctttccaaactgtgactggagattcaatgagtttcccaacccagctgcccatgctctccatgttacttgtgtggagctcatggccttggcagtttcaggcaaagaagttgggaatgcccttctaaatgttgtcctaaaaagtcagcctttagtgccaagagagaacattacagcatggatgaatgcaattggtttgatcatcactgccctaccagagccatattggattgttcttcatgatcgaattgtgagtgtcatcagcagccccagcttgacgtctgaaacagagtgggttggctatccattccgcctctttgatttcactgcctgtcatcagtcctactctgagatgagttgtagctatacgttagctcttgcacatgctgtgtggcaccattctagcatcggacaactttctctcattccaaagtttcttactgaagtacttcttcctatagtgaagaccgaattccagttgctttatgtataccatcttgttggaccatttttacaaagatttcagcaagagagaactcgttgtatgatagagattggtgtggcgttttatgacatgctgctgaatgttgaccagtgtagcacccatttaaattacatggatcccatctgtgacttcctctatcacatgaagtatatgtttactggtgacagcgtgaaagagcaagtagagaagattatctgtaacttaaaaccagctttaaaacttcgtcttcgattcatcacacacattagcaagatggagccagctgcagtgcctccacaagccatgaacagtgggtctccagcacctcagtctaatcaggtgcccgtgtctttaccagtaactcagtgaagccagactgtactgtggagaaagtagaaatatatccgtctttgagagtggactcaaaccttttaaatctgaatgcgatcacactgtagtgatatagtagaagcagtgatgatattcagattgttttattttgattcaaatgatgaatctgttgacaccttataactcccatctccctatctatatttttgtctctaagagatcaagtaagatacatgttgttcatattcataacaacttattagagctatgtaggaacatagaggtatctgtgatcaaatgacttgtcattggcactttcagtctttcctattctagccgttgtttttgtttgtattttttattattaatgacatatttagtcttcagatatattattttaaaggcaccacacatgtaaaacagttattacaaatattttatacataaatctcttggtagattttcagaataatagagatttatatcaagaaaaggaatctagattttgttgcattgtaggagcaaacaaggcttcatattctttttaaaatgacttgaaattttattataaatttccatagtttctatcaaggtcaactggcagttttattacctttgctatggacttgaacttactgtataaaattagttggaagccatgtaagaaaataacatctgaaaattcttgaacttaaaatcatgcttaaatggttgattctccaatttctttttttaaaaataagttaattgcttttgcaggttgacactctcacctgacagatgatgtaattcttcaatttttataatcttaaaatttttaaattttatatttgtaaatacagtacacattttatttcttggattttgagagacattgttaattttgggggaattggcattgcgaaagacttgaaaactaatgagtaaagtctgctgaatgaataaaccgtgtgattgtttcccg

SEQ ID NO: 1224 - DNA, 3773 bp, HOMO SAPIENS
ccgtcccggggcggacgggcgcgggcgggaggatggagctgaactccctgctgatcctgctggaggcggccgagtacctggagcgcagggatcgagaggccgagcacggctacgcctcggtgctgcccttcgacggcgacttcgccagggagaaaacaaaggcggccggcctggtgcgcaaggccccgaacaacaggtcttcacacaacgagctagaaaagcacagacgagccaaactcaggctgtaccttgagcagctcaagcaactggtgcccctgggccccgacagcacccgccacaccacgctgagcctcctgaagcgggccaaggtgcacatcaagaaactggaggagcaggaccgccgggcactgagcatcaaggagcagctgcagcaggagcatcgtttcctgaagcggcgcctggagcagctgtcggtgcagagcgtggagcgcgtgcgcacagatagcacgggctctgctgtctccacggacgactcagagcaagaagtggacatagagggcatggagtttggccctggtgagctggacagtgttggcagcagcagtgacgcggacgaccactacagcctgcagagtggcaccggcggcgacagtggcttcgggccccactgccggcggctgggccgccccgccctctcgtaggcccgtgccctctgctccttggcctgcctgcccgccagccacgcgtgtcagccctccagttctccttcagttgacgccagcctctccacaggcccactgctgtgccattctggaagctccagctgctgctgggctgcctggcactgcccgcttgccggtcagggcctgccgagctgcctgccccttccagctgggcagagtcccctgcaaggaggcagggcccagcttccacatccggagccctggtcagcatagccgcccacggtctgttctcagattcctaatcattccagaagtattaaacgtcattgctgcaaacctcggcaggtgccgtgtgaggggcttaatgaccaccacagggagctcagaccccaaccctggatcccaggagaaaggagtggaccgaggaaggaaggaaggcaaggctgtctgtccatccgtccgtctgtccacctacctgtcagtccacataggctcctggcgtggacaaggggtctgtgaagggcgggaactgggtgagcacctggggcaggtgggtggttaaggtccttcccacttcgcaggtgtcagaacctagggctgggctctcggggccaggcaggccagcccagcccacgccgagctgggcagcgtctgctctggtaggactgtcagacgcacacgcgcacgcacctagacacacccactcatgtacatgctcacacatgcagacacacctgggcgtcccgaggtcacatgttctggggatgatggccttcaggggtcatctggcaaacagcccctgggctgtgcctggatccccctctagctcctgctcacccacgcccacccagtagtcctgcctgtctgcacaggagaggggcttctcttcctggctggggctggggtgaactggaggctggttaagttgcagccgctgggtcctcgggggcttactcatctcccttttttaaacaaaaagcaaaaaagtaaaatgctgcactgcccagcagcccggttagggctcctggagccaccttaggaaagggcttctcatgagctctgctgcggcagcttcagctggcagagaggctttcccagaaaaaaaaaaaaaaccatttttaaaaagaagaaagcctaaagactctcggcctagggacgtccgtgtgtgccgcctctgtttcctgtaccagatttttgtattctattttcctagctgttgttgcgtccttgtttgctgaggggtgggagccacccagcgtctcagggacctgtccctccgtcacgtcgtcaaagtgtgccttgtgtcttgtgtcaggccttgcccttcccaccagcatgtccctcgtggctcagggtgccccaggcctgcccagctagtgctgtcctcccatctcctgtgggcagcccctcccggcagccagggcttcctggaggcgatgcagccaggcccctgtgggtggcacggaggggctgtgacctggtccccagtgttgccctccccagtggctggcaggggcctgcttgctcactagagagatggattctcacctgtcacctgactcgagccccctgcttcctggcctaggcgagggttccaggtttcagacactggcagccaatgaagactgtgctcgctgggtggtgcaggcctggcaccaggaggcttgcacccgcctttccttcctgacgtcctctgtccttggggctggcccatagcagtgcctgccgtgcctctggtacatctgtagccaattcccatatcatggggaaaattcgtgtctattttcagtcgtacgcatagacgccccaggatggggggcccactgtggcggaagggggtccctggaaacaactctggcacagaacctgccctgcaggctgtagggggcatggtgcctggagctgaggggcatccgaacgcgttgcgggtggttgtgaggaggcctgtctgcatctccttccggccccactggggtccaggggtgcccagaaaggagcttcccctgcctgcctgagtctgtccccccaggcttcatttcaaacaccgtggcacctccgagcaaggcgggccgtgtgtaaaagcttgcttccccagccagcactgcagggccctgaggtggtcgtgtccctgccctcaattcttgaagcaccagctccctgccccaccctccagtgcctgaggcagctaggggcttctgctctcatctctgaccagcagaatccacccggtgaccagtggtggcccctcagcccaccctcccggcagctcagcctgtggctcttgaggccgtggttcccacgtggactgggaggcagtctcagccacccggggtgctgttcagctgcccctccctgccatcagcaggtgggtgaggggttgcccactgggtgggggcccgtgctaggagtcaccacatgctccaacctcccactgctccctgtcaggggcccaggctgccatcactggaggctgcagggaccaagaggccatcaccgtgtctatagagagcagacagaagcagaacagagcccggggctcctgagcctctgcgtgtgccctcccagcccacaccagtgctctcggccactgagcacccagactcaggcttgggttccccagccttattggaaggcagctcccgcataccaggataacccccgcaaaccacatagcagacccccgccatcctcgcagagtgggagaggctgcagcaaggctttgcctctgcagaccccatcttagtggcacggtgcttgggcctgtgtccccgggtggtggaaccctgtaccggtctgtggccctagggtccctgctctgtctgccccggcccgtgctgtccgctgggtgaggcaggctcccccgtgccctgcctccctctgtcagggaacctgggaccccctccccactgcctgcacagaggaccctgaccctcggccagcagggtggccccaggtccatgttgggcactagggcaggttccgtgccagagtcgggggccacacgagggcctggtgccggtgaggggggcgtgcgctagagggggaaaggggcccccggccacctgtccaccgtgtgggccgtgctgtgtccttatgtcattgtaatataaatacagatttttatatctc

SEQ ID NO: 1225 - DNA, 3995 bp, HOMO SAPIENS
ccccgccccgctcctctccggccgcgcagccgctgccgcccacccgcacccgccgtcatgctccgggccgcgctgcccgcgctcctgctgccgttgctgggcctcgccgctgctgccgtcgcggactgtccttcatctacttggattcagttccaagacagttgttacatttttctccaagaagccatcaaagtagaaagcatagaggatgtcagaaatcagtgtactgaccatggagcggacatgataagcatacataatgaagaagaaaatgcttttatactggatactttgaaaaagcaatggaaaggcccagatgatatcctactaggcatgttttatgacacagatgatgcgagtttcaagtggtttgataattcaaatatgacatttgataagtggacagaccaagatgatgatgaggatttagttgacacctgtgcttttctgcacatcaagacaggtgaatggaaaaaaggaaattgtgaagtttcttctgtggaaggaacactatgcaaaacagctatcccatacaaaaggaaatatttatcagataaccacattttaatatcagcattggtgattgctagcacggtaattttgacagttttgggagcaatcatttggttcctgtacaaaaaacattctgattctcgtttcaccacagttttttcaaccgcaccccaatcaccttataatgaagactgtgttttggtagttggagaagaaaatgaatatcctgttcaatttgactaagtttttggtaatcttgcactaagacatcaacaaaatgccctggcagagataacttgggaaagattttaatataaaacttgacattggatattagagctttaatggtattccttattccagtaacatttttatgtactcatctgctgtgaaaagtctttaggttcattaaaaaaacaggttttagaaatgatcttagatctaatatagtgattttaagcatcccgtcaaaggcagaatctgtcacttgaatgaaggaaagcttaaagcccaagcagataaaaataaaagcccagcctatttgtcttgcctgctgtatcttccctatttagttgacccactttagtttatatgtttattagtaaacatgaaatggggaataagtgattttaagtacatcccatacatttaaatatctttgataattgttatttttttggcagataattcctctagaatgtgtatctttttatgatttagatgaagaaaattttacaacttttaacaccccacaccaattttagtttcattacttttacacacaccattttatcacaaatgactcaagttttaatgaatgtttataaattatttgaaacaaaatatgatcgctgtgtccaggatggcatagagaaagctggcaattaggttaacacttacatattatagtgcccctttaaggatttctctcttgccaccataccttttgtactttcccctatacaagatgtatctcattctcctcaagcatttataaatttttccttcaatgacatgaaaactgtgcaagcaaaaaccgaagaaaaacacttaagtacaactgtagtgacagtgatcaaagttttcagtgcatttattgtacattttaagaaaaaggtgaaaatcatttggggagtaaaaaaatgaaaaagctgaaacgagtaattttcctcaccatcaataaaccaaaaacaggaaagataaagaatgtataaatttcacgtaaattagtcacgtatcacttatcaatggggatacgttctaagaaatgcatagttagggaatcttgtgtgaaaatcagcttgtatttacacaaacccagatggtagagcctattttgtcccaaacctacacagcatgttactgtgctgaatactgcagacaattgtaacacaatatttgtgtatctaaatatagaaaaggtacagtaaaaatatggtctactaaggaaacactgttctatatgtggtccattactgactgaagtatactgtctagaagtctgaggctcaaagaaaagtaatccctcttctgaatccacaccccatcaattatcttactttcttctggggagatagatagatatactatctcactagcttgactaatggcaacaaagttccagcttgtgtagtctctttttattgaccacatgaatcgaaaacactcatcacaattaatggcactatcattaatgagacatgagtaactaaaaagtgatagaaaactattaacagtgcggctacatggtactgaaaatgcaggcattacaccagctgttacacaagcacaagcatgctctgtaagagctttacatttctgagattttgtatagtgattgagatgtctattttattattgatagactattactaatgtcaatattgaacactaccctggaattcctgcctggttttcctacccaaattgtaccactccttgaagaactacaggcacagtaaaaaaaatatggcgtattatgtgaactaaaagagttctaaaggagttcttaaaggagtggtagaatttgggtaggaaagtgattaagtccaacttaaaaccaacagtctcaaacgtctacaactacaatgtccaatgagccactagccacatgaggctatttaagtaaatttagtttaaaatccagttttcgaattacattagccacattgtcaagtgttcaaatcacaggtggttagtggctactgtactgggcaacatacattatagaacattttcattataggaagttttattgggcagtgctgctcttaaatcctaccttccactcaactcccatacaactttcttttgtacattttgatactttctacctaatggcagctcttccaaaatagctgctttaaactctgatttaattttcaatatttggtttcatttttcaacaggccaagaggcctctggtaatgaagtgctatatatatatatatgatggagtctcactgtgctgcccaggctacagtgcagtggctcgatcttggctctctccaatctccgccttgcaggttttcaagcaattctcctgcctcagcctccttagtagctgggaccacagacatctgtcaccacacccagctaactttttgtatttttggtagagacggggtttcgccatattgactgggctggtctcaaactcctgacctcaagtgatccacccaccttggtctcccaaagtgctgggattacatgcgtgagccaccacacttggcctacattttttctttatataccagaacatctataacaggcaccttatctactcattagtgaagagataattggattacacaggcaggcttgtttactacatccagaatgtagaaactgctttcttcaacatcttggttctagctagtaataacaatataattctttggcagatattcagaataacattttaaactacattttcttagaaaattgcattcttgtagtgagcagtgtatggtctcttttgttcagaatttaaaactgataaccaatgaaagccttttctcttattcctctaccgtcatttacatgataatctgaagctaatatgacaatatttaaatactaagtggtactagggaactacaagaatactgtaaagcttaagccattgttatcactgtcatttagcatttaataacaaaactatacagaattatgtgcataccaatgaatgttttgtaccatctagttaaattttttaaataaagttttatgggttaagcagaagacaactgtcatactgaattttattaaaagtatatatacttcaaattcaaagcatcccttaggacccacagaatatattaaaactaccacccttaaattttatatttttgctttaagacagacaatgcaaaggtaactggcaagaggtgagcaaatgttttagaacatttatattattgcttaaaatgagatttgaaattgtaataaaattcttggttatgaaaaaaaaaaaaaaaaaa

SEQ ID NO: 1226 - DNA, 1153 bp, HOMO SAPIENS
gggcgggggagcggccggacgcgggcggggcgggcgcctggacgcgagcctagggcgcctcggtgcccagacggcggcggcgtggccgcacgcgcggcccggcttctgtcctcgcggcgctccggctcctggccccccacgccatgcagccgtccccgccgcccaccgagctggtgccgtcggagcgcgccgtggtgctgctgtcgtgcgcactctccgcgctcggctcgggcctgctggtggccacgcacgccctgtggcccgacctgcgcagccgggcacggcgcctgctgctcttcctgtcgctggccgacctgctctcggccgcctcctacttctacggagtgctgcagaacttcgcgggcccgtcgtgggactgcgtgctgcagggcgcgctgtccaccttcgccaacaccagctccttcttctggaccgtggccattgcgctctacttgtacctcagcatcgtccgcgccgcgcgcgggcctcgcacagatcgcctgctttgggccttccatgtcgtcagctggggggtcccgttggtcatcactgtggcagccgtcgccctgaagaagattggctatgacgcctcggacgtgtctgtgggctggtgctggatcgacctggaggccaaggaccatgtcctgtggatgctgctgacggggaagctgtgggagatgctggcatatgtgctgctgcctctgctgtacctcctggtccggaagcacatcaacagagcgcacacggcactctctgagtaccggcccatcctctcccaggagcaccgcctgctgcgccactcctccatggcggacaagaagctggtgctcatcccgctcatcttcatcggcctcagggtctggagcaccgtgcggttcgtgctgaccctctgtggctccccggccgtgcagacgccggtgctggtggttctgcatggtatcgggaacacgtttcagggaggtgccaactgcatcatgttcgtcctctgcacccgcgccgtccgaactcggctcttctctctctgttgctgctgctgctcttctcagcctcccaccaagagcccggctggcactcccaaggctcccgcgccttccaagccaggagaatctcaggaatcccaagggaccccaggggaacttccaagcacctgagc

SEQ ID NO: 1227 - DNA, 1764 bp, HOMO SAPIENS
gcaggtgccccgaaaagggggcggggtcaggggtgccctgaactccgaatgcgaagttctgtcttgtcatagccaagcacgctgcttcttggattgacctggcaggatggcgccaccaccagctagagtacatctaggtgcgttcctggcagtgactccgaatcccgggagcgcagcgagtgggacagaggcagccgcggccacacccagcaaagtgtggggctcttccgcggggaggattgaaccacgaggcgggggccgaggagcgctccctacctccatgggacagcacggacccagtgcccgggcccgggcagggcgcgccccaggacccaggccggcgcgggaagccagccctcggctccgggtccacaagaccttcaagtttgtcgtcgtcggggtcctgctgcaggtcgtacctagctcagctgcaaccatcaaacttcatgatcaatcaattggcacacagcaatgggaacatagccctttgggagagttgtgtccaccaggatctcatagatcagaacatcctggagcctgtaaccggtgcacagagggtgtgggttacaccaatgcttccaacaatttgtttgcttgcctcccatgtacagcttgtaaatcagatgaagaagagagaagtccctgcaccacgaccaggaacacagcatgtcagtgcaaaccaggaactttccggaatgacaattctgctgagatgtgccggaagtgcagcagagggtgccccagagggatggtcaaggtcaaggattgtacgccctggagtgacatcgagtgtgtccacaaagaatcaggcaatggacataatatatgggtgattttggttgtgactttggttgttccgttgctgttggtggctgtgctgattgtctgttgttgcatcggctcaggttgtggaggggaccccaagtgcatggacagggtgtgtttctggcgcttgggtctcctacgagggcctggggctgaggacaatgctcacaacgagattctgagcaacgcagactcgctgtccactttcgtctctgagcagcaaatggaaagccaggagccggcagatttgacaggtgtcactgtacagtccccaggggaggcacagtgtctgctgggaccggcagaagctgaagggtctcagaggaggaggctgctggttccagcaaatggtgctgaccccactgagactctgatgctgttctttgacaagtttgcaaacatcgtgccctttgactcctgggaccagctcatgaggcagctggacctcacgaaaaatgagatcgatgtggtcagagctggtacagcaggcccaggggatgccttgtatgcaatgctgatgaaatgggtcaacaaaactggacggaacgcctcgatccacaccctgctggatgccttggagaggatggaagagagacatgcaagagagaagattcaggacctcttggtggactctggaaagttcatctacttagaagatggcacaggctctgccgtgtccttggagtgaaagactctttttaccagaggtttcctcttaggtgttaggagttaatacatattaggttttttttttttttaacatgtatacaaagtaaattcttagccaggtgtagtggctcatgcctgtaatcccagcactttgggaggctgaggcgggtggatcacttgaggtcagaagttcaagaccagcctgaccaacatcgtgaaatgccgtctttacaaaaaaatacaaaaattaactggaaaaaaaaaaaaaaa

SEQ ID NO: 1228 - DNA, 613 bp, HOMO SAPIENS
ggagacctcaggcccagactccactccccagctgtgaaaggactgctggccagacccccaagctagcccgccaggcctccatagagctgcccagcatggctgcgtccagtaccaagagttggtgggagacgggtgaagtacaggctcagtctgcggccaagactccatcctgcaaggatattgtggctggagacatgagcaagaaaagcctctgggagcagaagggaggctccaagacctcatcaacaattaagactctttggcagttgcactgggtactggctgagttctggaaaacaggaatgtgagcagagtgctgcagatctccttgtcaggagcacctaagaactggcatgactctacaccctctctccttctgcaatgacctcgtgtcaagatggcagacctgcagagatgaatgtgcctggatacctgagtcaccaggtggaggaaactcccattgacatgcatcacactccacatatgaaacccttctttttctgcactgtcactggggttagggattattactcactgcaacttagcctagcattaagttgcttgactaatacaagtttcaataaatgtcgcttcatttcccatggaaaaaaaa

SEQ ID NO: 1229 - DNA, 1450 bp, HOMO SAPIENS
cggaagttctggactgcagttgagtggaaatgggcaacggcgggcggagcggcctgcagcaggggaaggggaacgtggatggggtggcagcgactcctactgctgcctcggcctcctgccagtacaggtgcatcgaatgcaaccaggaggccaaagagttgtaccgagactataaccacggtgtgctgaagataaccatctgtaaatcctgccagaaacctgtagacaaatatatcgagtatgatcctgttatcatcttgattaatgctatattgtgcaaagctcaggcctacagacatattcttttcaatactcaaataaatatccatggaaaactctgcatattttgtttgctttgtgaagcatacctgaggtggtggcagcttcaagattccaaccagaatactgcccctgatgacttgatcagatatgctaaggaatgggatttctatagaatgtttgcgattgctgctttagaacaaactgcctattttattggcatttttaccttcctgtgggtagaacggcccatgacggcaaaaaaaaagcccaacttcattttgctgctgaaagcattattattatctagctacggaaaactcttgctgattccagctgtcatttgggaacatgactacacatctgtgtgcctcaaactcattaaagtatttgttcttacatcaaattttcaggcaattagagtgaccctaaacatcaaccgtaagctctccttcttggccgtgttgagtggcttactgctggaaagcatcatggtctacttcttccagagtatggaatgggatgttggaagtgattatgccatctttaaatctcaggacttctgaagagttttattcttcttcactatctgtggcatgaccagctgtatctgaaagagaaaagacatgaaatataaaccaacctcctcatttctgttgagtaaaatgaagcaaagattggaaacactttctgaaaaagaaagcaatgataatagcggtggatacccacccccacaaatgcacccaagagacaagccatttacatacagatattcacagtcacacatagaaacacccacatggacacaaggaatgttgctgcagagactgaatgacatgcaacaggtgaaggtttatacgttatacacaaggccaggtaagcgctcataattcacacataataaaacatctaggtttcattcctttgacatgtttatatctttttaatttaaatgttgttactggcttaaaatattttgtgttcttacaatagaaacgcttttaataaagtctttcagaataaaccaagtttttgtaaattttcaattcaataattaaggtaatctttaaaattggatgatccaaaaataagtgataatgaaaaccactgagttatatactttgcaagggtaaattacatctgaataaagctgtaattaaaaacaaaaaaa

SEQ ID NO: 1230 - DNA, 5263 bp, HOMO SAPIENS
gagggcgcgcgttgaggcggctgcggcagttgcgcgctgggattgttgcggtgcgctggagccgaatacaaaatacagttaaaataaaatgtcaacctcctggagtgatcggttacagaatgcagcagatatgcctgctaacatggataagcatgccctgaaaaagtatcgtcgagaagcctatcatcgggtgtttgtgaaccgaagtttagcaatggaaaagataaagtgttttggttttgatatggattatacccttgctgtgtacaagtccccagagtatgagtcccttggttttgagcttactgtggagagattagtttctattggctatccccaggagttgctcagctttgcttatgattctacattccctaccaggggacttgtctttgacacactgtatggaaatcttttgaaagtcgatgcctatggaaacctcttggtctgtgcacatggatttaactttataaggggaccagaaactagagaacagtatccaaataaatttatccagcgagatgatactgaaagattttacattctgaacacactattcaacctaccagagacctacctgttggcctgcctagtagatttttttactaattgtcccagatataccagttgtgaaacaggatttaaagatggggacctcttcatgtcctaccggagtatgttccaggatgtaagagatgctgttgactgggttcattacaagggctcccttaaggaaaagacagttgaaaatcttgagaagtatgtagtcaaagatggaaaactgcctttgcttctgagccggatgaaggaagtagggaaagtatttcttgctaccaacagtgactataaatatacagataaaattatgacttacctgtttgacttcccacatggccccaagcctgggagctcccatcgaccatggcagtcctactttgacttgatcttggtggatgcacggaaaccactcttttttggagaaggcacagtactgcgtcaggtggatactaaaactggcaagctgaaaattggtacctacacagggcccctacagcatggtatcgtctactcaggaggttcttctgatacgatctgtgacctgttgggagccaagggaaaagacattttgtatattggagatcacatttttggggacattttaaaatcaaagaaacggcaagggtggcgaacttttttggtgattcctgaactcgcacaggagctacatgtctggactgacaagagttcacttttcgaagaacttcagagcttggatattttcttggctgaactctacaagcatcttgacagcagtagcaatgagcgtccagacatcagttccatccagagacgtattaagaaagtaactcatgacatggacatgtgctatgggatgatgggaagcctgtttcgcagtggctcccggcagaccctttttgccagtcaagtgatgcgttatgctgacctctatgcagcatctttcatcaacctgctgtattaccctttcagctacctcttcagggctgcccatgtcttgatgcctcatgaatcaacggtggagcacacacacgtagatatcaatgagatggagtctcctcttgccacccggaaccgcacatcagtggatttcaaagacactgactacaagcggcaccagctgacacggtcaattagtgagattaaacctcccaacctcttcccactggccccccaggaaattacacactgccatgacgaagatgatgatgaagaggaggaggaggaggaagaataaggaggaaaaccaaaaccccaagcacccattaaacaagtcctggcaggactcacaggaacaaacgaggtccctgttagggttctactcgggggagggagggggctccatgaaaggtacgtctgaaaagtttctgaagattttattatcatagatacttgttttggttttgtgtatctgtactctctgcagatggtccaaaattgtaatggagtctgtattagaagaaaataagggtaaaatcaggctgaactgcatgtatatggctccactgtggcttgtgacacttttaaaatcatccgtatgtcagtgtatctggatacacgaggaaaaggaaagagtctcagagtggaacaaagagtgggaagaggtgatctgtaatgttacaaattgtgctattactccaaggtccaacttttccagtgcattacatggtattgtatatcagtggagaaatgtattatttccatgatcaaatgtagtctctgttaaggtcaagttttcttttataagcctttaattcatcctcagtgactctggcaaggctgcttctctatcactggctttgcacagaagtatgctctacttgcgttgctttagggcaggattctattttgagggaaaagacagtatccttattaccttttgtttgtttaatagcacaaatgcttatttgttatccaaaaacaacctccttcttatctgtgataaatctatagaaagaatttagctgcaagtggacaaaggaacaagcccccagaaaagaaagggaagaactgccttcttatactacagaacatgcattagtgtgggctatatagctgtggctcatgctacccaattccagatttctttgtcctctaagagttgattgctgtatattaaaattgaacatcagaggatgggaagagggctctgtaagccagaaccttactaaagtagagggcacaatcagtgtgaataaattcacttcagaatctcaagtcaaggccaggcacggcggctcacgcctgtaatcccagcactttgggaggccgagacaggcggatcacctgaggtcgggagttcgagaccagccttaccaacatggagaaaccccatctctactaaaaatacaaaattacctgggcgtggtggtgcatgcctgtaatcccatcatctactcaggaggctgaggcaggagaattgcttgaacccaggaggcggaggttgcagtgagccaggattgtgccattgcactccagcctgggcaacaagaacaaaactccatctcaaaaaataaaaatcccaatcccaagtcgaaatcacctcttgttttaaacaagaatgaatcattactgtgtatgttagggtattaaaactgtttcaccagtacagtgaaagttgtttcaacattttaaacaaacagtggttatagactctttctttaaccattgtatattttcttccattcttgtcattggtcaataggggagggtagattagctgctccagaattcaataaagtgtaatatttctaacggtgactttgacctattctgtagtacaactgtaatagctattggtcttcaagtgggtttagatttggtgacatcagtttgatattctcttaaaggaaataaatattcaagaactgattatgttctaacatgattatattcatggtgttacataggcctcaattttttcacagaaagatttttggaacaggactgtgaagtgaggctttttaaaaaattattttataagcagagaacacagcctgataacttagtcaaggatatactgtctgtctcactactttggacttatatggcttcagattaagtcatccaagaaacatacatacattctaaatggtatatattgggaatatatgcccctttaaaagaatcaggtcagaaatgcaataacaattagactagactgttgcccgtgttaggagaatgtgtggtcatcctagttactaattactctcactcaagatggagatgttgtccagtttaacatagtcttaagttttcttaaacccaaataatttatgagtagcttattacatctgcagagctaccttattataatagtacatttacatattgtctcttttagagtaaggaccacatgattgctttgctttaatttaccactttttgtattgcatccatataagagtgtcttactagccagatgattccatggcaaatgattctctgggtccaaagatcggaaagtgaaaagcacacagctggaataagcaacaactccactgctagttacagctctccgtaggaccaccaaaacgtattcaagagctctaggattccataagacccagagcaaaatggtgcctctctgtatattattcttaagagtgtgctgggaagtcaatggtccatgggtaggcagggcagctgtaactgggctttttaaaacaaattatgagttttctctctgttgccagtagttaaggaagctgaacttaaaaggtatacttttttccttaaaaaaaaaaaaaaaaaaaaaaaaaaaaaaaatcctgcggagttttataccgtgagaagaccattctgccacttcttttgagaattttttcccaggcattttgaaaacactataggcattgtagaacaccaggcaaccccttcttggttgctagactgaactcccaaccttacagcatgtactgacaggtcccctagcctccccagcagttggtcagtggtacagcagacccaggccctgctgggtttccttgggcagaggaattgcccagtacattcattcatctctgcaaagatagatagtcagtgaaaactctgatggtgtacttcagaaaagttggtcacagccaagaaagtttagggttctatttagacctaagatttttctcttgccataagcatacctctgctgagacctaaaataataacgcaaacccttcaagctaccctaagatacttttagaagtcgtttttaatagaactacaaatccttaagtcacattagcattgttaagaaaccactttaaaaagccacatgcagttgcatgtcagatttagaagtattttgtccatgtttaggtatttctaaatcagatgtatttatttaagaaatactttgtcaacaactttaaagcccagcaatttttccaaggctgcctggtcattttaaaataaatactctgcttattcaccacgaatagcctgagacaactacatatttaagtctgtattagggtaggaaccttacccacattccatgttatggaaactatttaatctgtctttgatggtgggaaaaatggtaactatgatctagctattgccatacagttaacgctccaattcctcactgggcttagtagtttagggctcaaatacttatgtttctcatgatgatctttagtggtgatcagggaatccagcttttcttaaaagtttttcctcaaatagaacaatttcaaatgatacacaacttttgggaggccctgag

SEQ ID NO: 1231 - DNA, 1986 bp, HOMO SAPIENS
ccttacccggcgtgccccgcgcccggaggcgctgacgtggccgccgtcagagccgccatcttgtgggagcaaaaccaacgcctggctcggagcagcagcctctgaggtgagggcgaggggcgcgggccggtgtgggccgcagagacgttggagccggcgggggctggggactggcctcggggcgacttgaggtgtccctggccagtgtccttccacctgtccacaagcatggggaacatcttcgccaacctcttcaagggcctttttggcaaaaaagaaatgcgcatcctcatggtgggcctggatgctgcagggaagaccacgatcctctacaagcttaagctgggtgagatcgtgaccaccattcccaccataggcttcaacgtggaaaccgtggagtacaagaacatcagcttcactgtgtgggacgtgggtggccaggacaagatccggcccctgtggcgccactacttccagaacacacaaggcctgatcttcgtggtggacagcaatgacagagagcgtgtgaacgaggcccgtgaggagctcatgaggatgctggccgaggacgagctccgggatgctgtcctcctggtgttcgccaacaagcaggacctccccaacgccatgaatgcggccgagatcacagacaagctggggctgcactcactacgccacaggaactggtacattcaggccacctgcgccaccagcggcgacgggctctatgaaggactggactggctgtccaatcagctccggaaccagaagtgaacgcgacccccctccctctcactcctcttgccctctgctttactctcatgtggcaaacgtgcggctcgtggtgtgagtgccagaagctgcctccgtggtttggtcaccgtgtgcatcgcaccgtgctgtaaatgtggcagacgcagcctgcggccaggctttttatttaatgtaaatagtttttgtttccaatgaggcagtttctggtactcctatgcaatattactcagctttttttattgtaaaaagaaaaatcaactcactgttcagtgctgagaggggatgtaggcccatgggcacctggcctccaggagtcgctgtgttgggagagccggccacgcccttggctttagagctgtgttgaaatccattttggtggttggtttttaacccaaactcagtgcattttttaaaatagttaagaatccaagtcgagaacacttgaacacacagaagggagaccccgcctagcatagatttgcagttacggcctggatgccagtcgccagcccagctgttcccctcgggaacatgaggtggtggtggcgcagcagactgcgatcaattctgcatggtcacagtagagatccccgcaactcgcttgtccttgggtcaccctgcattccatagccatgtgcttgtccctgtgctcccacggttcccaggggccaggctgggagcccacagccaccccactatgccgcaggccgccctacccaccttcaggcagcctatgggacgcagggccccatctgtccctcggtcgccgtgtggccagagtgggtccgtcgtccccaacactcgtgctcgctcagacactttggcaggatgtctggggcctcaccagcaggagcgcgtgcaagccgggcaggcggtccacctagacccacagcccctcgggagcaccccacctctgtgtgtgatgtagctttctctccctcagcctgcaagggtccgatttgccatcgaaaaagacaacctctacttttttcttttgtattttgataaacactgaagctggagctgttaaatttatcttggggaaacctcagaactggtctatttggtgtcgtggaacctcttactgctttcaatacacgattagtaatcaactgttttgtatacttgttttcagttttcatttcgacaaacaagcactgtaattatagctattagaataaaatctcttaactatttcaaaaaaaaaaaaaa

SEQ ID NO: 1232 - DNA, 3189 bp, HOMO SAPIENS
ggcgtgagcggcgaaagccgggagggcgagcgagagagcaagcaggcagcaggctgccggcgggcgggcggacggcacagagggagggagcgagcgagcagtgagtaagccagcaagggcggtcgggtcccgaggtcagccgagatttctcaggtccctccggccccctccctggagtccacagcgcctccggtgtccagaggatcggacacggcccggcccggccatggcctcgttgctgaaggtggatcaggaagtgaagctcaaggttgattctttcagggagcggatcacaagtgaggcagaagacttggtggcaaattttttcccaaagaagttattagaacttgatagttttctgaaggaaccaatcttaaacatccatgacctaactcagatccactctgacatgaatctcccagtccctgaccccattcttctcaccaatagccatgatggactggatggtcccacttataagaagcgaaggttggatgagtgtgaagaagccttccaaggaaccaaggtgtttgtgatgcccaatgggatgctgaaaagcaaccagcagctggtggacattattgagaaagtgaaacctgagatccggctgttgattgagaaatgtaacacggtcaaaatgtgggtacagctcctgattcccaggatagaagatggaaacaactttggggtgtccattcaggaggaaacagttgcagagctaagaactgttgagagtgaagctgcatcttatctggaccagatttctagatattatattacaagagccaaattggtttctaaaatagctaaatatccccatgtggaggactatcgccgcaccgtgacagagattgatgagaaagaatatatcagccttcggctcatcatatcagagctgaggaatcaatatgtcactctacatgacatgatcctgaaaaatatcgagaagatcaaacggccccggagcagcaatgcagagactctgtactgaggccagggccagggccaggggactctgtgagtctggctcaagaccgacattgccttggtttgttacatgactatcgtgatggggaaactggctggaaatagtaatcacacctctctgtttttagttagagtctaatgaaactctcatctagttctgtgatgtgtttacctcttttttcaggcctcaggaactcttctatttccttccctaataccccacacccaacctgtcgtaatttctggagaactccaggtttgtgtgtgcaggatgttggcacaaaaatacctgtgttttcattctccccctctctccctcctgtgtcttgcgctttatgttttcttccgtttgataattagttggttaaaagctgagggaaccggaaggaaagtgctaggtgttttttaggaactagggtggcggggggacgaacttctcttcctcacatgaggttactgtttctttcctctgtggggcattggatcctcccacagttgccctggtgatgacttagggcttcccatctgtgtacatcccactttgaatcttgatcgtgacaagaaataccttaggccttcagtcaattccgaagctccttcagttgtttttataatgggcgttttcacatgcacatatgtgtatgcatgtatacgcccatacagacatgcacacacagactcctactccattagctaacataccctccctctccacaacccctgtcacatacctttcaggaggtgacagttgtcttagttgtcatctacccagacaaacgtcctgggcccgtcctccctcctgatactgtagcctcttggtacccagggtgagttggtggagaacagagagatgagaagcagagggcttggggaaagcctgttcctctctgactcagccctttttggcattattgcaagagcttgactcctggttgccttttcccagccagttttcagttggggtgaaggtttctgcaagtgtgaggtccagatgctgctgctcatgttgggctttccttttgggaactatttctctttatttatagtgtcgggcttccggggaaagcaatcattggtgtgtatgtgtatgtgcatgcacacacgtgcatatacacatttgtgtatgtggaaatgtgctgggcaagtcaaaactatagaagagttgcctcctgtctctcgaatcttccagagatatcacttaattgttaacagcttttgtgttaatccccttcagcccctagctcttttattctaccacggctggagagttgatacctgcagtcagcctgccagtgactcttagtgtctgtttctgacttatttttcctgtctctgtcttccaacccccaataatatttccaccggggatgcatcatttttactcccaatattctgtagagagggagtcaggatgctgtcttcccacgaatagtactcagtaacaaaccaattgcattttagttgggcagtgctcccacccaccctccagatcccttccagctaaaacccttcccccttccctccatgtgtttctcagtttcccgtttcgtttgttggactgttccactgcccctcctcctcaccctatcacccatggatcgtaatgtaaaattcttttaccatgtcaagaaattattaaaaatacaggtactttgacctctttctaaagccgcagaccctggtgcaatgctctggtggctagggatgtactcatgctcatatgtgtgcacgcttggacacccacctccatggacacctagccaccctgttgtgtgtccttatgccagttgagctgaatcttttccccagtatagtggaaagactgaggcttctgcctactgagcaaggttgggtgcttcatttgtgttcagtctgaattatgggaaagttagctcttcccagacctaagctgccttctctccctactttcagaagatcctagttccttccttcccgagtgatacccatgaactgccagtagaggctgctatcgttccatgtgtaaggaatgaactggttcaaggcgcgtcctacccagtcattttctttaccttatactaattcttcctgaataatgtcttcagtttcttgaggagactcctagttttggttttcaaattacttggagggctgcctaggaatctatctccctctgaaataaagtttcctcatcttccaccttgcaaaaaaaaaaaaaaaaaa

SEQ ID NO: 1233 - DNA, 1249 bp, HOMO SAPIENS
cgcgaaaagccgggactggacctcgcggagttgtgcttgtcgccgaagcggggtgggcttgttcgttccgcgcagccgcagccagaaccgggtgacgcttatccccgctgtctttccagtccagggccgctgagagtgggggtggctgggagcagcgcagcctccggaggaggaggcggaggccgaggaccaggaatcaccttcaagcctatgtcgtgaggctttggcagaaattaagaaggaaatatctccattgttcattggcatggaaaaatgttcagtgggaggattagagttgactgaacagactcctgctttattagggaatatggccatggcaactagtctcatggacataggggattcatttggtcatccagcttgtcctttagtcagtagatctaggaactcaccagtggaagatgatgatgatgatgatgatgttgtgtttattgaatctatacaacctccttcaatttctgctccagcaatagctgatcaaagaaacttcatatttgcatcatcaaaaaatgaaaagcctcaaggaaattattctgtaattcctccttcttcaagagatttggcatctcagaaaggaaatataagtgagacaattgttattgatgatgaagaggacatagaaacaaatggaggagcagagaaaaagtcttcctgttttatcgaatggggacttcctggaactaaaaacaaaaccaacgatttggatttctccacttccagtctttcaagaagtaagaccaagactggagtaagaccttttaaccctggtagaatgaatgtggcaggagacttatttcagaatggagaatttgcaactcatcatagtcctgagatgcatctacaaagaaggctaatgtcattcttccagtagaatcaagcaaatccttccaagaattttatagtacatcttgtttgtctccctgtgaaaacaactggaatcttaaaaaaggagtttttaataagtcaagatgtacaatttgtagtaaattagcagaggtctggatttttatacctaagttgttgtttaggctaacagtgataattttaacttttaagtgctattatgtactctttcatctacataatgcacgtgttctggatgtataacatgaagctgaaaggaagaataaggatatgttagaactatcttatgggatattttataaataaaattccatttgcatagcatggaaagtacaaaaaaaaaaaaaaaaaaaaaaaaaaaaaa

SEQ ID NO: 1234 - DNA, 2317 bp, HOMO SAPIENS
gagcctgggcagtgcacggggcctgggtggggggtgcgggtgtgggtggggacctgcggccttcgagtccgcggccttcgagtcctggggcggcggcggcggctgcaggcacgggcacgggcacggggcggggtgcttagggtgcaggaggcgcgcgcctagcggcggagtgtggcgtgaggccgggcccgcgccgccatgaacctagagcggctgcggaagcgcgtccggcagtacctcgaccagcaacagtatcaaagtgctctattttgggcagataaagtagcttcactctctcgtgaagaaccccaggacatctattggttggctcagtgtctttacctgacagcacaatatcacagagccgcccatgcacttcggtcacgaaaactggacaaattgtatgaagcatgtcgttaccttgcagctaggtgccattatgctgcaaaagagcaccagcaggcccttgatgttcttgacatggaagagcccatcaataaaagattatttgaaaaatacttgaaggacgaaagtggcttcaaagatccttccagcgactgggaaatgtcacagtcttcaataaagagttctatctgtcttctacgcgggaaaatctatgatgctctagataaccgaaccctggctacctacagctacaaagaagctttgaagcttgatgtctactgttttgaagcgttcgatcttttaacatcacatcacatgctgacagcacaagaagaaaaagaacttcttgaatcactaccccttagcaagctgtgtaatgaagaacaggaattgctgcgttttctatttgagaacaaattgaaaaaatataataagcctagtgaaacggtcatccctgaatctgtagatggcttgcaagagaatctggatgtggtagtgtctttagctgagagacattattataactgtgattttaaaatgtgctacaagcttacttctgtagtaatggagaaagatcctttccatgcaagttgtttacctgtacatatagggacgcttgtagagctgaataaagccaatgaacttttctatctttctcataaactggtggatttatatcctagtaatcctgtgtcttggtttgcagtgggatgttactatctcatggtcggtcataaaaatgaacatgccagaagatatctcagcaaagccacaacacttgagaaaacctatggacctgcatggatagcctatggacattcatttgcggtggagagtgagcacgaccaagcgatggctgcttacttcacagcagcacagctgatgaaagggtgtcatttgcctatgctgtatattggattagaatatggtttgaccaataactcaaaactagctgaaaggttcttcagccaagctctgagcattgcaccggaagacccttttgttatgcatgaggtcggcgtggttgcatttcagaatggagaatggaaaacagccgaaaaatggtttcttgatgctttggaaaaaattaaagcaattgggaacgaggtaacagttgacaaatgggaacctttgttgaacaacttggggcatgtctgcagaaaacttaaaaagtatgctgaggccttggattaccaccgtcaggcactggtgttgattcctcagaacgcatccacctactctgctattggatatatccacagtctgatgggcaactttgaaaatgctgtggactacttccacacagcccttggtcttaggcgagatgatacattttctgttacaatgcttggtcattgcatcgaaatgtacattggtgattctgaagcttatattggagcagacattaaagacaaattaaaatgttatgactttgatgtgcatacaatgaagacactaaaaaacattatttcacctccgtgggatttcagggaatttgaagtagaaaaacagactgcagaagaaacggggcttacgccattggaaacctcaaggaaaactccagattccagaccttccttggaagaaacctttgaaattgaaatgaatgaaagtgacatgatgttagagacatctatgtcagaccacagcacgtgactccagtcagtggtcctggtcccactgtcccagtgtaggttagtattccttcacatcctctccatggcttaagaatgtcccacttcctaacgtgactccaaactgcatctctacatttaggaacagagacccgccttaagagactggatcgcacacctttgcaacagatgtgttctgattctctgaacctacaaaatagttatacatagtggaataaagaaggtaaaccatcaaaaaaaaaaaaaaaaaaaaaaaa

SEQ ID NO: 1235 - DNA, 2440 bp, HOMO SAPIENS
acggacctgcgctggaggcttcatctttgccgccgctgccgtcgccttcctgggattggagtctcgagctttcttcgttcgttcgtcggcgggttcgcgcccttctcgcgcctcggggctgcgaggctggggaaggggttggagggggctgttgatcgccgcgtttaagttgcgctcggggcggccatgtcggccggcgaggtcgagcgcctagtgtcggagctgagcggcgggaccggaggggatgaggaggaagagtggctctatggcgatgaaaatgaagttgaaaggccagaagaagaaaatgccagtgctaatcctccatctggaattgaagatgaaactgctgaaaatggtgtaccaaaaccgaaagtgactgagaccgaagatgatagtgatagtgacagcgatgatgatgaagatgatgttcatgtcactataggagacattaaaacgggagcaccacagtatgggagttatggtacagcacctgtaaatcttaacatcaagacagggggaagagtttatggaactacagggacaaaagtcaaaggagtagaccttgatgcacctggaagcattaatggagttccactcttagaggtagatttggattcttttgaagataaaccatggcgtaaacctggtgctgatctttctgattattttaattatgggtttaatgaagatacctggaaagcttactgtgaaaaacaaaagaggatacgaatgggacttgaagttataccagtaacctctactacaaataaaattacggccgaagactgtactatggaagttacaccaggtgcagagatccaagatggcagattcaatctttttaaggtacagcagggaagaactggaaactcagagaaagaaactgcccttccatctacaaaagctgagtttacttctcctccttctttgttcaagactgggcttccaccgagcagaaacagcacttcttctcagtctcagacaagtactgcctccagaaaagccaattcaagcgttgggaagtggcaggatcgatatgggagggccgaatcacctgatctaaggagattacctggggcaattgatgttatcggtcagactataactatcagccgagtagaaggcaggcgacgggcaaatgagaacagcaacatacaggtcctttctgaaagatctgctactgaagtagacaacaattttagcaaaccacctccgtttttccctccaggagctcctcccactcaccttccacctcctccatttcttccacctcctccgactgtcagcactgctccacctctgattccaccaccgggtattccaataactgtaccacctccaggttttcctcctccaccaggcgctccacctccatctcttataccaacaatagaaagtggacattcctctggttatgatagtcgttctgcacgtgcatttccatatggcaatgttgcctttccccatcttcctggttctgctccttcgtggcctagtcttgtggacaccagcaagcagtgggactattatgccagaagagagaaagaccgagatagagagagagacagagacagagagcgagaccgtgatcgggacagagaaagagaacgcaccagagagagagagagggagcgtgatcacagtcctacaccaagtgttttcaacagcgatgaagaacgatacagatacagggaatatgcagaaagaggttatgagcgtcacagagcaagtcgagaaaaagaagaacgacatagagaaagacgacacagggagaaagaggaaaccagacataagtcttctcgaagtaatagtagacgtcgccatgaaagtgaagaaggagatagtcacaggagacacaaacacaaaaaatctaaaagaagcaaagaaggaaaagaagcgggcagtgagcctgcccctgaacaggagagcaccgaagctacacctgcagaataggcatggttttggccttttgtgtatattagtaccagaagtagatactataaatcttgttatttttctggataatgtttaagaaatttaccttaaatcttgttctgtttgttagtatgaaaagttaactttttttccaaaataaaagagtgaatttttcatgttaagttaaaaatctttgtcttgtactatttcaaaaataaaaagacagcaatgactttatatccaagaaaggaatgtgaatgagtcacttaacagggaatctaaagagctgtgttagctgtgtacatacacagattatctgagaaaaggtcaagggttccacttgggccacagtttttttgttaatcaaacaccactctcttaagaggctgcatcacaaaaggcaacaaagggcccctctaaggcttgagattaaaactagtctttatcattactgctgtgacactcttgcttagtatattaagagactcatacatttttgatatca

SEQ ID NO: 1236 - DNA, 375 bp, HOMO SAPIENS
aacatctgaggctgcgcaatctctaaggaaaagaggtttatttggctcactgctctgtgggctgtacaagaagcatggcaccagcatctgctcctggtgagaggctcaggctgcttccactcatggcagaagcttgctctggctaacaaccactatcatcaaagttgtctgaggaagacctcctgttgctgtgactgacgggactcttggtggaagccctattcccatgtgcccatggctgcagctccccaaggaagcaggacattgttggattctctaagaagctcagaggaagttacttctcactgtggtgccatatgggatttgaagtcgttctactcatgctctgtttttcaataaagctgcttctgcctc

SEQ ID NO: 1237 - DNA, 289 bp, HOMO SAPIENS
gaatggtttagggatcagatttttgtttttgtttttatctgcatggccagatttgacgctagaagagctggataaagactctagattaagaagggctttgtattctatactaaggaatatcagctctatgccaagagtttttaagggtaatggtaaagtgggcaagtgagagtaggggtaccatatgccctcctaggaaaaaatatcaagccttatgagggtgagaggcaggttttatgaaagtgtgcatgtttcctcttctccaaggagttcagatatggtccctccc

SEQ ID NO: 1238 - DNA, 4382 bp, HOMO SAPIENS
cggcagctgcagcgggtcgcacggctccggcccatctcggggggcgggcgggggaggcgaggtgcgcgagccgagtccggggcacgatgtccgacgcgggcggcggaaagaagccgcctgtggacccgcaggcaggacccggtccggggccggggcgcgcagctggggaaaggggcctgtcggggtccttccccctggtcctgaagaagctgatggagaaccccccgcgcgaggcgcgcctcgataaggaaaaggggaaggaaaagctggaggaggacgaggccgcagccgccagcaccatggctgtctcagcctccctcatgccacccatctgggacaagaccatcccatatgatggcgaatctttccacctggagtacatggacctggatgagttcctgctggagaatggcatccccgccagccccacccacctggcccacaacctgctgctgcctgtagcagagctagaagggaaggagtctgccagctcttccacagcatccccaccatcctcctccactgccatctttcagccctctgaaaccgtgtccagcacagaatcttccctggagaaggagagggagactcccagtcccatcgaccccaattgtgtggaagtggatgtgaacttcaatccggaccccgccgacctggtgctctccagtgtgccaggcggggagctcttcaaccctcggaagcacaagtttgctgaggaggacctgaagccccagcctatgatcaaaaaggccaagaaggtctttgtccccgacgagcagaaggatgaaaagtactggacaagacgcaagaagaacaacgtggcagctaaacggtcacgggatgcccggcgcctgaaagagaatcagatcaccatccgggcagccttcctggagaaggagaacacagccctgcggacggaggtggccgagctacgcaaggaggtgggcaagtgcaagaccatcgtgtccaagtatgagaccaaatacgggcccttgtaacccgtgccccccgcccgggcggggtactgcctgcacctcagacctctgcctgggggctccctgtaacccctcacacgcgtggagacttatgactcgtcgtgggcgcatggcggcgcacctgctgcaggagcggccacgtctcagcttcattataccatggcctgcgcacgtggcgacgtccctgaggggccagtctcctcactggtggggaacgcaagagaatctgcgtagatgggtgactcagccttagtttctattcttggatgtcccagttgaatcagaaggggacctctggagtacacacctctctcctgggcgctcagggtccctggactctccctcagtctccagcctgggctgccgagggctatctctgcagaatgagttgtgatcattgtcaccctatgtcttctcaggtagcagggcgcgtttccacttaaggtgtgtctgtcacgcacctcattctccccagacagtctttgagtaacatctgttcccatcttccttggaagcaggacacaccagctcctccgtcagtgtctgcatgggtagcaggctgcaggagtggggtctctgcacagcctgggatggggcttggggctggggcctgcagcagaagtgtgcccagcgtttctcggctcccgcaccccttttcccttatggctctgaggccatcggctgtctctgcatttcattggctgtggaggagagactcctaggatggctgctgtctgagccatgagtgccagggctgagagaggcctcttcatttcctctccaggctactcagaggccatgtgaagctcgtttgtcccactagaccaggcctctgggcctgctctttctttccacccaatgtccagtcttggatcatagatttaaaaggaaaacccctcttatctaggaggctttaacttcctggaccccaggattcaccttcctagtggtgtttagaaaatgcctccacagcccccttccaccatgggcatgagagctggggtgtgtttcttgagaagctcccttttttcttgctctgctcaccggtgtggcctgggctggagtgcactctccctgggggcagctggggcctcgcaattcttgcttcaggatctctcccatgcgagctgcccggagggtgtcagcagggcaagacacctagtctagagtcaccaaggtcacagtgccactttcacgggatagcaggctcttgggacttttacacaggcctagggtcccctcagtcttggtcccaggagatgggggccactcgtgaggctggccatgctgtggcttctcacagctgtggtctcccctgcctcacaacgactcctttctcttgtgtggcgggactcgcccttttgctgtgctcagaagattcactgaggaaactcatggaagcctctgctcatttgggtcactgggacacccctgagatgggtgtgtttatttgctcagggcgggcagcctatggtgaagaggagacagaggcgatgggcgtgcttcgtcctccgtaacactggctttatttaccgtggtggttcagagtcccaggccctgacctctaaagacttttcataacagacgttaagaccaagccgtggacctcaccccaggggaatgccacggccctttggggacctgcacacccacctctccgggggacttgacaaggggccctgaggccaagggaggtcactcctccctccaggcccctgacttttactttgtggttctctaaaaaccatgtacacactttcactctattgtaaccacacagggcaggcgcatccagcatgtcagtgtcctgccccgggcagctctccctcccgggcacgctccctctggcctggtggatcaccaagagggcggttctcattttgttattagtggaagagccttgagcttaaaagctcttcattttctttgccggaaagtatatggtttgtgtttttgcagttttatttttttaaggatggacactaaatctctggtgtccatgttccgagcccggtggctgggatggtggctcgatgtgtctcctctttatcccgccctctgcctgtttggtgccctcccttctttcccccaggcagtgggtatcgggttctttcccaaagtgcttacttggaaagagtgtggctgctggactcttttcgaaatgcccctctgagtcaggagcctggtggggacaagatggaggatgtccacagaggctgacctgtgggggaaaagaagtgctcaggtaaggttgtctcctctcctgtcctaaaaaaatccatgcttgcaggagagggttggtgcctgctcagtttctgtcgagggaatgggagtctcctcggctccctcctgggccctctgcttcttggaggccgaccgctggagactgcggctcctgtgcttggatctttgacatctgtcagtcactggaggctagagaagttgactttaccttggctttctgtgggttcccgatgggcttggaagtgccgtctacttcctaagcatcctgtctaaagctttgtggcaccctcagtgcaacctcagaacagacaaatcatgaatgagctggaactttgcaagaatattcatattataaatgtctcatctgatggaggaacgtgtgcatttagagagagggagagttttcaaggtttatggcaactttgtggaggacctgggtaactcttacccttggccaaaggaagaggttttcctgtctggcttctgaggttggagggggcacttagcagtgaaccttaagtctgggtacatgtaaccctgctgaggggctgtgcaggccgctcctacggtcctttggcctgaggcagggcgggaggcatgcaagccagtgggggaaaacccctctgaagctgggcagccctctacctgggccccgggagccgtgctccttggaacgcaaagggccgaggagcatctggttttcatggcaaagctctactccagagctcctttaacatctgctaattaagtgcaataaatttttctagaaaatggcaaagatgacttccaggtggatattgctctcttacggtgttggggatgccagaacaccacttggttttatttttctaagtgcatgtgatgtgatagagtgtgtggggctctgtgtccttccctgggagctggcattccagcgggcccctctctttacctttgttgggggaaggaggcaagagagaaattccttcttcccagccagagagggcagaagcagaccgtagcccattggccttatgtgcgtgtgtgcgtgcgagtgtgtcactgctggtgggccggagtgatgtggtgggagggaagccgggaatgtatccttttcagacaaaattaaatattttgaaatgagaaaaaaaaaaaaaaaaaaaa

SEQ ID NO: 1239 - DNA, 3226 bp, HOMO SAPIENS
aggaatggggcggggactaggccttcgcctcggcggcagaggagactcgggggccattttgtgaagagacgaagactgagcggttgtggccgcgttgccgacctccagcagcagtcggcttctctacgcagaacccgggagtaggagactcagaatcgaatctcttctccctccccttcttgttttcggctttgtgagaaaccttaccatcaaacacgatggccagcaacgttaccaacaagacagatcctcgctccatgaactcccgtgtattcattgggaatctcaacactcttgtggtcaagaaatctgatgtggaggcaatcttttcgaagtatggcaaaattgtgggctgctctgttcataagggctttgccttcgttcagtatgttaatgagagaaatgcccgggctgctgtagcaggagaggatggcagaatgattgctggccaggttttagatattaacctggctgcagagccaaaagtgaaccgaggaaaagcaggtgtgaaacgatctgcagcggagatgtacgggtcagtaacagaacacccttctccgtcccctctactcagctcctcttttgacttggactatgactttcaacgggactattatgataggatgtacagttacccagcacgtgtacctcctcctcctcctattgctcgggctgtagtgccctcgaaacgtcagcgtgtatcaggaaacacttcacgaaggggcaaaagtggcttcaattctaagagtggacagcggggatcttccaagtctggaaagttgaaaggagatgaccttcaggccattaagaaggagctgacccagataaaacaaaaagtggattctctcctggaaaacctggaaaaaattgaaaaggaacagagcaaacaagcagtagagatgaagaatgataagtcagaagaggagcagagcagcagctccgtgaagaaagatgagactaatgtgaagatggagtctgaggggggtgcagatgactctgctgaggagggggacctactggatgatgatgataatgaagatcggggggatgaccagctggagttgatcaaggatgatgaaaaagaggctgaggaaggagaggatgacagagacagcgccaatggcgaggatgactcttaagcacatagtggggtttagaaatcttatcccattatttctttacctaggcgcttgtctaagatcaaatttttcaccagatcctctcccctagtatcttcagcacatgctcactgttctccccatccttgtccttcccatgttcattaattcatattgccccgcgcctagtcccattttcacttcctttgacgctcctagtagttttgttaagtcttaccctgtaatttttgcttttaattttgatacctctttatgacttaacaataaaaaggatgtatggtttttatcaactgtctccaaaataatctcttgttatgcagggagtacagttcttttcattcatacataagttcagtagttgcttccctaactgcaaaggcaatctcatttagttgagtagctcttgaaagcagctttgagttagaagtatgtgtgttacaccctcacattagtgtgctgtgtggggcagttcaacacaaatgtaacaatgtatttttgtgaatgagagttggcatgtcaaatgcatcctctagaaaaataattagtgttatagtcttaagatttgttttctaaagttgatactgtgggttatttttgtgaacagcctgatgtttgggaccttttttcctcaaaataaacaagtccttattaaaccaggaatttggagaaaaaaaaaaccctggttttttatttttgtattttattattgtttacttcaaactttgttttacagcgtcctccacaaaacctctagaatgcactagatatatttttcttggagtcataatcatgatgcataccaacacaacactactcaaattatatttcattgagatgcatgttgcattgaggagtcaacttgacatagagtggagactttttcaaaatggcttttacatcctaatgaaagtttgggaagtatatcctctctgccttttcatcagtgctttgtggtccagctggcaccctttctgaggtttgtgttttgtgctaaatggttttgtccttaaataggagaggctcaaaaacatcaagatttcaggaaaatggcgacagctgcataatggaacccccctgcttctattttgttcttttaattactatttatagccccagttaccttctgaattctgaagtgtatatacctccatgttcctgaaaacaagaaaactcttacttcctgatattccatagactgccttcccaggtgattgagaacatagagaatgttacacatttattttactctaaatgatcttttacccctgttagctaatctttgtgttttcctcaactttattaattacagtgattgcatttttagcatccagttgtaagatgaatatattaaacagctaccagtgttggtgatacctcatccttgaaaggcttagttcatttgtgttttatacttcagtttttccagcatagcagaaaatgccgcttataatttttgtgcacacaaaccttggattcccctgtaaagttgctattgtttcatagcatgcggcactggccttttttcatcctactcattacaggcaaaactcatgtcttatttatgaggattttatagatcattttctgtaacaggtgacaaaagcagaaaagaatgaagaggctgaagtatgaactacccttggagcccatatacatgatataggcaatttcttttgtatgttaattcagtcaaaaatactacccacttgatgttttctaatctgatgtgagctcatgttacacagacttttagtaagtaacccgtgactagaaaataaactggatgcttaggagagagtgtcagatgtataagatgctaataaaacctgtttaatattattgttagctgtaagtttttgggaaatactgaacaaattagtccacaatcaagtgtctacttttcccttcactgtagggcctctccctgcacagagcagtctgtttagctgtgaacaccacaatctgcagatgttcaagtcccttacataaaatggcatagtatttatatgtaacctatgcatattctcctgtatattttaaatcatctctacattaaaatacctgataaaatgtaaatggtatgtaaa

SEQ ID NO: 1240 - DNA, 4128 bp, HOMO SAPIENS
gtttccggggcgcgccgcggaacccggaagtggtcacggaactcggctgcggctccatggtctgagttgtcagccgttgttttttcgtgctcgctagtcgccgccgccgctccgccatggggaagcgacagcaccaaaaggacaaaatgtacattacctgtgctgaatacactcacttttatggtggcaagaagccagatctcccacaaacaaattttcgtcgtttaccttttgaccactgcagtctctctctgcagccctttgtctacccagtctgcactcccgatggcatcgtctttgacttactgaacattgttccatggcttaagaagtacgggaccaaccccagcaatggagagaagctggacgggaggtccctgatcaagctgaacttttccaagaacagtgaggggaagtaccactgcccagtgctgtttaccgtgttcaccaacaacacccacatcgtggctgtgaggacgaccggcaacgtctacgcctatgaggcagtggaacagctaaatatcaaggccaagaacttccgggacctgctgaccgacgagcccttctcccggcaggacatcatcaccctccaggaccccaccaatttggacaagttcaatgtctctaacttctatcatgtgaagaataacatgaaaataatagacccagatgaagagaaggccaaacaggacccgtcttattatctgaaaaatacaaatgccgagacccgagagaccctgcaggagctctacaaggagttcaaaggggacgagattctggcagccaccatgaaggccccggagaagaagaaagtggacaagctgaacgctgcccactattccacagggaaggtcagcgcttccttcacctccaccgcgatggtcccggagaccacacatgaagcagctgccatcgacgaggatgtgctgcgctaccagtttgtgaagaagaagggctacgtgcggctgcacaccaacaagggcgacctcaacctggagctgcactgcgacctgacaccaaaaacctgcgaaaacttcatcaggctttgcaagaagcattattacgatggcaccatcttccacagatccatccggaactttgtgatccaagggggcgaccccacaggcacaggcacgggtggggagtcatactgggggaagcccttcaaagacgagttccggcccaacctctcgcacacgggccgcggcatcctcagcatggccaactccgggcccaacagcaacaggtctcaattcttcatcacgtttcgctcctgtgcctacctggacaagaagcataccatctttggacgggttgttgggggctttgacgtactgacagccatggagaatgtggagagtgaccccaaaactgaccgccctaaggaggagatccgcattgatgccactacagtgttcgtggacccctatgaggaggccgatgcccagattgcgcaggagcggaagacacagctcaaggtagccccggagaccaaagtgaagagcagccagccccaggcagggagccagggcccccagaccttccgccagggcgtgggcaagtacatcaacccagcagccacgaagcgagcagcagaggaagagccctcaaccagtgccactgtccccatgtccaagaagaagcccagtcggggttttggggacttcagctcctggtagcagcaggttggccgctgtggaccttggtggggttgcagggctgggggcccatgtccacatctccatttccagcctttctagcctgccctctgctgccagccaataaattgcttgcctgctgcctgcatcccctttcctggcccctgggagcccacagccttcccatcccttaacctgttgccaagggccttggccctgtttccaggacctggcccagccagagcccactgctgggaccttcaagcacaaggcctgccctacacccaggctggtgcctcaggcctctcctctagtaggcaggccaggttagtgaggaaggactgtgtctccagattgtggtttcctctttaagacagggtcttgctctgttgcccaggctccagtgcagtggtgtgatcatggctcactgcagcctcgacctcctgggctcaagcaatcctcctgcctcagcctcgcaagtagctgggactacagccgtgcaccactacatccagctgtatatgtctggttttcttacccctacttctgtcatcttctcagggacagcctatttatacaaccagtgtggtcccctgaccaacgccattacctgggacaagttttcagaccccagacttactgagcctaagcctctgcagggtgggcttctcggtctgttttgacaaaacttcaggggcttctgaaggctggtgttggacggcagcattgagtttcctgccgtgccctgcctgagctctcagggccctgctcacctgctctggctgtgaaccacctgggcttcatctcaagcctgcctggcgtctctgtgcccctgtgagaatcttgaggggacccacactgggttgaggccagtgtctcctgctgtgagaacaagtggatgtccctctccccgccctcctgctgaagtggccttgctgctctcaggcccggccactgggctccaagactctgctcctcctgtcagtcactgactctgatggccttgggccggctgcatcagcagcccttaaagaaagacccctccctcaacccccatttttctgttaaatgtgcccctggctggctttttcttcgtcttcagcccaggccagtggtcagtgttctcatgtcatggactctccttgcctgacacttgcctcttgggctccctgttgccctcaggccaccccccacttctagttcttcacactaagccctaacttaggccttgttcttggttttctcatttttgttgccccaaatcttgaacctgtcagcaacttgcaggctgtacctctgcccttccttttctcatcaatcactgatgctgaagctgcaggcctgagccctttgtctccctggatgctgggtggcgcctcatctgcatctctgcctcaccccatccactgccacaggctgcctgatgaccactagaggtatgtctgcccctcgtcaccctgctgcacaccaatctgtggcccttcatcatgctaagaacaagaactgcgccatggctggctccttctcttctccagcccatccctctgcagcctgtcatccctgtctgtgaccattggtcgggcccctgggctctagagtgacttttgacgccctccatccctcccgccaggcactgtcctccgcaaggcctggtgcagccctggcagtaactggcttgtaagaggctcagacaccaagctgggcctgcagaggaggggcacagtaggacacagtgactgcccaggtgtccacacacctgtaggcctctgagccagcgtccagggtacaggtgcgggtggtggggatgaaggcctgaccagggagggagaagcaggtttggagaggaccctgtgcccaccctgacagacaccctggctggccctgactgactgtattctctggccacattcaagtcccccattggtgggggcagagaagtaggaccaggccatccttggctccagagctcgaagaccccaagacagccctctgctctcagcggcgccacagagagcctgggctcagccttctgcatcaggacatggcctcgtccactgagggcacgatttaaacatttgacatcagaagctttatttgtaaacctcacacagataaggaccaagggctggcggtgtggccagaggacaggggaagctgaaggccccgtgcttgagctcggcagtcctgctccttgcagtgaagccaccatgggtgaccgtccagcctcacccggtggcctgcacagtgagggaagggcttcagggccatctgctcccagggcaggggacaggccaccaaggacctttggcaaatgaaggtttacatttctgtagtttgtttgttttagagcttaatttgtagttttttagctattaaaaccatttgaatttttaacgacctgatgagggcatcaggtaaattaaaggattttgggaagattcttaaaaaaaaaaaaaaaaaaaaaaaaaaa

SEQ ID NO: 1241 - DNA, 521 bp, HOMO SAPIENS
  misc_feature (285)..(285): n is a, c, g, or t
  misc_feature (289)..(289): n is a, c, g, or t
  misc_feature (291)..(291): n is a, c, g, or t
  misc_feature (301)..(302): n is a, c, g, or t
  misc_feature (304)..(305): n is a, c, g, or t
gggaagtggatctatgacacgtgcttgtgcatttacccgccctgttggtttctgtagctgtctagttcctgctgttcctgtctcacctgcccctttccttatgtgtagtttcttcctgtgacagggagaaacctggctctcagattgacaggacattcgcttaggccatgtcagtgctgtaggtgaactgttcaacctgtgccccagggaggcgcagtcactatggaggcaccttacttccttaatcgtgtactgttgtttttgtgtttgacctgtagcatctangtantngtttcaaaanntnnctagatgagttcttttctttctttccacctcctgcaaattatgtgattgcataattggtacatagttaggttcattgttagttgtattcctttggcttcccccatatcctcgttgactttttctttctttgtaacttacatatgttatgaaatttatatgaggatatataattttcataaaatgtgtatggtttacatgtattagtcgtgattatt

SEQ ID NO: 1242 - DNA, 2203 bp, HOMO SAPIENS
ggggaaggcctggcacgctccagccaaccagggcgtcacctgcagctcgtccccctgcccgggcttgcctcgagcgccctgccgccgccggagcggggagggtgttgggggcaggtggagccgggagggcccagctgagaattcagggttgggggctcagagggcactgcggctaggagcccgtcaaagcctgtcgcccaccggggcgagggcaggtgggagcgcctggccgtgcgtcgcgcgctggttggccagctgacgccccagtgcgcatgcgcgtccgaacagccctgcgggcggagcgactgtcctcccttctggtgtactgggtgggaggtggaactagtcggacaaagccctcgcgtcggacccttgccagaactcaattaatggatgcctcgaagttgacgtacatatatattcagaaatgttttgccacctgagacctatgaggaggttatgtctagagaagatatttccacactggtttcccttttcaagagctttatcgggagctgaagcagtcaatgccttgaggcctttctattttgcagtacatccagatttctttggacagcaccccgtagaaagggatgatacatggaagagttttcaatgccctagtgatttttccttatgatgcatgctgctggaccactcccctacaacatcagttaatgtgtgctccaggaatacaaactgatatgaaaaatgacttatggtagatgtagttaagacagtcaatatattttaacattagaaaatacagtcagtccttcatatccatgggttttacatccatggattcaaccaacctcagactgaaaatattaggggaaaaaaatacatctgtactacacatgaacaaacttctctttcttgtcattattccctgaacaacacaggataacaactacttacatagcacttacattatattagatattataagtaatctagaaatgacttaaagtatatgggaggatacacataggttatttgcaaatactacactattttatatgagagacttgagcattcgcagatttcggtatccacgggaggtcctggaaccaatcccctatggataccaagggactgctatgtattacaaagccacatgctttggaattacttcagtgttccttctattttcattaacactgatatctagtttaatatgaaaaggaacttgaaatcttgaaaattagaacatcgttatttttttctacttgcaatggaaaatctattttgcttttttgcttctaggaaaatattctgattatgatatgtgatatgttggctactcaaagtcagaacttttcaaagtaatcagtaaattgaatcaacagaaaaatattcattaactcggggatgcattaataaagtttttaaattcaaaatgtatagaaaaatcaagcttagtaatactttaatattattctaccaatgtattttttttaattaagacttctgtatgcagcagggcatggtggcacacctgtagtcccagctactagggaggctgaggcaggaggattacttgagcccaggaattcaagcctgggcaacatagtgagtcctcatctcctaaatttaaaaaacaaacaacaaaaacttctacgtgtggtaaagggttaactcagcaagcttgggttgcttaaaccttgcacattccaaagaaaggtctgaccccagtgctgacctttgactggctactgggaaatgagctctgagcccctggataggaatgtttctgtttgcctgaggcctttgaccatgccagatagtttatgctaacaatgtgatttatagtgaatacctgttttcctgtgtctaagaccctgggctgcactgtattaatttgaccttgggtatttggggagctgagactgagtagctgaagtgagtcacataagcactaaatgcttacctgactgacccccagtaaaactctggacatccagacttggatgagcttccttgggtggcaacacttttacgtattgtcacacaccattgctggggggattaagcactgtctgtaaaactccactgtgaaatgacaactggaaacttgcacgtggtctctcctgattctgctctattcaccttttccctttgctgattttaatctccattcttttgttgtaataaaccataatggtgaataaaacaaaaaaaaaaaaaaaaaaaaaaaaaa

SEQ ID NO: 1243 - DNA, 413 bp, HOMO SAPIENS
ggctgactctctttgaggagcactgcagctggtgactttaagttacagccagtgctcattgaccactctgaaaatctcagggcccttaagaattatgcaaaatctattctttctgtgctctagaaatggaacatcactgtctgggtgacagcacatctgttaatagcatggtttactgaatattttaatcccactattgagaactgctcagaaaaaaaaaaaccgattcttttaaaaagattgttggttggccaggcatagtggctcatacttgtaatccctgcactttgggaggccgaggatcacctgaggtcaggagttcaagaccagcctggccaaaatgatgaaaccccatctctaataaaaatacaaaaaaattagccaggcatggtggtagtacctgtaatttcagc

SEQ ID NO: 1244 - DNA, 273 bp, HOMO SAPIENS
  misc_feature (59)..(60): n is a, c, g, or t
  misc_feature (197)..(197): n is a, c, g, or t
  misc_feature (247)..(247): n is a, c, g, or t
acagagcatcagtgccacgccaggtgaggacagcgctcaccagacaaccaggcctgccnncccactgacgctgacttccggacctgcagaactgtgagaaagtacgtttcgcttctttgtaaactgcctggtcagtggtggcagcacagatggaccgacgtggacctcgacgcgaatggcgggctctgggcgctganccggtggcggcgtagctcaccgaacacccagggggaccagaactctctgncttccactcagttgtgacttgtctat

SEQ ID NO: 1245 - DNA, 857 bp, HOMO SAPIENS; identical to SEQ ID NO: 506

SEQ ID NO: 1246 - DNA, 11706 bp, HOMO SAPIENS
gaagacctcgcagcacagccgggcgcccgtcgggctctgggagagagcgagagagaaatccggttaaaatcagagtcggagggaggtttaaccacagatcggttccgatcggattattccttaaaggggacgcgccattgtcaagagaacggagccaggggcccgagggcggggaccggcggcgctggaggagcgaggcagctgtactaggactgggaacggcctagaacattccatattctgcttcacacacggtgactcactcactactgctttgtaccagtgtgcccactcgagtgcctgtaaagtacaagctccagatcaaaaaagcttctagatggatcctttccaaacttggtgtcttttctacaaactctgtgcctcaacaaccatttctaagtgagctgaagccatttattggtatcttggatggttaacatctaaatgcttaattcctgaaaccactcaagagtcataggattagatgatccaagtcaccaagaaattactgtctcaagtgatacgcttcagcgccagtcagcaaagtaaataaatactgtgcttcttccaactttcattccacttggggaaaaaaaaatatcatcatgtcaaacattacgattgacccagatgtcaaacctggtgaatatgtcatcaagagcctctttgcagaatttgctgttcaagctgaaaagaaaattgaagttgtaatggccgaacccttggagaagctattgtccagatctcttcagaggggtgaagatcttcagtttgatcagttgataagctctatgagctcagtagcagagcactgtctcccttccttacttcgcaccttgtttgactggtacagacgccaaaatggaacggaagatgaatcttatgaatataggcctcggtctagcacaaagtctaagggggatgaacagcaacgtgaaagagattatcttcttgaaaggagggacttagcagtagacttcattttttgtttagttttagttgaagttctaaagcagattcctgttcatcctgtacccgatcccttagttcatgaagttctaaacttagcttttaagcactttaaacataaggaaggatattcaggaaccaacactgggaatgtgcatattattgctgatttatatgcagaggtgataggggttcttgcccaatcaaagtttcaggctgtaaggaagaagtttgtgacagaattaaaagaactgcgacaaaaggaacaaagcccacatgtggtacaaagtgtcatcagcttaataatgggaatgaaattttttcgagtaaaaatgtatcctgtagaagattttgaagcatcatttcaatttatgcaggaatgtgctcagtatttcttagaagtgaaagataaagatataaaacatgcacttgctggtttatttgtggagattcttatccctgtagctgctgctgttaaaaatgaagtgaatgttccctgtttgaaaaattttgtggagatgctttatcagactacttttgaactgagctcgagaaagaagcattcattggctttatatccactaattacctgccttttatgtgtcagtcagaaacaattttttttaaataactggcatattttcctacagaactgtttgtcacatttaaagaataaagatccgaaaatgtctcgagttgcactggaatctttgtatagattattgtgggtttatgtaattagaataaaatgtgaaagcaacactgtaactcaaagtcgtcttatgagcatagtgtcagcactttttccaaaaggctcacgaagtgtggttcctcgtgacacacctctcaatatatttgtgaagattattcagttcattgctcaggaacgcttggattttgcaatgaaagaaataatatttgatcttctcagtgttggaaaatctactaaaactttcaccattaatccagagagaatgaacataggtctcagagtcttccttgtaatagcagacagtttgcagcagaaagatggtgaaccacccatgccaacaacaggagttattcttccctcaggaaatactcttcgtgtaaagaaaatatttctcaataaaaccttgacagatgaagaagcaaaagtcataggaatgtcagtttactatcctcaagtaagaaaagcattagatagcatcctcagacatttggacaaagaagttgggagaccaatgtgtatgaccagtgtgcagatgtctaataaggagcctgaagacatgattacgggggaaagaaaacccaagattgatttgtttagaacttgtattgctgcgattccaaggttgattcctgacggtatgagcagaactgacctgattgaattgttagcaaggctcacaattcatatggatgaagaactgcgtgctctggctttcaatactctgcaggcactaatgcttgattttccagattggcgggaggatgttctttcaggatttgtttattttattgttcgtgaagtgactgatgtccatcccacacttcttgataatgccgtaaagatgttggtacaattaataaatcagtggaaacaagcagcccaaatgcataataaaaaccaggacactcagcatggtgtagctaatggagcttctcatccccctcctctggaaaggagcccatattccaatgtattccatgtggttgaaggctttgcgcttgtcattctctgtagcagtcgacctgccactaggagactagccgtcagtgtccttagagaaatacgggctttatttgcacttctggaaatacctaagggtgatgatgaattagccatagatgtgatggacaggctaagcccatccattcttgagagcttcatacatctcactggggctgatcagactactttgctctattgccctagctcgatagatttacaaactttagcagaatggaactcttctcctattagccaccagtttgatgtgattagtccatcacatatatggatatttgcacatgtgacccaaggccaagacccatggattataagtctctccagttttttaaagcaagaaaatcttcctaaacactgctctacagctgtgagctatgcttggatgtttgcatacacaagacttcagttgttgtcccctcaggtcgatataaatagccccatcaatgctaagaaagtaaataccaccacaagcagtgactcatacattggcctgtggagaaactatctgatcctttgctgcagtgcagcaacatcgtcatcttccacatctgcaggttctgtgagatgttctcctcctgagacgctggcgtctaccccagatagcggctatagcattgattctaaaattattggcatcccatccccttcatccttgtttaagcacatagttccaatgatgcgttctgagagcatggaaatcacagaatcccttgttctaggtcttggcaggaccaacccaggagcttttagggaactaatagaggaattacatcccataattaaagaagcactcgaaagaaggccagagaatatgaaacggcgcaggcgtcgagacattttacgagtacaactggtacgaatatttgaactgctggcagatgctggtgtcattagtcacagtgcaagtggtggccttgataatgaaacacattttctcaacaacactttattggaatatgtagatttaactagacaactcctggaagcagaaaatgaaaaagactctgacacactgaaggatatacgatgccattttagtgccttagtggcgaatattattcagaatgttccagtgcaccagagaagaagtatttttcctcaacagagccttcgtcacagtctatttatgctgttcagtcactgggcaggtccttttagcatcatgtttacgcccttggacagatacagtgatagaaatatgcaaattaatagacatcaatactgtgcgttaaaggctatgtctgctgtactgtgttgtggccctgttgcagataatgtaggactttcatcagatggctatttgtacaaatggttggataacattttggattctctggacaaaaaggttcaccagctgggctgtgaagcagttacgttgttactggagctgaaccctgatcagagcaacctgatgtactgggctgtggaccgctgctacacgggctccgggagggtggcggccggctgctttaaagccattgctaatgttttccagaacagggattatcaatgtgacacagtgatgcttctaaatctgatactgtttaaagcagctgattcttctagaagtatctatgaagttgctatgcaacttttacagattctggaaccgaagatgtttcgctatgctcacaaattggaggttcagagaacagatggagtactcagccagctgtctcctctaccacatctctattctgtttcatattatcagttgtccgaggaactagcaagggcgtatcctgagctaactctcgccatattctcagagataagccagagaatccagacagctcaccctgctgggcggcaggtgatgctgcactacctgctaccatggatgaacaacatcgagctggtggacttaaaacctctccccacagcaaggcgacatgatgaagatgaagatgattccttaaaagaccgagaacttatggtgactagtaggcgctggttacggggagaaggatggggatctccacaagccactgcaatggttttgaacaatctgatgtatatgacagcaaagtatggcgatgaactggcctggtcggaggtggagaatgtgtggaccacacttgcagatggctggcccaaaaacctgaaaataattttgcactttttgatcagcatttgtggggtgaatagcgaaccaagcctcttgccttacgtgaagaaggtcattgtatatttaggtagagataaaacaatgcagttgctagaagagctggtgagtgagcttcagctgaccgatcctgtcagttcaggggtcactcacatggataatcccccgtattatcgcatcacttccagctataaaatcccttctgtcacctcaggaactacttccagtagcaatacaatggtagctcccacagatggcaatcctgataataagcccattaaagagaatattgaagagagctatgtgcacctggacatttacagtggactaaacagtcatttgaatcggcaacatcacagactagaatcccgatacagtagcagctctggaggatcttatgaagaagaaaaaagtgattcaatgccactttattctaattggcgactgaaagtgatggagcataaccaaggagagccactgcccttcccaccagctggaggctgctggtcaccactggtggattacgtgcctgaaacgtcatcacctggattacctcttcacaggtgtaacatagcagtgatccttttgactgatctcatcattgatcatagtgtgaaggtggaatggggaagctacctccatcttcttcttcatgcaatttttatagggtttgaccactgccaccctgaggtgtatgaacattgtaaacgcctgcttctgcacttattaatagtaatgggacccaatagtaacatccgaactgttgcttctgtccttctcaggaacaaggagtttaatgagcccagggtgcttacagtcaaacaagttgcacacttagattataatttcacagcaggcattaacgattttatacctgattaccagccctcccctatgactgactcagggcttagctcaagttctacctcttctagtatcagcttaggaaataacagtgctgccatttcacatctgcacaccactatcctcaatgaggttgacatctcagtggagcaggatggaaaagtcaaaaccctcatggaattcattacctcaagaaaaagagggcccctttggaaccatgaggatgtttctgccaagaatcctagcataaagagtgctgaacagttaactacatttttgaaacatgtggtttctgtttttaagcagtcaagctcagaaggaattcatctggaacatcatcttagtgaagttgctctgcaaacagcactttcctgttcttctcgacactatgctgggagatcctttcagattttcagggccctaaagcagcctctcactgcaactacactttctgatgttctctccagacttgtagaaactgtaggggatccaggagaagatgcacagggatttgtgattgagcttcttctcacattggaatctgcaattgatactttggctgaaaccatgaagcattatgatcttctttctgccctttctcaaacctcatatcatgatcctataatgggaaacaagtatgcagctaacaggaaaagcactggacaactcaatctaagcacaagtcccattaatagtagcagttatttgggatataacagtaatgcaagaagtaactctttgagattaagtttgattggtgaccgacgaggtgaccggcggcggagtaacacactggatataatggatggacggataaaccatagcagtagtttagcaaggactagaagcctttcctctctaagagagaaaggaatgtatgacgtgcagtccactactgagcctaccaacttgatggccaccattttttggatagcagcatctttattagaatcagattatgaatatgaatacctcctggctctcaggcttctcaacaaactgcttatccatttgcctttggataaatcagagagtcgagagaagattgaaaatgtacaaagcaaattgaaatggactaattttccaggacttcagcagctcttccttaagggttttacctcagcatctacacaagaaatgaccgtgcacctcctcagtaaactcatttctgtctccaaacatacattggtggatccttcccaattgtcaggctttcctcttaacatcctttgcttattgcctcacttaatccagcattttgacagcccaactcagttttgcaaagaaacagctagtcgaatagcaaaggtttgtgcagaagaaaaatgcccaacacttgtcaatctggcacacatgatgagtttgtacagtacacacacgtattccagagactgttctaactggatcaatgtcgtgtgcagatacctgcatgactccttctcagatacaacatttaatcttgtgacttatcttgcagagctgttagagaaaggattgtccagtatgcagcaatcattactacagattatttatagtctattgagtcatattgacctgtctgcagccccagccaagcagtttaatctggagatcataaagattattggcaaatatgtacagagtccttactggaaggaagcccttaacatattaaagctggtggtgtcacgctctgcgagtcttgtcgtacccagtgatatccccaagacctatggaggagatacaggttctcctgaaatatccttcactaaaatttttaataatgtttctaaggagttgcctgggaagaccttagattttcattttgatatatctgagacaccaattattggaaacaaatatggtgatcagcacagtgcggctggaagaaatgggaaaccaaaagttattgctgtcactagaagtacttcctcaacttcttctggttctaattctaatgccttggttcctgttagttggaaaaggccacagttatcacagcgaagaacaagagaaaagctaatgaatgtgctttctctctgtggtccagaatctggcctcccaaagaacccatcagttgtattttcttctaatgaggatttggaagtcggtgaccaacagactagcctaatttctacaacagaagacataaatcaagaggaagaagtagctgtggaagataatagcagtgaacaacagtttggtgtttttaaggattttgactttttagatgttgaattggaagatgcagagggtgaaagtatggacaatttcaactggggagttcgcaggcgctcactggacagtattgacaaaggggacactccatccctccaggagtaccagtgctctagtagcacccccagcctgaacctcaccaatcaggaggatacagatgagtcctcggaagaagaagcggcacttacagcaagccagatactctcacgcacacagatgttaaacagtgattctgccactgatgaaacaataccagaccatcctgacttacttctccagtctgaagattccactggcagcatcacaacagaggaagtgcttcaaatcagggatgagaccccaactttggaggcttctctagataatgctaacagccggctgcctgaggatacaacttcagtattaaaggaggaacatgttacaacctttgaagatgaaggatcctatataattcaagaacagcaggaatctcttgtgtgtcaaggaattcttgatttagaagaaactgaaatgccagagcctctagctcctgaaagttaccccgagtcagtctgtgaagaggatgttaccttagctctgaaagagctagatgaaagatgtgaagaagaagaagcggatttctccggactgtctagtcaagatgaagaagagcaagatggttttccagaagtacagacgtcgcctctgccgtcaccatttctttctgccatcatagccgcctttcagcccgtggcatatgatgatgaagaggaagcctggcgctgccacgtcaatcagatgctgtctgacaccgacgggtcctctgcagtgtttacttttcatgtgttttctaggctgtttcagacaattcaaagaaagtttggagaaataactaatgaggcagtcagctttcttggtgatagtctgcaacgcattggtaccaaatttaaaagttccttggaagtgatgatgctgtgttcagaatgcccaacagtctttgtggatgctgaaacactgatgtcatgtggtttgctggaaacactcaagtttggtgttttggagttgcaagaacacctggatacatacaatgtgaaaagagaagccgctgagcagtggctagatgattgtaagaggacatttggtgccaaagaagacatgtataggataaacacagatgcacaacaaatggaaatactagcagaattggagctctgccgaagattatacaaattgcattttcaattgctgcttctgttccaggcctactgtaaacttatcaaccaagtaaatacgataaaaaatgaagcagaggtcatcaacatgtcagaggaacttgcccaactggaaagtatcctcaaagaagctgagtccgcttccgaaaacgaagaaattgacatttccaaagctgcacaaactactatagaaactgccattcattctttaattgaaactttgaaaaataaagaatttatatcagctgtagcacaagtcaaagctttcagatctctctggcccagtgatatctttggcagttgtgaagatgaccctgtacagacactgttacatatatatttccatcatcagacgctgggccagacaggaagctttgcagttataggctctaacctggacatgtcagaagccaactacaaactgatggaacttaatctggaaataagagagtctctacgcatggtgcaatcataccaacttctagcacaggccaaaccaatgggaaatatggtgagcactggattctgagacacttcaggcctttaggaaagaaactaaactgaagatgatgaagaatattaaccaagcaccttttatggacccttgcattcactgataactttctggcagcatctactttttagtgtaactaatgtcaaactgtatcatcaaaaacaaagatctgaaagaaaaaaacatctgatattttaacagctgccaatatctcccacaataactgcgtgaagaaggaattttttaattacttaacctacgtgaaaagaaaagggctaaaagtgatgcctacaaatacattactttctggggaaagaaaagaattccaagaatgtttgcaataatggcctccaatactgaaacaaccaaaagcaggtgaaatgaggctgaaatcaaggctgtttcattttagctgaagacctgcaaagctgcttggatttctagcagttgaaaacctaacctgcaattgatgcttaatcatccatccacatgaacatgcagtcagctatacgcatcaagactcgtttgcaaaaaccattgatttttcagtatgtgggataagggtttgggtttttttgttttttggtctgtataaggaattatgtgtgtgtgagttgggatgtatggatatgtgatagtcatattttcaaggtatggatgtttggtgataacgtctcagagcatgcctaaaagagcactgcaagattatttttgaagaaatgttattttattagatctaactcttcatagtatgtaaatgttagaacattttaataatattttaaaactgggctttcccagtatttcaaaaagaaataatatatctgttaacgttattggaatgctgctcagttctctgatcagtgcttatgttatgattgttgataactaaccaaagtagatgcctgcagagactttaaaatgtaaaataaagatgtatgctgcctgtcagctattctcattagaaaagttttaacttattttactccatatagaaactgtagagactaaaaccagttattttcttgtacatttgtgccatgcactgttgttatacaagaataggtgtacaaagctaaagaaaaattgtggtcattgatgatggaatatatgacttgcaggctttgaagtctgcagaattcaagaaaagagctgcaaatgcatttttgtatctttattcaggactcacatgctttaccctaaagaaacctggggctaggggaaatgaaaggaagcctgaagactgactaccaaaacatgcaatatacttattcactgtctaagtctgtagtataacatgaactggagtctctatccttttctaaaatcgcattttgtaagaaaagaaagaaaaaaaaaaaaaaagaatgtagtcccacaactcctgatttgaaagaaacaccttgtattttttatatacatctcttatccactgtgacttttcttttaaactgggctctgtgattccagagtttagaatgtagaaatgaaatgcttagctttaccttttcttggggggtgtggaccctgccagaaatgtaattacgtatgctcaagtgcattaattgaaggcactgtgcacaccattggactgctgaccacagttaaacatttccagtaaaatttcgtaactggtcacagctcattcataatcactgtattttttgaccctgataaagacaattattttgatggtgttctggtactgtaattggtatcctttaaattatttaaaacttttgggtgtggggcaggcagagagggatggtgtccagagatacatcacactttacatcctatcttactgtcctctgtttttcttaccctccttacatcctttttgttaaaaataaaaagcattgtagctgttggtttgtgttgtattttaacaaagaatgaatgattacagtgtgcatcatttagaaacctttcaaatgttaccttcttgaattgccctagaaaagaacaaaattagttgactacccaaccaaacctttcagttgatatttgctttttgtgtttatttatatgtaactaagtctattaatataataaaaatgaatatacctgcagc

SEQ ID NO: 1247 - DNA, 548 bp, HOMO SAPIENS
  misc_feature (187)..(187): n is a, c, g, or t
gggcctcatctcagatcagatctactaaatcagatactctaggggcaggggcaggggcaggggctagcagttgtgtttaagcaaactctgcaggtgtctttcttatcctagtttgagaaccaatacccaacaacctacgtgattttggtgcaagtagtgtttgaaacacactgaagattactgcccnattactaagacatttttcaaaaagcatgttttaaatcagtgtagtccaggatcacactatattaaatataaagataacttaaaggatcattggatcattcattttggccaaatttttagcttctccaaagtgactaacatcagggcctacaataaaatctgtaattctccaagtttagtaattttatattgaggcaggaagggctcattaagtactaataagtacataatttattaaaaacatacataagtgtcatcaaaaaggtccacaattgttagtaaaaaaaattaaattgaagtagtaaatgctgttttataacatacatttttctgctaattcattctgttttgtgtgacctaat

SEQ ID NO: 1248 - DNA, 864 bp, HOMO SAPIENS
gacgcggcaagcaaggcggaaaggcccgagctaaggctaagacccgctcttcgcgggccggactccagttccctgtgggccgcgtacaccgcttgctccgcaagggcaactactccgagcgagtcggggccggcgcgccagtgtatctggcggcggtgttggagtacctgaccgccgagatcctggagctggcgggcaacgccgcccgcgacaacaagaagacccgcatcatcccccgacacctgcagctggccatccgcaacgacgaggagctaaacaagttgctgggtaaagtcacaattgctcagggcggtgttctgcccaacatccaggctgtactgctccccaagaagactgagagtcaccacaaggccaaggcaggttttagaagttcgcaatggctcgtaccaagcagactgctcgcaagtccacgggtgggaaagcgccacgcaagcagctggccaccaaggctgctcgaaagagcgctccagccaccggcggcgtgaagaagccccaccgttaccggcccggcacggtggctctgcgcgagatccgccgctaccagaagtcgaccgagctgctgattcgcaaactgccattccagcgtctagtccgtgagatcgcgcaggacttcaagactgatctgcgttttcagagctcggcggtgatggcgctgcaggaggcctgcgaggcctacctggtggggctgtttgaggacaccaacctatgcgccattcacgccaagcgagtgactatcatgcccaaggacatccagcttgctcgccgcattcgtggggagagggcgtaaattgtcttgtgaatgtgtgctaaccaaaacccaaaggctcttttcagagccaacca

SEQ ID NO: 1249 - DNA, 5565 bp, HOMO SAPIENS
ctcctgcacggcgagtgctggagcacgacgtaccgctcgctcggtcagggcgccccctccgcccgcctcctgcttcctcctccgctgcctgccgccgccgcctccaccattgtataatgctcggggcgcgcaggcagagaacggcggagtcttagcttcagcctcgcctgctgcccgctccccggcgccaccctcgggcccctggagcggggcactccgcatggagcgggagtagctgaggagtgggcggaaacccctcctgatgcgttagttcccaggtggagctgcatgtgatatatgttgggtaaaggaggaaaacggaagtttgatgagcatgaagatgggctggaaggcaaaatcgtgtctccctgtgacggtccatccaaggtgtcttacaccttacagcgccagactatcttcaacatttcccttatgaaactctataaccacaggcccctgacagagcccagcttgcaaaagaccgttttaattaacaacatgttgaggcggatccaggaggaactcaaacaggaaggcagcctgaggcccatgttcaccccctcctcccagcccaccaccgagcccagcgacagctaccgagaggccccgccggccttcagccacctggcgtccccgtcctcccacccctgcgacctcggaagcactacgcccctggaggcctgcctcaccccggcctcactgctcgaggacgacgatgacacgttttgcacctcccaggccatgcagcccacggctcccaccaaactgtcacctccagccctcttgccagaaaaggacagtttctcctctgccttggacgagatcgaggagctctgtcccacatctacctccacagaggcggccacggctgcgactgacagtgtgaaagggacctccagcgaggctggcacccagaaactcgacggtcctcaagagagccgcgcagatgactcaaaactgatggactctctgcctgggaattttgaaataacgacgtccacgggtttcctgacagacttgaccctggatgacatcctgtttgctgacattgatacgtccatgtatgattttgacccctgcacttcctcatcagggacagcctcaaaaatggcccctgtgtctgccgacgacctcctcaaaactctggctccttacagcagtcagcctgtcaccccaagtcagcctttcaaaatggacctcacagagctggaccacatcatggaggtgcttgttgggtcctaagacccagggacccagcgactatgcccacccagaccccagagcgttcccataaccctgacagttctccacactgtgcatgcacccttgcttgcctttttcagagaaaaagaaaattttacaacaggatcacactagtttttgctttgagcagagttggagtgccttcatccaagtatgaccacttttaatacacttttttgagtggttcctcagagacctactaccctggtataggaaagaatccatttgaagacaatgttgcaatgttgaatgacaaaaataaacagttcaagtgaagcacaaggattaagttggaaaagctgtaaattgcatgtgcatatttgtctattttttctataagttttattgcaagaggtaaagaagaaaactatatatatatatcttatttagataatctcagtaccttttctggcatttttgccctgtataggttgacttggcaattcggcctttttagaggcattaactactcctcgtaagtgttgcatttacatggctgtttagaaaactgctgcccaaatttattttatatttttgtacagattctgcagtttatgatattgtttttctaaaaacaaatgctgtttatacatatgagatagctattttgataggatttgctcacatagttcctgcaaacttcagatgtacaagttgcacttgtacttttatagagttgtaatgttttatatgtgtatggtgcaagagaaaattggatcaaatcaatctgcagttgatgtccccaaatgcaaacacaggcacacacatgcacacacccataaacacacacacagtgctttaagaaagggccaggtgatatcacacccaaatttcacaagcactgaccccctggcaccaacacccgccagtactgtgacttccaaagccagagccacatgtgctcatcaaacttgcattaagcagttggcgggagatggctgtggagctgggggtttaagtgatggttctcttttgctccctcttttgagggtaaagctactgtctttcttaagagtgtatttatgccaagtttgcgcttttaattgtttttattttgttttttaatgaaaacccagatctttcctttttggcataatttttatgatgacctgaaattttacatccgaacaaaattttacatccgaaaagcaaccaacttcttcatggaactcagccctgttgcaatgcttagggcccttaaagaagaaaatctccccagaaggcatccatcatgttgcttaattgtcttctgcagcttcctttccctagagctttccctgtgttgctaagagctgaaaatggcatcttcgtgatcaccacagtgagcttggctcgcctcggccggcccgggatgcactcttacaacatgtgtgactcttgaacctggagttcatcacattacgtcacagcttcccatctggttgctttcctgagtcagctacttcacacttgtcaaggctgttttaccccaaaactcagacaggactttctatgcatgttttccctcctccccccaattcccccccccatcaccttatctcccaggacacacttgagaagtagctttttattcctagtggtgtacatttaattttaaaaaggttgcaatgtatcatgcttgttgccgaaactgtttatggccttcttgtttcagttttttcttttcttccaatggtactttagctgttgagtgcaggttacaacctatattgttatgcagatggcttctttaggaataacttttatatttatttaaaaatttttaaattatgggatgttttgttgttgttgttgtctttgttgttggtcatttgtcaatattcagtcaccaattctgctcacttcttgccatggataaaattgggtctttctggctaattaaaaaagacaactttataaaatggcactttaagcaagccatagttagttttatttttgtaatgcacatggcaaagcaaagacgtttgtgatgaaggaactgctcatctaagcaaaagatttgagtatgatatgataaaggctttctacattctaatttactttttccccccacttgaatgtgttttaaaggctaattatcagctcagtagagcagtgagaaactgatcaaattgcacttgttctcctacaagcaacctccacgcagacacctcgtactgctacaggtgtgtcatttcctttaataggaccagggaccatgtaactgaggtgagggttgtagtagatgcttccagtgtcagtatgcctgttaattttaagagcttccctttcttgcagagaacaagtctgcccagattccatgctttctataactggaggacctggcaaacctgccgcatgctgcacacatctacctacgtacacatatacaatagtattgatgattctgaacaataacagggtaaaacagttggtttgccattgttaaaaactgatttacagtaacttacaacaactgtacttttgttggattagcaaatcatgtgtttaaacaaatcccatatgttgggcaacagttcaaataagcacggagaagtgttgcccaaacttggttctctgactcttatgtatttgtaaggctgggcttcaaaatcaaaacaaaaaccccaaaaacagcaggcaaatgctttttaactctgacaccgttgccataaatccctgatactcaaagtctaacaagaaagacatggaaaattagcagcccattttcagaaagatcaaaatgatctagggttctaattgcttttgcatcctattcttacaaagtgatgtcccaacagggaacagtaggagctggagtgggatctccaagtcccagtttgagtgtgggatgtgcttccagcagtgccttccctttatgaaagacatcacatggcatccagggccaggcaggcagcttgaggtgcctttacgagaaaaccgagctggggctgggagaggacagttattgacactgatgtgcaatgaagtgacaagatgagagcagaatcgtaagagctttgaatttgaagtgagtttttttccccccataagttatttattccttttttctgtgtaaatatatttattttactgtggagcgctaacatctggatcgtaacatgtgcagaatgtatggtaggaatgtattctcttgtaggaatgtaaatctgtattaaaagggggtccaagccaggcccccaggtcttctcattgtatgcacagtccgcattcatttttactcttctctaatatgggtctatttgaaatatgcaaaaggtatgaggaatgttttaatacctccaaatttttaagaaaagcatcaaagggttgatattttttaaagtttttttagtagcactttctctggatgacagaaggagcaaccacatgggcacccttgttcataccaaagggtgagcagtggccagagcctcctctgcacctctcgagtgtctttaccaattgagctttttatcgccatagccccttggagtgccccagctgccctgaggtcaatcaaggaaaatttcttaatgaaataagctccaaagagccaaagtatcaacttacagatcgtttttaaagcttaaatttatgaaccacctttgtggtaaacaatgaattatgaataccgcagggcagccttcttaaatgacaaatgtaaaaaaaaaaaaaaaaaagactctacttcgtgcagcaattgctactctatacgaattgtcttaatttgaaaaccttgctgttacaaattggacctttatacattttctgaaaacaatgaaaagagtatatttaaccttttctggctgtaaatggttaccttcctgtaactgccccgcacctggaggcatggagttgtgtgcatcctgcttatgtacaattgttttcagtgtttctaagaatgagtctgaatggttcttgaaaattagccaggatcaaatgctattgcagacaaagccaataaaaagttggacttcttttggggataacaagttttggaagagaaatgcaggccatatgtgcgcatgaccgagattttgaaaaaagatgtacatagtgacatgtttggtgcatggtttttgaggagggcttttgtcaaaaaggaggtataacctttcccccacagacctgagagctgtgccttttctatgcaatattacagacgttacatcggaacccagatggctgtattcacatgtaggtttgggctgtaatctaaacaattggacagattaaatgtacatggaaatgagcagtcttacttttgtagttttatattatacaataaacagttaaaagatgaaaaaaaaaaaaaaaaaa

SEQ ID NO: 1250 - DNA, 1236 bp, HOMO SAPIENS
gctgggcgcgggcggcggcggcccggaggagaacgggcggagggcgcgggccgaccgggcgcaccgaccatggcctccaaatgccccaagtgcgacaagaccgtgtacttcgccgagaaggtgagctccctggggaaggactggcacaagttctgcctcaagtgcgagcgctgcagcaagacgctgacgcccgggggccacgccgagcatgacgggaagccgttctgccacaagccgtgctacgccaccctgttcggacccaaaggcgtgaacatcgggggcgcgggctcctacatctacgagaagcccctggcggaggggccgcaggtcaccggccccatcgaggtccccgcggcccgagcagaggagcggaaggcgagcggccccccgaaggggcccagcagagcctccagtgtcaccactttcaccggggagcccaacacgtgcccgcgctgcagcaagaaggtgtacttcgctgagaaggtgacgtctctgggcaaggattggcaccggccctgcctgcgctgcgagcgctgcgggaagacactgacccccggcgggcacgcggagcacgacggccagccctactgccacaagccctgctatggaatcctcttcggacccaagggagtgaacaccggtgcggtgggcagctacatctatgaccgggaccccgaaggcaaggtccagccctaggctacagcggctctcatgatgtgggctcacctgcgccccagaccctgcaggggcccccctgcttggctctgctgggagagtgctcagccgcccagtcctgcctgcaagcccagggcgagtattggaggaggggcagccacgggcagagcaccatgcccatccccgagtctctggtgtgtctgccccctctggcatcctctgggcgtcccatgatcccttctgtgtctgcgtgtccgaatccccgtgtgaccctgtcccagcattttcccgccgaccctgcgtgtccccgtggcgctgtccgctctccctctcctgctgcccacccacctgccagtgttatttatgctcccttcgtgggtgatggccacgccctcaccatgtccctggcagagggcttccctccgggatcccctgcctggtgcccacactgcctcgcaagcgctcgccaccctcacgtggctcacctgctgttgagccttgtgctgtcaataaacggtttgaggattgcagaaaaaaaaaaaaaaaaaaaaaaaaaaaaaa

SEQ ID NO: 1251 - DNA, 4115 bp, HOMO SAPIENS
gagagaagcgagatttattcctacgtaccgggccgtgctgcttatggcggcgctggagagggggcgctgagctgttgggtatgaagtgtaacagaacagactttaccacctgaaactgctgcttcaagttcagatcaggcaaggaacaaacctcgtaacaactaacaagaccaaagaagagtacacttaagttgaagacacaacacttgatctgaaacaagaagtttgtgcctactcaacagctttgaaagagcacttcccaacgctgctagtagtctttgttttcttcagtgctgtactgtgagattgcccggtacagcagcagttgtattctttattagcttggtagatcattttctctcgctcttttttttaatactagcaactttcatcctttgaaacgtgtgctgaaaaagaagaatcagcaaatactactgaaagtgcaatatttgagtatcactgcgagatgagctttgatccaaaccttctccacaacaatggacataatgggtaccctaatggtacttcagcagcactgcgtgaaactggggttattgaaaaactgttaacctcttacggatttattcagtgttcagaacgtcaagctagacttttcttccactgttcacagtataatggcaacctgcaagacttaaaagtaggagatgatgttgaatttgaagtatcatcggaccgacggactgggaaacccattgctgttaaactggtgaagataaaacaagaaatcctccctgaagaacgaatgaatggacaagttgtgtgcgctgttcctcacaacttagagagtaaatctccagctgccccgggtcagagtccaacagggagtgtatgctacgaacgtaatggggaagtgttttatctgacttacacccctgaagatgtcgaagggaacgttcagctggaaactggagataaaataaactttgtaattgataacaataaacatactggtgctgtaagtgctcgcaacattatgctgttgaaaaagaaacaagcccgctgtcagggagtagtttgtgccatgaaggaggcatttggctttattgaaagaggtgatgttgtaaaagagatattctttcactatagtgaatttaagggtgacttagaaaccttacagcctggcgatgatgtggaattcacaatcaaggacagaaatggtaaagaagttgcaacagatgtcagactattgcctcaaggaacagtcatttttgaagatatcagcattgaacattttgaaggaactgtaaccaaagttatcccaaaagtacccagtaaaaaccagaatgacccattgccaggacgcatcaaagttgactttgtgatccctaaagaacttccctttggagacaaagatacgaaatccaaggtgaccctgctggaaggtgaccatgttaggtttaatatttcaacagaccgacgtgacaaattagagcgagcaaccaatatagaagttctgtcaaatacatttcagttcactaatgaagcccgagaaatgggtgtgattgctgccatgagagatggttttggtttcatcaagtgtgtggatcgtgatgttcgtatgttcttccacttcagtgaaattctggatgggaaccagctccatattgcagatgaagtagagtttactgtggttcctgatatgctctctgctcaaagaaatcatgctattaggattaaaaaacttcccaagggcacggtttcatttcattcccattcagatcaccgttttctgggcacggtagaaaaagaagccactttttccaatcctaaaaccactagcccaaataaaggcaaagagaaggaggctgaggatggcattattgcttatgatgactgtggggtgaaactgactattgcttttcaagccaaggatgtggaaggatctacttctcctcaaataggagataaggttgaatttagtattagtgacaaacagaggcctggacagcaggttgcaacttgtgtgcgacttttaggtcgtaattctaactccaagaggctcttgggttatgtggcaactctgaaggataattttggatttattgaaacagccaatcatgataaggaaatctttttccattacagtgagttctctggtgatgttgatagcctggaactgggggacatggtcgagtatagcttgtccaaaggcaaaggcaacaaagtcagtgcagaaaaagtgaacaaaacacactcagtgaatggcattactgaggaagctgatcccaccatttactctggcaaagtaattcgccccctgaggagtgttgatccaacacagactgagtaccaaggaatgattgagattgtggaggagggcgatatgaaaggtgaggtctatccatttggcatcgttgggatggccaacaaaggggattgcctgcagaaaggggagagcgtcaagttccaattgtgtgtcctgggccaaaatgcacaaactatggcttacaacatcacacccctgcgcagggccacagtggaatgtgtgaaagatcagtttggcttcattaactatgaagtaggagatagcaagaagctctttttccatgtgaaagaagttcaggatggcattgagctacaggcaggagatgaggtggagttctcagtgattcttaatcagcgcactggcaagtgcagcgcctgtaatgtttggcgagtctgtgagggccccaaggctgttgcagctcctcgacctgatcggttggtcaatcgcttgaagaatatcactctggatgatgccagtgctcctcgcctaatggttcttcgtcagccaaggggaccagataactcaatggggtttggtgcagaaagaaagatccgtcaagctggtgtcattgactaaccacatccacaaagcacaccattaatccactatgatcaagttggggggaatctggtgaagggttctgaatatctccctcttcatccctcccgaaatctggaatacttattctattgagctattacaccagttttaacaccttcctcgtgttatgtttaaaaaaataaataaatttaagaaaaccattttaaataatgcacagttgcagcctggaaaaacttaaggtggcgccttatagtatcaattttaggagctttatttggtgcatttaacgcaactggtaattgcagaatccactttgcctgtgtaagtgaaaaatatagactgttatcttgttggccctatgaaattctgcacttttcattatatactctaccttcattaattacttctggcaagatgttctgccttagcactcagttgcattcttttcctttttcttcctgttcattatgctttaattctgaggaccatatgagggtagaatatattatcttttaaaaattacaaaaatttgtataggcaaaccatttcttaaagttgatggccaaattttaaaatgttatttttcatatcatttataatcttgtcacaatccacttaaagaagtttggttatatttcagtgaaaattttcttccagagtaggttttttttcgtgggttggggggtaactttactacaattagtaagtatggtgcagaatttcatgcaaatgaggagtgccagcagtgtgataatttaaacatatttaaacaaaaacaaaaaaaatgaatgcacaaacttgctgctgcttagatcactgcagcttctaggacccggtttcttttactgatttaaaaacaaaacaaaaaaaaataaaaaagttgtgcctgaaatgaatcttgtttttttttataagtagccgcctggttactgtgtcctgtaaaatacagacacttgacccttggtgtagcttctgttcaactttatatcacgggaatggatgggtctgatttcttggccctcttcttgaattggccatatacagggtccctggccagtggactgaaggctttgtctaagatgacaagggtcagctcaggggatgtgggggagggcggttttatcttcccccttgtcgtttgaggttttgatctctgggtaaagaggccgtttatctttgtaaacacgaaacatttttgctttctccagttttctgttaatggcgaaagaatggaagcgaataaagttttactgatttttgagacact

SEQ ID NO: 1252 - DNA, 498 bp, HOMO SAPIENS
cccttcttctcatcaacagatactactgagaacaggcaagctatagagtgggaaaagatatgtgacacataaatctgacaatcctttatgtccagaatgcacaaaggagtcctatccaattaaaaggaaaaaaggacatgaaaagtactgtccattagtcatcagggaaatgcaaactaaaccaccatgagataccgccacatatccagaagcatggctaaaatgcaacaggtggacaataccaattgtcggcaaggatgtaaaaaacaaccagagtacaatgtgctggcaggaacacaaaacagcacaatggttttagaaaactgttgggcagtttcttaaaaagttaaatatacagctaccataaaacctagcaattctactcctagctttttaatccaagagaaatgaaaacatgtccacaaaaatccctgtacaagaatatttatagcacatttataatagccccacagaaacagctcaggggtccatgaacag

SEQ ID NO: 1253 - DNA, 420 bp, HOMO SAPIENS
  misc_feature (43)..(43): n is a, c, g, or t
  misc_feature (47)..(48): n is a, c, g, or t
  misc_feature (386)..(386): n is a, c, g, or t
tctgcctttcttgacctaaactgtcatggtaaattcttcttantccnntgtcaccagccacagacagtcgccacaagccatgacaagtctgcgatttcatggtctttttttattttgatgatatttccccagtgtttgggggacagaagaatgcccacaatctataggtcttagtcacatggatggggacagaatatctgagagagagagaaggaacaagatctactggggctccttaaaattcttcttgaagaactcctttctcaccttggagtagggaagactttctgattatgactcaaaatttagaagctaagaaagaaaatacctttaaatctgaaaacataaaactcaaaaacttctgggtgtttttttgggggggttgnttttttttaaacagcacaagcaactcaaagggca

SEQ ID NO: 1254 - DNA, 8148 bp, HOMO SAPIENS
gcgaattttgggaagttccgttggggaagatggcggcggcctcgagcacccttctcttcttgccgccggggacttcagattgatccttcccgggaagagtagggactgctggtgccctgcgtcccgggatcccgagccaacttgtttcctccgttagtggtggggaagggcttatccttttgtggcggatctagcttctcctcgccttcaggatgaaagctcagggggaaaccgaggagtcagaaaagctgagtaagatgagttctctcctggaacggctccatgcaaaatttaaccaaaatagaccctggagtgaaaccattaagcttgtgcgtcaagtcatggagaagagggttgtgatgagttctggagggcatcaacatttggtcagctgtttggagacattgcagaaggctctcaaagtaacatctttaccagcaatgactgatcgtttggagtccatagcaagacagaatggactgggctctcatctcagtgccagtggcactgaatgttacatcacgtcagatatgttctatgtggaagtgcagttagatcctgcaggacagctttgtgatgtaaaagtggctcaccatggggagaatcctgtgagctgtccggagcttgtacagcagctaagggaaaaaaattttgatgaattttctaagcaccttaagggccttgttaatctgtataaccttccaggggacaacaaactgaagactaaaatgtacttggctctccaatccttagaacaagatctttctaaaatggcaattatgtactggaaagcaactaatgctggtcccttggataagattcttcatggaagtgttggctatctcacaccaaggagtgggggtcatttaatgaacctgaagtactatgtctctccttctgacctactggatgacaagactgcatctcccatcattttgcatgagaataatgtttctcgatctttgggcatgaatgcatcagtgacaattgaaggaacatctgctgtgtacaaactcccaattgcaccattaattatggggtcacatccagttgacaataaatggaccccttccttctcctcaatcaccagtgccaacagtgttgatcttcctgcctgtttcttcttgaaatttccccagccaatcccagtatctagagcatttgttcagaaactgcagaactgcacaggaattccattgtttgaaactcaaccaacttatgcacccctgtatgaactgatcactcagtttgagctatcaaaggaccctgaccccatacctttgaatcacaacatgagattttatgctgctcttcctggtcagcagcactgctatttcctcaacaaggatgctcctcttccagatggccgaagtctacagggaacccttgttagcaaaatcacctttcagcaccctggccgagttcctcttatcctaaatctgatcagacaccaagtggcctataacaccctcattggaagctgtgtcaaaagaactattctgaaagaagattctcctgggcttctccaatttgaagtgtgtcctctctcagagtctcgtttcagcgtatcttttcagcaccctgtgaatgactccctggtgtgtgtggtaatggatgtgcaggactcaacacatgtgagctgtaaactctacaaagggctgtcggatgcactgatctgcacagatgacttcattgccaaagttgttcaaagatgtatgtccatccctgtgacgatgagggctattcggaggaaagctgaaaccattcaagccgacaccccagcactgtccctcattgcagagacagttgaagacatggtgaaaaagaacctgcccccggctagcagcccagggtatggcatgaccacaggcaacaacccaatgagtggtaccactacaccaaccaacacctttccggggggtcccattaccaccttgtttaatatgagcatgagcatcaaagatcggcatgagtcggtgggccatggggaggacttcagcaaggtgtctcagaacccaattcttaccagtttgttgcaaatcacagggaacggggggtctaccattggctcgagtccgacccctcctcatcacacgccgccacctgtctcttcgatggccggcaacaccaagaaccacccgatgctcatgaaccttcttaaagataatcctgcccaggatttctcaaccctttatggaagcagccctttagaaaggcagaactcctcttccggctcaccccgcatggaaatatgctcggggagcaacaagaccaagaaaaagaagtcatcaagattaccacctgagaaaccaaagcaccagactgaagatgactttcagagggagctattttcaatggatgttgactcacagaaccctatctttgatgtcaacatgacagctgacacgctggatacgccacacatcactccagctccaagccagtgtagcactcccccaacaacttacccacaaccagtacctcacccccaacccagtattcaaaggatggtccgactatccagttcagacagcattggcccagatgtaactgacatcctttcagacattgcagaagaagcttctaaacttcccagcactagtgatgattgcccagccattggcacccctcttcgagattcttcaagctctgggcattctcagagtaccctgtttgactctgatgtctttcaaactaacaataatgaaaatccatacactgatccagctgatcttattgcagatgctgctggaagccccagtagtgactctcctaccaatcatttttttcatgatggagtagatttcaatcctgatttattgaacagccagagccaaagtggttttggagaagaatattttgatgaaagcagccaaagtggggataatgatgatttcaaaggatttgcatctcaggcactaaatactttgggggtgccaatgcttggaggtgataatggggagaccaagtttaagggcaataaccaagccgacacagttgatttcagtattatttcagtagccggcaaagctttagctcctgcagatcttatggagcatcacagtggtagtcagggtcctttactgaccactggggacttagggaaagaaaagactcaaaagagggtaaaggaaggcaatggcaccagtaatagtactctctcggggcccggattagacagcaaaccagggaagcgcagtcggaccccttctaatgatgggaaaagcaaagataagcctccaaagcggaagaaggcagacactgagggaaagtctccatctcatagttcttctaacagaccttttaccccacctaccagtacaggtggatctaaatcgccaggcagtgcaggaagatctcagactcccccaggtgttgccacaccacccattcccaaaatcactattcagattcctaagggaacagtgatggtgggcaagccttcctctcacagtcagtataccagcagtggttctgtgtcttcctcaggcagcaaaagccaccatagccattcttcctcctcttcctcatctgcttccacctcagggaagatgaaaagcagtaaatcagaaggttcatcaagttccaagttaagtagcagtatgtattctagccaggggtcttctggatctagccagtccaaaaattcatcccagtctggggggaagccaggctcctctcccataaccaagcatggactgagcagtggctctagcagcaccaagatgaaacctcaaggaaagccatcatcacttatgaatccttctttaagtaaaccaaacatatccccttctcattcaaggccacctggaggctctgacaagcttgcctctccaatgaagcctgttcctggaactcctccatcctctaaagccaagtcccctatcagttcaggttctggtggttctcatatgtctggaactagttcaagctctggcatgaagtcatcttcagggttaggatcctcaggctcgttgtcccagaaaactcccccatcatctaattcctgtacggcatcttcctcctccttttcctcaagtggctcttccatgtcatcctctcagaaccagcatgggagttctaaaggaaaatctcccagcagaaacaagaagccgtccttgacagctgtcatagataaactgaagcatggggttgtcaccagtggccctgggggtgaagacccactggacggccagatgggggtgagcacaaattcttccagccatcctatgtcctccaaacataacatgtcaggaggagagtttcagggcaagcgtgagaaaagtgataaagacaaatcaaaggtttccacctccgggagttcagtggattcttctaagaagacctcagagtcaaaaaatgtggggagcacaggtgtggcaaaaattatcatcagtaagcatgatggaggctcccctagcattaaagccaaagtgactttgcagaaacctggggaaagtagtggagaagggcttaggcctcaaatggcttcttctaaaaactatggctctccactcatcagtggttccactccaaagcatgagcgtggctctcccagccatagtaagtcaccagcatataccccccagaatctggacagtgaaagtgagtcaggctcctccatagcagagaaatcttatcagaatagtcccagctcagacgatggtatccgaccacttccagaatacagcacagagaaacataagaagcacaaaaaggaaaagaagaaagtaaaagacaaagatagggaccgagaccgggacaaagaccgagacaagaaaaaatctcatagcatcaagccagagagttggtccaaatcacccatctcttcagaccagtccttgtctatgacaagtaacacaatcttatctgcagacagaccctcaaggctcagcccagactttatgattggggaggaagatgatgatcttatggatgtggccctgattgggaattaggaaccttatttcctaaaagaaacagggccagaggaaaaaaaactattgataagtttataggcaaaccaccataaggggtgagtcagacaggtctgatttggttaagaatcctaaatggcatggctttgacatcaagctgggtgaattagaaaggcatatccagaccctattaaagaaaccacagggtttgattctggttaccaggaagtcttctttgttcctgtgccagaaagaaagttaaaatacttgcttaagaaagggaggggggtgggaggggtgtagggagagggaagggagggaaacagttttgtgggaaatattcatatatattttcttctccctttttccatttttaggccatgttttaaactcattttagtgcatgtatatgaagggctgggcagaaaatgaaaaagcaatacattccttgatgcatttgcatgaaggttgttcaactttgtttgaggtagttgtccgtttgagtcatgggcaaatgaaggactttggtcattttggacacttaagtaatgtttggtgtctgtttcttaggagtgactgggggagggaagattattttagctatttatttgtaatattttaaccctttatctgtttgtttttatacagtgtttcgttctaaatctatgaggtttagggttcaaaatgatggaaggccgaagagcaaggcttatatggtggtagggagcttatagcttgtgctaatactgtagcatcaagcccaagcaaattagtcagagcccgcctttagagttaaatataatagaaaaaccaaaatgatatttttattttaggagggtttaaatagggttcagagatcataggaatattaggagttacctctctgtggaggtattgacttgtaatctcattttcctttcaaaaaaaaaaaaaaaagctaaggtggcttgttgggatgtaaacatgttttcagatgcagtaaggtttagtgtaggacagccttcctgacccagtggcatgaaaaccattacaggattaatagttctcctacttccacaatgtgccaaaagtctgcatcccagcattttgtttgcaggagaactgatgccattcctaagagctggactcactgtttctcttcatcacaaggagaaggagtccaaactttaatcactccactgtatgctccctgagataaaacagtaaaaaatccgcagccatagttcacttaaaacaatttcaagctcacttttgaagtaatgggggcctggaatgctaggtgagcatgaagataaacccttgctactatgtagcaacccaattggacctttttggagaaataggtctgagtctggattctgggggacatcaataagagcccttcacataaaaatatagaaatccaggagactgtttcgagtgcaacagaagttctcagtatttggagggtcctctcaaaaattctgcggccttactttgatattgacacctgcactgtgccattcctgattattccattcaggatctgtatcagcgggatggggcatggtccccagcacaactcttctgggttaaaaaaaaaaagccaggtgattcctttgtgtgttatgtcgtaagtggagtgacttcatcatatatggaagaagatttctatattcagctttttctgcaggttggagtcagcatagagttggaaaatcagctttggctttctttcctgtctcatttcctctagtgttctcctttttattgtcatcagctctcaacaactctgccacttttgtgtcccaaggtaataagatgtaggaaacaaaacattgtaaagtggagcaagaaaagttatcaattaaccacatcagagtcaaatgtcttgggtgacactaaggaggatatgggcaggtgataccagagtgctttatcttgtgatgttgatacagtagcagcctctcagacattcagccaggttggatttctcatgagtttgtcacctagttttgaatcctatcccgttggtttctgcaggaaaaaaaaaaaaatttatgtggtttttaaaatttgttctgagtggggagaatcttagggggaatgtactgaatagtatcatgggctcagctcccccatgcagggccaacaaataccaaaatgagtaaactgggaagcttttctctctttctgtcttcatcccagatcaaagaatcccgagttaggatctggatgaaggataagcccctgaattgtcgatgggctcacccccacactgacccagcatctgaacttgcttaacagggagccggggctaaactgcttcaccctgcctgagaaccagggagcactgcatttctccacagggtggaggagaagaggcagaataaaccaagcctgggacacctccctcctgtctaggtgtactcattcttctgtttcaaaagaaggcaaggacatgaagtcaacttctacctatcttctgctgctggtgtcttatgtattctcagtttgacctgattcctcttctgtcttttgacttaacattaggggttcttggtcataacctgctctgatgtacataaagatttcaggttcaatatcaatgtgtcttaaaacagaagtattttagcgggtggggggtggggtggtggggacaaacaacgcaggatataattgccaaaaccaggcttgaggttggtgactcttgaaagattttctttcttcaggcctagatcagaaaattaagtgcagcaatatcatgaattctcagaagccctttcagggagccagtgagtcatacagtatccacagttgagtcacttaaagatgtcagtatacgaaacattattcacaatccttgggcaatctcatttttttttccttctcccctcctcccctgccccccatacatttctatccttgagttagttttggaggggcaggaagtacttaacatctcagaagctagattgggaaacatgctcagctataagaactgagctttaaattttgagtttaaaaatgtacatcaggagcagctggggagggtctttttttaaaaaaatctttcaaatttggttttctgtgcatatggccgttttgtaaatactttggggtttttcatttttttgaaagtagatgaaatctgttgtgggatttttttcccgaaacattacaaaataacctgtttatttacatgcaaataaacttctttgataaaaagtaa

SEQ ID NO: 1255 - DNA, 936 bp, HOMO SAPIENS
cttctcgcctaacgccgccaacatggtgagtcttactgttgcgggctccggggccgtcgaccatgccgctcgacctccacctccgctgggaagctgaggcgccgaacggctcccagagggtcccgggaagcgcatggtgttcaggcgcttcgtggaggttggccgggtggcctatgtctcctttggacctcatgccggaaaattggtcgcgattgtagatgttattgatcagaacagggctttggtcgatggaccttgcactcaagtgaggagacaggccatgcctttcaagtgcatgcagctcactgatttcatcctcaagtttccgcacagtgcccaccagaagtatgtccgacaagcctggcagaaggcagacatcaatacaaaatgggcagccacacgatgggccaagaagattgaagccagagaaaggaaagccaagatgacagattttgatcgttttaaagttatgaaggcaaagaaaatgaggaacagaataatcaagaatgaagttaagaagcttcaaaaggcagctctcctgaaagcttctcccaaaaaagcacctggtactaagggtactgctgctgctgctgctgctgctgctgctgctaaagttccagcaaaaaagatcaccgccgcgagtaaaaaggctccagcccagaaggttcctgcccagaaagccacaggccagaaagcagcgcctgctccaaaagctcagaagggtcaaaaagctccagcccagaaagcacctgctccaaaggcatctggcaagaaagcataagtggcaatcataaaaagtaataaaggttctttttgacctgttgacaaatgtatttaagcctttggatttaaagcctgttgaggctggagttaggaggcagattgatagtaggattataataaacattaaataatcaaaaaaaaaaaaaaaaaaaa

SEQ ID NO: 1256 - DNA, 5614 bp, HOMO SAPIENS
agggcgttggggcagctcctgtgacagacggagctggagcggcggggcggcggcggagtccggcggccgggagagcgagtgagcgagcggaggagcagcgacacgggagtctagggagcgagaaggagaaggaggggagcgctcgggcgcgagcgagagaaaccgcgagcgccgagcttggactcgagccccggaacggctgaggagcccgcccgctcccctcccctccccctccccgggcccgggcccagcgcgccatcctcccccctccttccctccctccctccttcctccctcccctctccctccccctcccccgccggtggatgggagtgaaggacggaagaggccctgcggaggcggcggtgcagcgctccggtggaatgaatcttacttgttgaatatcttctggttactagttggattcatttgtgaaagaatcattttcccctgtgtggaagacacttagtggcatatttaaattataagtccacggatcaaaaagctttttgatttcccaaaggagggacataccactatatcagataagcttgacattacagccaagatggtgctgtcccagagacaacgagatgaactaaatcgagctatagcagattatcttcgttcaaatggctatgaagaggcatattcagtttttaaaaaggaagctgaattagatgtgaatgaagaattagataaaaagtatgctggtcttttggaaaaaaaatggacatctgttattagattacaaaagaaggttatggaattagaatcaaagctaaatgaagcaaaagaagaatttacgtcaggtggacctcttggtcagaaacgagacccaaaagaatggattccccgtccgccagaaaaatatgcattgagtggtcacaggagtccagtcactcgagtcattttccatcctgtgttcagtgttatggtctctgcttcagaggatgctacaattaaggtgtgggattatgagactggagattttgaacgaactcttaaaggacatacagactctgtacaggacatttcattcgaccacagcggcaagcttctggcttcctgttctgcagatatgaccattaaactatgggattttcagggctttgaatgcatcagaaccatgcacggccatgaccacaatgtttcttcagtagccatcatgcccaatggagatcatatagtgtctgcctcaagggataaaactataaaaatgtgggaagtgcaaactggctactgtgtgaagacattcacaggacacagagaatgggtacgtatggtacggccaaatcaagatggcactctgatagccagctgttccaatgaccagactgtgcgtgtatgggtcgtagcaacaaaggaatgcaaggctgagctccgagagcatgagcatgtggtagaatgcatttcctgggctccagaaagctcatattcctccatctctgaagcaacaggatctgagactaaaaaaagtggtaaacctgggccattcttgctgtctggatccagagacaagactattaagatgtgggatgtcagtactggcatgtgccttatgaccctcgtgggtcatgataactgggtacgtggagttctgttccattctggggggaagtttattttgagttgtgctgatgacaagaccctacgcgtatgggattacaagaacaagcgatgcatgaagaccctcaatgcgcatgaacactttgttacctccttggatttccacaagacggcaccctatgtcgtcactggcagcgtagatcaaacagtaaaagtgtgggagtgccgttgattgtgtctccttcggcccctcctccctcttttcctctggatgcactctgatgataccatggttaccccattgagctctgtttaaataaatattgtcctttcatgtaaattattctggatgtagattgagcttattaaatgttacacacaaagtattcatgcatggtgaatccaaattgtatactgtaaatttacatacgttgtctagaagtaccatagggtttaaaaacctgggctggcattggtcacaccaggcctaagaaggcagaagttgaatcaattgaactagggcactaaactgaatagttgacagtgtcattttatgttggattattaattcctgtttttctttctgctatctgttggtgcctgacttgatggcctcatttggggaaaagtggtggttattagggctttttctgaaatgtgtatctatgtaacatcacttaagtgtgcttaataaatcttctgtaaggattttagatgataaggctacaattcagaatcttctgaaccatctatgtaatgaatggggattatacattggaatttttgtcatgacacatttgccaaatcagtaggatatatttgttttggcagcctatcacgcagaggctagtggtatatttatgtaagaaaatgactgtaaatctcaagaaaaatctcagcagctaatagcaactcatttatttcattttggtcttaatgctttgtaaacaggtcaaaaaatactgtcatactctaagcttctattttccacactggacatacttctagttgtattctccatactattagactgtgtagtgatgtgacttccaagtagaatttaatctccccattgagtgtgtcatggtacaaatcactattcgtttttggtgttttttagggatgtgcaatgtgcattacataatgacagaaatactgagaaggttctgtgtgcccatttgaaaggagtgggaggaatacagcagtttgtttttcaacatgaatctgatattgatttaaactgtgtttcacttacaagttttaaaaaaatgacagggtttaatggagcgtgcataaaaatgtactgttttcaccttttgtttatatgtaaatgtttgtaagtatatgggcctatctgtaagtggataagtctgtatgtgtgtatcatacacatcaacctccatgtccttagtcctgggtttttgaaaaagtgctaaaacggacaagtagaataaatgttgctgtggaatgccatgctttagaacaaaccctttttgatcttaatgcttctgaaaactaggtctgactctggggatttttttccagccgaaggaaaatcacttccgttatgtccccctctaatttagccgctcgacattttacacaacccggatatgttgtatattttgacccaaagttacaggtaggtttaagagaatttttagccatgacttttggagcactattccattgtcagttattaataaagaattccattgcttagctaaccaacaggttttttttgtttccaagagagttatttgaaaagttaacagaacaatgagataacagtgacagtttaacaaagataaaattctgaactgcgttttattcatttgtgtactatgtgattttttaaatgtcccctttagtatttaatggaaaattggttcctgcaaaagacaaagggtgagagttagcgtcctgtagatacacacagagactaggccgtatattaactagaagcagctttatgtctagcttgtgtctttttgtttgtttgcttgtttgtttttagattcctgagagatgtctctggaagggaaagttttgagaactaatggctatttttgaggacaaaaattacatcttaagctaattccttaaatacatacagtaggtgaattttcaggacaatattgcctcacaaccctgcttacattgaaaagtctttttcccttagctcttctgactggatttttctacaaaaactatggaaaatatctttgttcttgtttgctgctattttctgtcctattttgagaaatataaatacatagaaatggtgcatcttaacatttgtttgtacatgtataaatgtcttgtattttaattcatttttagcatgaattgtttaagggtaagccacaacatctagaaatcactcatagatattgaacaataaaggagaatggtaccgatgcaggaggaagcaagcgtgtcttcccctgcagcacacagcgacttgcgttgacaaaggaggaggaaacgattactctgtaaacaaagttatccttacttgggagattgccacagcctgctgctgagttgagttaccagacatcctccatgtgagaagcagcgaacattgaatctcagggatggcccacaactgggtccacatgtaatgagccctgtttaataacgaaggggtgggggagagcagtccgtctacaacctggaatcagatttgcaaaatttcctgcactgctgtctgacactgtcctgttgatgccctttctgactgtgttctctgttttctctgtctgctgtctaaccctgtgccttgcctgggataaggacaatgatgaggttactggtttggattgtaagtagaggacttttattaattggtttagaggttcactgctgctttgtcactttctcaatcaaattggccacttaagaaataaagagctggtagaattgcatcctcagatgattattgactgtgtgtgtgtgtgaaaacagacattccagtgccacccaaatatatatctgtaacgtgcccaagaaatcctagctgcgctcttgagagtgcatgccatggagactggtttagacaccgcgtggagcctagttgcctgttgtcacggcatcttgcactttaggagactaagaccgtcctggttcgtctgtgtgtggtgtgaccaatggtgtgcccagagcactactctcaaaatcactagtgttagcaagtcgtcccgggctggggagcgttcgccgtagtctttggaagctttggctttagatttaccaagccccgcctccccgctgccagtgccctgctctcccgttcgcctctttctgtttctgtgtgaactttcccggtaatatcactcgttaaataggttttctttaaacttaattaaagaaaaactatttaaaggtaaaggatattttgttgacatcggtggctcgatcatccttaagcaactgaagttaaaattgttgaaggaaaaggcacttaaattggttactttcatgtccagctgtatataagtccagtgtgttcatctagatgacgcaaagaatctcctggtagagaagcgacatgtaaaaaactggtggaaaaaggttttggattttttttccagtggggtggggggagggcaagctggatttacaggtcacggctggactgaatgggcctttttatcttcccactgtatcatggaagtagctgcttgcttgtactgtccatccttcaggcatccctaaagctcactctgaagatgttagagacaaacacaaactcttcgagttaaagttgatcctgacactgacatgaaggcaagccttgatttcgtatgaacgttgctgaagtggtaattgaggaaaacagttccccagattgttaagagttcactgaagatattgacacaattttaaaaaatcagtaaaggaatgtatataatattgctctcgtgttttacagtaagatttgttgctctcagactgtgtaaaacaaaatttattcatgttttctgcatattaaaaaatcttattgtaccaactggtaaactattaaatgcctataaaacta

SEQ ID NO: 1257 - DNA, 4928 bp, HOMO SAPIENS
aaacaggaagtcagtcagttaagctggtggcagcagccgaggccaccaagaggcaacgggcggcaggttgcagtggaggggcctccgctcccctcggtggtgtgtgggtcctgggggtgcctgccggcccggccgaggaggcccacgcccaccatggtcccctgctggaaccatggcaacatcacccgctccaaggcggaggagctgctttccaggacaggcaaggacgggagcttcctcgtgcgtgccagcgagtccatctcccgggcatacgcgctctgcgtgctgtatcggaattgcgtttacacttacagaattctgcccaatgaagatgataaattcactgttcaggcatccgaaggcgtctccatgaggttcttcaccaagctggaccagctcatcgagttttacaagaaggaaaacatggggctggtgacccatctgcaataccctgtgccgctggaggaagaggacacaggcgacgaccctgaggaggacacagtagaaagtgtcgtgtctccacccgagctgcccccaagaaacatcccgctgactgccagctcctgtgaggccaaggaggttcctttttcaaacgagaatccccgagcgaccgagaccagccggccgagcctctccgagacattgttccagcgactgcaaagcatggacaccagtgggcttccagaagagcatcttaaggccatccaagattatttaagcactcagctcgcccaggactctgaatttgtgaagacagggtccagcagtcttcctcacctgaagaaactgaccacactgctctgcaaggagctctatggagaagtcatccggaccctcccatccctggagtctctgcagaggttatttgaccagcagctctccccgggcctccgtccacgtcctcaggttcctggtgaggccaatcccatcaacatggtgtccaagctcagccaactgacaagcctgttgtcatccattgaagacaaggtcaaggccttgctgcacgagggtcctgagtctccgcaccggccctcccttatccctccagtcacctttgaggtgaaggcagagtctctggggattcctcagaaaatgcagctcaaagtcgacgttgagtctgggaaactgatcattaagaagtccaaggatggttctgaggacaagttctacagccacaagaaaatcctgcagctcattaagtcacagaaatttctgaataagttggtgatcttggtggaaacagagaaggagaagatcctgcggaaggaatatgtttttgctgactccaaaaagagagaaggcttctgccagctcctgcagcagatgaagaacaagcactcagagcagccggagcccgacatgatcaccatcttcatcggcacctggaacatgggtaacgccccccctcccaagaagatcacgtcctggtttctctccaaggggcagggaaagacgcgggacgactctgcggactacatcccccatgacatttacgtgatcggcacccaagaggaccccctgagtgagaaggagtggctggagatcctcaaacactccctgcaagaaatcaccagtgtgacttttaaaacagtcgccatccacacgctctggaacatccgcatcgtggtgctggccaagcctgagcacgagaaccggatcagccacatctgtactgacaacgtgaagacaggcattgcaaacacactggggaacaagggagccgtgggggtgtcgttcatgttcaatggaacctccttagggttcgtcaacagccacttgacttcaggaagtgaaaagaaactcaggcgaaaccaaaactatatgaacattctccggttcctggccctgggcgacaagaagctgagtccctttaacatcactcaccgcttcacgcacctcttctggtttggggatcttaactaccgtgtggatctgcctacctgggaggcagaaaccatcatccagaaaatcaagcagcagcagtacgcagacctcctgtcccacgaccagctgctcacagagaggagggagcagaaggtcttcctacacttcgaggaggaagaaatcacgtttgccccaacctaccgttttgagagactgactcgggacaaatacgcctacaccaagcagaaagcgacagggatgaagtacaacttgccttcctggtgtgaccgagtcctctggaagtcttatcccctggtgcacgtggtgtgtcagtcttatggcagtaccagcgacatcatgacgagtgaccacagccctgtctttgccacatttgaggcaggagtcacttcccagtttgtctccaagaacggtcccgggactgttgacagccaaggacagattgagtttctcaggtgctatgccacattgaagaccaagtcccagaccaaattctacctggagttccactcgagctgcttggagagttttgtcaagagtcaggaaggagaaaatgaagaaggaagtgagggggagctggtggtgaagtttggtgagactcttccaaagctgaagcccattatctctgaccctgagtacctgctagaccagcacatcctcatcagcatcaagtcctctgacagcgacgaatcctatggcgagggctgcattgcccttcggttagaggccacagaaacgcagctgcccatctacacgcctctcacccaccatggggagttgacaggccacttccagggggagatcaagctgcagacctctcagggcaagacgagggagaagctctatgactttgtgaagacggagcgtgatgaatccagtgggccaaagaccctgaagagcctcaccagccacgaccccatgaagcagtgggaagtcactagcagggcccctccgtgcagtggctccagcatcactgaaatcatcaaccccaactacatgggagtggggccctttgggccaccaatgcccctgcacgtgaagcagaccttgtcccctgaccagcagcccacagcctggagctacgaccagccgcccaaggactccccgctggggccctgcaggggagaaagtcctccgacacctcccggccagccgcccatatcacccaagaagtttttaccctcaacagcaaaccggggtctccctcccaggacacaggagtcaaggcccagtgacctggggaagaacgcaggggacacgctgcctcaggaggacctgccgctgacgaagcccgagatgtttgagaaccccctgtatgggtccctgagttccttccctaagcctgctcccaggaaggaccaggaatcccccaaaatgccgcggaaggaacccccgccctgcccggaacccggcatcttgtcgcccagcatcgtgctcaccaaagcccaggaggctgatcgcggcgaggggcccggcaagcaggtgcccgcgccccggctgcgctccttcacgtgctcatcctctgccgagggcagggcggccggcggggacaagagccaagggaagcccaagaccccggtcagctcccaggccccggtgccggccaagaggcccatcaagccttccagatcggaaatcaaccagcagaccccgcccaccccgacgccgcggccgccgctgccagtcaagagcccggcggtgctgcacctccagcactccaagggccgcgactaccgcgacaacaccgagctcccgcatcacggcaagcaccggccggaggaggggccaccagggcctctaggcaggactgccatgcagtgaagccctcagtgagctgccactgagtcgggagcccagaggaacggcgtgaagccactggaccctctcccgggacctcctgctggctcctcctgcccagcttcctatgcaaggctttgtgttttcaggaaagggcctagcttctgtgtggcccacagagttcactgcctgtgagacttagcaccaagtgctgaggctggaagaaaaacgcacaccagacgggcaacaaacagtctgggtccccagctcgctcttggtacttgggaccccagtgcctcgttgagggcgccattctgaagaaaggaactgcagcgccgatttgagggtggagatatagataataataatattaataataataatggccacatggatcgaacactcatgatgtgccaagtgctgtgctaagtgctttacgaacattcgtcatatcaggatgacctcgagagctgaggctctagccacctaaaaccacgtgcccaaacccaccagtttaaaacggtgtgtgttcggaggggtgaaagcattaagaagcccagtgccctcctggagtgagacaagggctcggccttaaggagctgaagagtctgggtagcttgtttagggtacaagaagcctgttctgtccagcttcagtgacacaagctgctttagctaaagtcccgcgggttccggcatggctaggctgagagcagggatctacctggcttctcagttctttggttggaaggagcaggaaatcagctcctattctccagtggagagatctggcctcagcttgggctagagatgccaaggcctgtgccaggttccctgtgccctcctcgaggtgggcagccatcaccagccacagttaagccaagccccccaacatgtattccatcgtgctggtagaagagtctttgctgttgctcccgaaagccgtgctctccagcctggctgccagggagggtgggcctcttggttccaggctcttgaaatagtgcagccttttcttcctatctctgtggctttcagctctgcttccttggttattaggagaatagatgggtgatgtctttccttatgttgctttttcaacatagcagaattaatgtagggagctaaatccagtggtgtgtgtgaatgcagaagggaatgcaccccacattcccatgatggaagtctgcgtaaccaataaattgtgcctttctcactcaaaaaaaaaaa

SEQ ID NO: 1258 - DNA, 6139 bp, HOMO SAPIENS; identical to SEQ ID NO: 1008

SEQ ID NO: 1259 - DNA, 1184 bp, HOMO SAPIENS
gggggagacattcctcaattgcttagacatattctgagcctacagcagaggaacctccagtctcagcaccatgaatcaaactgccattctgatttgctgccttatctttctgactctaagtggcattcaaggagtacctctctctagaactgtacgctgtacctgcatcagcattagtaatcaacctgttaatccaaggtctttagaaaaacttgaaattattcctgcaagccaattttgtccacgtgttgagatcattgctacaatgaaaaagaagggtgagaagagatgtctgaatccagaatcgaaggccatcaagaatttactgaaagcagttagcaaggaaaggtctaaaagatctccttaaaaccagaggggagcaaaatcgatgcagtgcttccaaggatggaccacacagaggctgcctctcccatcacttccctacatggagtatatgtcaagccataattgttcttagtttgcagttacactaaaaggtgaccaatgatggtcaccaaatcagctgctactactcctgtaggaaggttaatgttcatcatcctaagctattcagtaataactctaccctggcactataatgtaagctctactgaggtgctatgttcttagtggatgttctgaccctgcttcaaatatttccctcacctttcccatcttccaagggtactaaggaatctttctgctttggggtttatcagaattctcagaatctcaaataactaaaaggtatgcaatcaaatctgctttttaaagaatgctctttacttcatggacttccactgccatcctcccaaggggcccaaattctttcagtggctacctacatacaattccaaacacatacaggaaggtagaaatatctgaaaatgtatgtgtaagtattcttatttaatgaaagactgtacaaagtagaagtcttagatgtatatatttcctatattgttttcagtgtacatggaataacatgtaattaagtactatgtatcaatgagtaacaggaaaattttaaaaatacagatagatatatgctctgcatgttacataagataaatgtgctgaatggttttcaaaataaaaatgaggtactctcctggaaatattaagaaagactatctaaatgttgaaagatcaaaaggttaataaagtaattataactaaaaaaa

SEQ ID NO: 1260 - DNA, 2500 bp, HOMO SAPIENS
gcagatcgggggcgcgaggcctcacggagctcgtagtttcccggacgggccgctcccggcctcgcggcctcgcctccccacactacaactcccacggggcagcgggcgcggctccccgtacccaccagctggccgggcagggcagccacttcgcggtcgggcccgccggctgcgggcacccgcgcgacgggcgggaagatggcggacgtggtcgtgggtaaagacaagggcggggagcagcggctcatctcgctgcctctatcccgcatccgggtcatcatgaagagctcccccgaggtgtccagcatcaaccaggaggcgttggtgctcacggccaaggccacggagctctttgttcaatgcctagccacctattcctacagacacggcagtggaaaggaaaagaaagtactgacttacagtgatttagcaaacactgcacagcaatcagaaacttttcagtttcttgcagatatattaccaaagaagattttagctagtaaatacctgaaaatgcttaaagaggaaaagagggaagaagatgaggagaatgacaatgataatgaaagtgaccatgatgaagctgactcctaaaccaaaagtgctttaaaaaccagcctggcgaggacagccctggacccactccactgtctctaagtaaacacagcactgcccgcttttagcgtcttcacttcttcacagagttccagtgtgtggtattctttcgaggtattctttccaggccgagattgagcacctcatgtacctacgccacagacagccagagggaaagcgacccagacagcagcccctcctcgacaggcccaccctgcagctcaggcaccaagaaaacagccgatactggcagccattgcagctccaaactgcagaggcaaggccaattttaacttttcaatttacagtcgattttgaagagcttctacatatcggttatgtaaattcatatatgtatattttggaatcagttcttataaacagctcgattcagttttagctaaatttatagtttaggtagtatgttacatttgaatttttgtcttaagaaaagttgactgttcagatatttttctactgtaaagaaatatacttttctattaaagatctgtacatatttttacagtaaaatgctttatggaactagttttagagccctctatggctttaaggccttgcttactgcctgcaaattttgagaaatttaaaaataagcattctaacacttttattcccacagaaaaattccaagtcaaattatcaaatcaaatacaaaaataagtcttacctcttgtataagcatgttgtactaaaaaaaaattttgaaacattttgtatattggagatctctctcatcttactgttctttgctttaaattcctggcacttctttttactgtctataagagaaaacctatcataagcccaattttttttttccacttagggtaaatgtttggctcctctcatttcattatctttttttttttttttttaaagacagattctcactcagttgcccaggctggattgcggtggcgctgtctcagctcactgcaacctccgcctcccaggttcaagtgattctcctgcctcatcctcctgagtagctgggattacaggcgtgtgccaccatgcccaacctatttttgtattttttagtagagacggggttcaccatgttggccaggcttgtctcaaactcctaacctcaactgatccacctgcctcagcctcccaaagtgccgccgggattacaggcgtgagccaccatgcctggccttcattatctcttttttaaaaatgaaaaagtttataatttacattcagtaaaatcaccctttttagtgtctagtctgtgaattttgacaaatgcatggttttgtaaccaatcgataggacagttctgccacccaggacattcccctctgttcctctgttcctctcttctcctgccccctagcaaccactggtgttttctgtccctcttgttcattgacatttattttaaaataaaatattttaaaatctactttttggtgtacagttctgagttttggcaaatgcagtcaagtcactaccaccaccacaattaacagctatatcaccctccagtaaattccctgtggtcagctccttccccaccttttaccgtggcaaccgtcaagctattctctgtccctataccaggtgtcatcaaatttttttctggaaagggccatgcagtaaatagttcaagctttgtgggcttttatagtctctgttgctgctgctgaactcagctgttgtagcacgaaagcagccaggtaattactagatgaaggaatgcaggtggctgtgtttcaatagagctttatttctgcaaactgaaacttgagttttgtgtaattttcatgtgtcatgaaatactgttttctccaaccatttaataatgtaaatacttgctagcttatgtgccattaaaaaatgacttgatttggcttac

SEQ ID NO: 1261 - DNA, 6038 bp, HOMO SAPIENS; identical to SEQ ID NO: 720

SEQ ID NO: 1262 - DNA, 3668 bp, HOMO SAPIENS
cattcataagactcagagctacggccacggcagggacacgcggaaccaagacttggaaacttgattgttgtggttcttcttgggggttatgaaatttcattaatctttttttttccggggagaaagtttttggaaagattcttccagatatttcttcattttcttttggaggaccgacttactttttttggtcttctttattactcccctccccccgtgggacccgccggacgcgtggaggagaccgtagctgaagctgattctgtacagcgggacagcgctttctgcccctgggggagcaacccctccctcgcccctgggtcctacggagcctgcactttcaagaggtacagcggcatcctgtgggggcctgggcaccgcaggaagactgcacagaaactttgccattgttggaacgggacgttgctccttccccgagcttccccggacagcgtactttgaggactcgctcagctcaccggggactcccacggctcaccccggacttgcaccttacttccccaacccggccatagccttggcttcccggcgacctcagcgtggtcacaggggcccccctgtgcccagggaaatgtttcaggctttccccggagactacgactccggctcccggtgcagctcctcaccctctgccgagtctcaatatctgtcttcggtggactccttcggcagtccacccaccgccgccgcctcccaggagtgcgccggtctcggggaaatgcccggttccttcgtgcccacggtcaccgcgatcacaaccagccaggacctccagtggcttgtgcaacccaccctcatctcttccatggcccagtcccaggggcagccactggcctcccagcccccggtcgtcgacccctacgacatgccgggaaccagctactccacaccaggcatgagtggctacagcagtggcggagcgagtggcagtggtgggccttccaccagcggaactaccagtgggcctgggcctgcccgcccagcccgagcccggcctaggagaccccgagaggagacggagacagatcagttggaggaagaaaaagcagagctggagtcggagatcgccgagctccaaaaggagaaggaacgtctggagtttgtgctggtggcccacaaaccgggctgcaagatcccctacgaagaggggcccgggccgggcccgctggcggaggtgagagatttgccgggctcagcaccggctaaggaagatggcttcagctggctgctgccgcccccgccaccaccgcccctgcccttccagaccagccaagacgcaccccccaacctgacggcttctctctttacacacagtgaagttcaagtcctcggcgaccccttccccgttgttaacccttcgtacacttcttcgtttgtcctcacctgcccggaggtctccgcgttcgccggcgcccaacgcaccagcggcagtgaccagccttccgatcccctgaactcgccctccctcctcgctctgtgaactctttagacacacaaaacaaacaaacacatgggggagagagacttggaagaggaggaggaggaggagaaggaggagagagaggggaagagacaaagtgggtgtgtggcctccctggctcctccgtctgaccctctgcggccactgcgccactgccatcggacaggaggattccttgtgttttgtcctgcctcttgtttctgtgccccggcgaggccggagagctggtgactttggggacagggggtgggaaggggatggacacccccagctgactgttggctctctgacgtcaacccaagctctggggatgggtggggaggggggcgggtgacgcccaccttcgggcagtcctgtgtgaggattaagggacgggggtgggaggtaggctgtggggtgggctggagtcctctccagagaggctcaacaaggaaaaatgccactccctacccaatgtctcccacacccaccctttttttggggtgcctaggttggtttcccctgcactcccgaccttagcttattgatcccacatttccatggtgtgagatcctctttactctgggcagaagtgagccccccccttaaagggaattcgatgcccccctagaataatctcatccccccacccgacttcttttgaaatgtgaacgtccttccttgactgtctagccactccctcccagaaaaactggctctgattggaatttctggcctcctaaggctccccaccccgaaatcagcccccagccttgtttctgatgacagtgttatcccaagaccctgccccctgccagccgaccctcctggccttcctcgttgggccgctctgatttcaggcagcaggggctgctgtgatgccgtcctgctggagtgatttatactgtgaaatgagttggccagattgtggggtgcagctgggtggggcagcacacctctggggggataatgtccccactcccgaaagcctttcctcggtctcccttccgtccatcccccttcttcctcccctcaacagtgagttagactcaagggggtgacagaaccgagaagggggtgacagtcctccatccacgtggcctctctctctctcctcaggaccctcagccctggcctttttctttaaggtcccccgaccaatccccagcctaggacgccaacttctcccaccccttggcccctcacatcctctccaggaagggagtgaggggctgtgacatttttccggagaagatttcagagctgaggctttggtacccccaaacccccaatatttttggactggcagactcaaggggctggaatctcatgattccatgcccgagtccgcccatccctgaccatggttttggctctcccaccccgccgttccctgcgcttcatctcatgaggatttctttatgaggcaaatttatattttttaatatcggggggtggaccacgccgccctccatccgtgctgcatgaaaaacattccacgtgccccttgtcgcgcgtctcccatcctgatcccagacccattccttagctatttatccctttcctggtttccgaaaggcaattatatctattatgtataagtaaatatattatatatggatgtgtgtgtgtgcgtgcgcgtgagtgtgtgagcgcttctgcagcctcggcctaggtcacgttggccctcaaagcgagccgttgaattggaaactgcttctagaaactctggctcagcctgtctcgggctgacccttttctgatcgtctcggcccctctgattgttcccgatggtctctctccctctgtcttttctcctccgcctgtgtccatctgaccgttttcacttgtctcctttctgactgtccctgccaatgctccagctgtcgtctgactctgggttcgttggggacatgagattttattttttgtgagtgagactgagggatcgtagatttttacaatctgtatctttgacaattctgggtgcgagtgtgagagtgtgagcagggcttgctcctgccaaccacaattcaatgaatccccgacccccctaccccatgctgtacttgtggttctctttttgtattttgcatctgaccccggggggctgggacagattggcaatgggccgtcccctctccccttggttctgcactgttgccaataaaaagctcttaaaaacgca

SEQ ID NO: 1263 - DNA, 12600 bp, HOMO SAPIENS
gggcgcgggcagctctgcgtccgaagctgctccgacgccgtcgctgggaccaagatggacctcccggcgctgctccccgccccgactgcgcgcggagggcaacatggcggcggccccggcccgctccgccgagccccagcgccgctcggcgcgagccccgcgcgccgccgcctgctactggtgcggggccctgaagatggcgggcccggggcgcggcccggggaggcctccgggccaagcccgccgcccgccgaggacgacagcgacggcgactctttcttggtgctgctggaagtgccgcacggcggcgctgccgccgaggctgccggatcacaggaggccgagcctggctcccgtgtcaacctggcgagccgccccgagcagggccccagcggcccggccgccccccccggccctggcgtagccccggcgggcgccgtcaccatcagcagccaggacctgctggtgcgtctcgaccgcggcgtcctcgcgctgtctgcgccgcccggccccgcaaccgcgggcgccgccgctccccgccgcgcgccccaggcctccggccccagcacgcccggctaccgctgccccgagccgcagtgcgcgctggccttcgccaagaagcaccagctcaaggtgcacctgctcacgcacggcggcggtcagggccggcggcccttcaagtgcccactggagggctgtggttgggccttcacaacgtcctacaagctcaagcggcacctgcagtcgcacgacaagctgcggcccttcggctgtccagtgggcggctgtggcaagaagttcactacggtctataacctcaaggcgcacatgaagggccacgagcaggagagcctgttcaagtgcgaggtgtgcgccgagcgcttccccacgcacgccaagctcagctcccaccagcgcagccacttcgagcccgagcgcccttacaagtgtgactttcccggctgtgagaagacatttatcacagtgagtgccctgttttcccataaccgagcccacttcagggaacaagagctcttttcctgctcctttcctgggtgcagcaagcagtatgataaagcctgtcggctgaaaattcacctgcggagccatacaggtgaaagaccatttatttgtgactctgacagctgtggctggaccttcaccagcatgtccaaacttctaaggcacagaaggaaacatgacgatgaccggaggtttacctgccctgtcgagggctgtgggaaatcattcaccagagcagagcatctgaaaggccacagcataacccacctaggcacaaagccgttcgagtgtcctgtggaaggatgttgcgcgaggttctccgctcgtagcagtctgtacattcactctaagaaacacgtgcaggatgtgggtgctccgaaaagccgttgcccagtttctacctgcaacagactcttcacctccaagcacagcatgaaggcgcacatggtcagacagcacagccggcgccaagatctcttacctcagctagaagctccgagttctcttactcccagcagtgaactcagcagcccaggccaaagtgagctcactaacatggatcttgctgcactcttctctgacacacctgccaatgctagtggttctgcaggtgggtcggatgaggctctgaactccggaatcctgactattgacgtcacttctgtgagctcctctctgggagggaacctccctgctaataatagctccctagggccgatggaacccctggtcctggtggcccacagtgatattcccccaagcctggacagccctctggttctcgggacagcagccacggttctgcagcagggcagcttcagtgtggatgacgtgcagactgtgagtgcaggagcattaggctgtctggtggctctgcccatgaagaacttgagtgacgacccactggctttgacctccaatagtaacttagcagcacatatcaccacaccgacctcttcgagcaccccccgagaaaatgccagtgtcccggaactgctggctccaatcaaggtggagccggactcgccttctcgcccaggagcagttgggcagcaggaaggaagccatgggctgccccagtccacgttgcccagtccagcagagcagcacggtgcccaggacacagagctcagtgcaggcactggcaacttctatttggtatgaagcactctattcagtcaccaccatataggtcacttctctcatactcggtcttgaggatattctggattaatcctttctatgcagacgtttctggtttacaaaaggacgcagccctggactacaagtctggaactgacaagttcttatgaccttgacaaatcaccttaacccatctgagccttaaattctcatttatttcctgcataaggagatttggctaaatgctttctgaggtcctttggagtcctgtggctccatggtaatgtgctcctttccttgaagattgggggttttgtaatgttgagatactttgcctctatgcttgtcagctcatgaccagtcctagaagaggagtcgagacataagccaccttcagaggttcaatggaaactttaaaaccataccaaactcttttttaaaattagaattaacaagaaaaaaaaaaagggtggggtttatgagccttagttcttggaggattataagagtacttccccagttttgaggctggacagttaatatactttatatcaattatacatttaatataatttaatttaaaataatttaaagattcttaggagatagtctgactttcctgacctagatgggaatgatcagatagggattttttttgtggcacaggctaaatttgatggtgacatttatattgttgagaatgttacatcttattttaccacaacttttaaaaaatgttacatcttttgcagtaggatcagttgtgaggcacatagtagctgaggctccatggagccacctttcatttctttcagtcagagaggaggacagtctctgtctctgcatttctggtgtcttgcttgtcggtggcagagccatgcttgccggcatttgcttaggcggccatagtagttgctaagtgtacaggtgactgggcagggatgggaggtggccacaggtcagagacaagtgctcagtcagtccctggtgccaggactgtgtgcctcggtgccttgggaaatggaagctccctggtgcagctgcagctgtgggtggaggtagagaagccagcaagaccttggtcttaaccccgtgttcattttcttgctagctgtgtgacgttgggctacctcgcttctctgagtacaaatggtgtgtggtgaatgggtcccaggtatgctacgagctttgagggctgctctttttctcttcatagcgataagtgttaaactgtctttcttaggaaacgttcacagacttgcaacagctgatgtcctctgagtactgtctgactccctcaggcaagttcctgaattcagtaccatcattattatttttgtgtaagactttgacaaagtatagcccctgccaccagagcagcctgtacagtgggtctctaaggtgggacctgccccgggcctgccatgcacgtgtgtgaaacagcgtgaaaagtgtcgcggtaaggtgaccctgggttacccaggcaaggctcggtgtttgtttcagaaagcagagaagtatgtaattgattttaaaagtttctgtttaaaatatttggctatgttttagactatgaaggaatgaactttgcttctctggataagaaagtcacatacattgttccagctccaagtttgttcggccctcgccacaagtggatgtagcgtttggccctttgtgtgccttgctggtgactctggttttgggagctcggatatgtcccagaagcaggcttatggcacttctgtagctcccttgctacccttcctttgtgtctagataagtgactgacatgcttttctttggtctcaggaaagtgggggctcagcaagaactgattaccgagccattcaactagccaaggaaaaaaagcagagaggagcggggagcaatgcaggtgaggccgtgtgtgctgcagccggacgagcaagggcctgagggttctctgtcactgttactggcagaagaaacacagcaggtgtttctgtgctcttggttttacttttctgttcagaatacccttttatcaactccttagttttatttgaacttaagggaaaaaattagtaacaaaattcccagcatcagtatgaacatattttatttgcctaaacaagctttgtgaaagttaagcgttcaaacaccagtgtcagttacctggaaggctactaaggtaaataagcaaagcaggccagttgtcaggaaagcagagattgtgcctggtgctgaatggccttggggcctgatcttggcatggcagagacctggggactgccactgtccccaggtacgtgtacatggagccaaactgtgtgtcctgtggcattgtcagagttatgttgaaatcttatttgaaaatgttagcaacttacttgcatttttaaagaccaaacaagagctggtaacctatggcctcaagcatctgtccttcctaaaaatggaatagtgggatgtagtgcttaatggaaactgctaaatctttttctaaaaactaacagtggatttttaaaatatattgttttttgtgtatttcatttgtcctttgtatttatctaaaagggttgatatgattttatatcttgctctctattcctaatagtattatgacttcttatttaaaataaataacaattgccggttttctgttaatcagttttcttaaagccagtgtttcactatagtgtatgcatcagtgtgaattgtgacttaggaagggacacctcaacagttcacaaagtaccagaatggaacttgcagagataatagaaggaagtgtggtggtgaaatttgtagaaagagttgaccatataccaaggaaagttcatgaaggaaagcggatgcctttattgaacctggtagataatcttgaagaaaaaagagacaaacattcaagtatataacacgtgtcctatttattacattgctttggagtactatctataaaggaggtttgatgttttcattactgtttttgtaaatatttcagcattatctttaaaaagtaaggacattggccaggtgcggtggctcatacctgtaatcccagcactttgggaggccgaggtgggtggatcacctgaggtcaggagttcgagaccagcctggccaacatggtgaaacactgtttctactaaaacacaaaaaaattagccaggcgtggtggcacgtgtctgtaatcctagctacttgggaggctgaggcaggagaatcgcttgaacccaggaggcagaggttgcagtgagccgagattgtgccactgtgctccagcctgggtgacagagtgagactccatttcaaaaaaaaaaaaaaaaagtaaggacattaaaaaaaattatagccatctaatgttgccacttctttaaaaattaacagtattttcttaatgtcagtatctagcaaatgttcaaattttcagttgtcccagatgcctcaaatattttatgtaactgtctgttggaatcagaatccagtggggttcatatgtcactactggttgatacatcatctcttgactgtttgacagctgtagggttctctgctaggtcttgcctggtttttgttgaagaaactgattgttctttcgagtgtgccagtctggaccttaatgatcacatcactgttttaataggttccttcgttttttttcttttcctgaaaattagtagttacgtttagtggttagatctggttggttggtaaaactccgctgcaggtgggagtgggctcttgcaggagacccccagcctctggtggcaaccattgtgaccagatactggatccactcatttcttaggggttactctaaacggtggtactctaaatctgtcattcctttcttacttatagctgggacatgtctataaagcgcagcttctcgtttttttaccctgaggtgcagttcatgatgtttgaatctgtgtgagtttcttagcatcctgcagtgatggtcagagtattttaatgcactcattggtttaaatacttcatacacttctaagggaaatggaaacctggtacctgctaggtctccgtgtgtgagtgcagcaggagaatgtcctcgtgagggtgaggctgctgtcagtgccacccacatccttgaaaagcccctccaggtgcctcagccagtgcaggaaggccaccgtctcttttccaaaacatgcagggcactggtgtcttcccgcgcccatgggtctgctgtggttttagacacatattcctgcacagcgctcctctgtgtgtcttgtcacagtgttgcatcctctggcggggatgcctttgcccgcctcccctcaaagcagcatcctgcatactcatgctgcatttatcacagctgagagtcccctgtggccgcagtcctggcagctgaatggcagacttgatgtgaatgtgaccagactcccccagtgcccttccctgttccaggttccatgtgcatttaattgtcacccctccccgtctcctctggtctggttgagggccttggccctcccttgtcatgatgctttcaaagaggatgggcctatcgctctggaccgtcctccctgtgggcctgcctgatgtcttctggagatgagacccgggctgggttgctggagacgggggtgaggtgccctccccacacatcctccctgggccatgctgtccacacggcagatgtggtaacctggatcactggttagggtggtagctgctaggtttcttcaccatcaacttcttgtttttccctttgtaattaactatcttgcagtagatgctttgagactgtatgtggggcttgggggtccctaagaccaccttcacttctaatagcaactgcaagcttgggggtcctcaagaccacccttaggtaattctctagaaggactcatggagctcactgatagctgttgtactcacggctaaggcttattgcagcaaaaggacacagattaaagccagctgagggaaaaggggcccaggcaaggcagggcccatgagagttcctagtgtgacgcttcaagtgtcctctcatggaggtgtgaacagtgccaacttctcccagcatgtgacagcacccagagaccattgccccccagggaagcccacctgagactcactgtctggagttttgttgggtctcagttgtgtggattggctggccttagtctccagccctccagaggctgagctggcgctgtgtgcccgaggcctccaccacagggttagcacagactgtggaagtggcccagggcacccagttagacagacattcttaccaggcaggactttccaagggtctagagatctcccaggagctgggggcagaggcgaggcctctctggcagggttaaccctttgccttgcactgcaagtgccctgtttctctttaagctttcctctcatgtaacactcagcaggggctttttgcctgtggggtttaatggtgattttccatttcccttattcttgtgtacttattaattttataaggaagagctgtctcttctccctcatttacttattcgcagtatggattcaatgatactgattcttttttttttgtttttttttgagatggagtcttgctctgtcgccccggctggagagcagtggcgcgatctcggctcactgcaagctccgcctcccaggttcacgccattctcctgcctcagcctcccgagtagctgggactacaggcgctgccgtgcccagctaattttttttttttgtatttttagtagagacgggggtttcaccgtattagccaggatggtctccatctcctgaccttgtgatccgcccgcctcggcctcccaaagtgctgggattacaggcgtgagccaccatgcccggcctcaacgatattgattctttgggctgtagtcagtattggattatgatcaatattatcaccatttattttgttgctccagttcttccagctgtggccaatccttcagttggattcttgtgccccatcaacattctccatcctggctttttgttttgagcacttccttccttcctagcaccaccaggctcttgtattatccctgtccctgccctggaatcgactcctcctccagagagccctggtttcttttgttagaggatggtatatagaatccaacatgcagacactcggtggacttattgttactggggttttgttatactagggtttcagtggtcagtgctagtatttatgtatgttaacccacgctgtgctttggattcaggctatttcaaattttagataatatggtacatatattattaataccactagttactacattggtacttttcagcaaaatatatctaagtgggatcaaatgagactgtaaatagctttacatcagttcaggtcagttatgttgctaaattacttttggcattaagtttagggaaaaaaaattgggtttgggattttttggtttcaacatttgtgattgagagactatggacctgtaataagtccaagaacagcagttgcagtgtaacaggactgttaatggaatcgggtcatttagaaacagtcaagacttcgctgttgtgcatgtggttaggagccagtgcacacgtcagttcttaggaaatgtacagtctgagcaatagcatttgaaatccaagactcttcccattgtgttgctgttgagtgtagaaaataaaatgtgtgaatttctttatcttgagtattgagattctccccttagaataaaacaagaatttttctctcagtgtaaaaatgtcaagttttattcttgaaatgaatagcaaagttaagcttaaaaacgtgaacagcttcagaactataaatgggtatgtatacctttctgctgtctaagggcagagaagggaaagaaagtgtggtgcttatcagaggagacagcagcaagacacattgtgacagaaaaccaagggtatcctgtgtcacagtgaagtgtaatgagggcacctctcctttcaagagacgaagattgaatacatgggaagcacactctccgctgtgtgttgtctaggagaggtgcaccctgtatggaaatatttgggaaggttaagattaagacagggtaaaataaagcaaaggcaaatcacaaagcaagggctaatgttaatatgaaaagtgcagaattcaaggaaaaagcatggggacaaagaagatttttcctctttttggttgctgttcatgtgtagcctacaacagaactataagacctatagacatttatatgaatatttatttgaaaacgtataatatcaaacaatgtaaaagccaatagaaatctcagataattgaatgtatagaaactagcagtttgaaagtgattagttcattatttgctgatcaagcagaaaaataagcatatgaaagatatttaaaatgggattaataaagttgatttaacagatcctattccatgtcctttgaatatttatagaaattaaatggaacaaattagggcatcaggaaaactatacaaaagtctttaccaaaaaaaaaaatatatatatatatgtgtagtactacctatatatatacataatatatagtactgcttatatatatatatgcctatatgtacacatatatatatacatgtataggcagtactatgttttctgatcataatatgttaaattagtaaaaattacttggaaaacaaaacctctagacaatcaggtgaaagaagaaataaaagcgaggctgggcgcggtggctcatgcctgtaatcccagctcagctactcaggaggctgaggcaggagaatcgcttgaacccgggaggcagaggttgcagtgagccaagatcgcaccattgcactgcagcctgggcaacaagagcgaaactccttcgccaaaaaaaaagaaaaaaaataaaagctaattacaaatacaggaaaatggataggccatgtgtttataagtttgagctcttgagccagtgacttccctgcacgttcagctttctcctttgtgaaatggtaatagaagcacgctgcacttgggattcttgtggattacatgtgagggtcttagaaacacttgatgtgtaagccaactattatgtattactgtatatggaacacaagggatgtagccaaaactaaatgcaagtttgtgcctcagatgtcttcctatcagaacagagtcaaatccagattttgatgcttaaatgtgacagcttattcagatttagaaaaacttttggtatgggccaaagaaaacatatccttaaggggatatggcccctaggccctcattttccttttctgtctgagcaattaaaaaaagcattaagtaaattccacaaattctttggaatacctagagataaacagatatcatgttaactgtatgataataagttagaatacttgcaacaaaatgcagagttttctaggaaaacaagtaatcattcagaaataagaatatgaatagttcctcagttctccccctttgtggaatttgtgcagtaaatgctgctccaaagctctgtggaaaacagaagcttcccatgaaaaatctgacaagggtatctctcagaaagagagctgtaatcccagcactgtgggaggctgaggtgggagtattgcttgaggccaggagttcaagaccagcctgggcaacgtggtaagacccccatctgtaaaaaaaataataattagccacgcgtggtggtgcacacctgtggtcccaattactggggagactgaggcggaagaatcgcttgagcccaggagatggaggttgtcgtgagctaggatctgccactgcactctagcctgggtgacagtaagacccttgtctcaaaaaaaaaaaaaagaaaaactgcagattggtgactcttacgaagatagatggaaatgttctaaataaaacacacttaggatctggcaatatatatatttaatgtactattctgaccaaatggagcttaatcagatagcttgagaatgatttaatgttacgaaatctgttaattgcattatctcaataatagatcggtgaataactttattattctctcaacaaatcctgtatttgatttacaaaatggatgggaggtttcagggagagcagttggaagcctgtgtgctcacctgttaggaacgagagtggcaacagcagtggggaggagtgctcggctcctgcacctgtctcgatggcagagcccacaggcttggctgacagacgtgggatgaaggaaagagaagcctctcactcttcccacagcattgtagtgcgatttcatgcagaagtccaagcaggttccaggacaattgtgtaagaagctatggacaagaacgtctaagaaaacggaaaatgacatagaggatttgcactgtagctaagacttcacgcaaggctgtggcagctgaaagcatgttctggtgctggggctgcgtggcagagccaggagcccaggatccagcgcactgggcaccgacctgggacctggtcatctttgcgtgtggaaaagatggcatttccagttattgacaggtgaatgctggccttttagggaaaaaaaaatattagaattccatacagaataaagaatgaagatgagaggttaaaggtttttctaaggcatgaagagctgtgggggcagcctgcccttgttctttttgtcgtgtgtccttcacatgcagtaactctgttcacgcctcacaaaaaccctatgaggtggagacctgccatcaacccttcctgcacgggtgccactgaggccccaaggttaaatcatttcccagagtgtatcagcagaggcacagccacagagacacgtccgcacagagagctttccagatcaccagtaacagcgtgagatcatggtgcagaaggtcatgaggaggatggcaacgagcgagacacagccggttggtgctcacaaggacattggtagatctgactgagggccaggtcggctaggccttcccaggtgacaggagcccagtgccggccttggtgcacacagcgcgtccttgtgctttctcaggagagcttcactggggacactctgtgatgtttttggagggtcatttggtaatgtgttcaggagccaaaaaatatgcataatattcagtcttacaattacattttttgaatttatctcaaggaaatcccagggatctgtgtgaagctgcacatgctgctgctgctcagtgcgggactgtttataatatttgtaactcaaatgtccagaagaactgtacactctgtgcatgttttcagtaagttcatatttgtaagaaaaagtgggtgtgttgagagacaaatttttgtgtacatttacctggaaacaagcagtagtacacatatgcatgcatgaagtggtgttttcctgagtgttaagattgtgaatgttttattatgatcatttctactttttctattggaaaatactttgtgtaattaaaacatgaagatggagctaccatcaaaatggtg

SEQ ID NO: 1264 - DNA, 521 bp, HOMO SAPIENS
  misc_feature (96)..(96): n is a, c, g, or t
agtcaatcagtattaggcaccagagttaccacagtgagcaagagagacatggaccccttctgcaagatgcctagacaattaaatggccaatgaaanctaaagtgaggtaagggttctgatgtgaaaagctgagggtgtgatgaggacaagtggcagaaagttcacctggcttggtggaagggaaggtcagagaagacctcttagaggactcagtaatgtccattgaggattttaggttgaagggaatgtttgaagtttgagggcccttttgaggaccaccaagaacttcactgtgctgtaggatattgagcaggaggtgaagctagagagatgtgtaggccacattgcagagtttgaacttggggcaatgggaagccattgaagggttttaaacaacccaagtggtgcattcttctgtaaatgttagagagatcagtggctgccctgcacatcaaaggggagaacgattggagacaggcagattagatggaaggacggagttgtactccaagccaaagatg

SEQ ID NO: 1265 - DNA, 1861 bp, HOMO SAPIENS
ccgttaaggaagcagcacatcgctgcattcggctggttttcagggtcttgttcccaatcagtttccagccaacaccagggtgtcctagtccgcagaggtgtgggggacacactccataatctctacttttctttttgtgcagctgagtcatggagctttcagccccagcacatggctcctccttaactgcgtctgctcaacctccctcagccctgtgaacagcatccccgcacacagacgcagagcaggactctctctgctgccacttcaccttcctgagagaggaccagcggccagagcctcagtgactgccaccctggaggacagggcacaacaaccgtttctggagagaatgggaggattccagaggggcaaatatggaactatggctgaaggtagatcagaagataacttgtctgcaacaccaccggcattgaggattatcctagtgggcaaaacaggctgcgggaaaagtgccacagggaacagcatccttggccagcccgtgtttgagtccaagctgagggcccagtcagtgaccaggacgtgccaggtgaaaacaggaacatggaacgggaggaaagtcctggtggttgacacgccctccatctttgagtcacaggccgatacccaagagctgtacaagaacatcggggactgctacctgctctctgccccggggccccacgtcctgcttctggtgatccagctggggcgtttcactgctcaggacacagtggccatcaggaaggtgaaagaggtctttgggacaggggccatgagacatgtggtcatcctcttcacccacaaagaggacttagggggccaggccctggatgactatgtagcaaacacggacaactgcagcctgaaagacctggtgcgggagtgtgagagaaggtactgtgccttcaacaactggggctctgtggaggagcagaggcagcagcaggcagagctcctggctgtgattgagaggctggggagggagcgagagggctccttccacagcaatgacctcttcttggatgcccagctgctccaaagaactggagctggggcctgccaggaagactacaggcagtaccaggccaaagtggaatggcaggtggagaagcacaagcaagagctgagggagaacgagagtaactgggcatacaaggcgctcctcagagtcaaacacttgatgcttttgcattatgagatttttgtttttctattgttgtgcagcatactttttttcattatttttctgttcatctttcattacatttaaatctctggaccctggagcacttctaatgtatcaccccatggagtcattgttctaataatcaccaattcagactcagatcctcgtggtctatggagcatgctgcttgctgtctgtgcagctcccatttccccttcttcctgatagacttggagctgtgtgcctccactccaaggctgcctgcctgctgtaaacactattccactctgtctgccaacaactgcttcaggaatgggcctgagatcccatgcaggtccctgagaagtgagtaaaagtccgcagaggtggggatggaagatctctccttagatagaacctgtcttcctccctggcattgtggggtctgggcgtgacactgggactctcagcagctttgtgctgccaacctgagattgaaggcagtgcctcagagcagcacagagagttggggccccctgagccctgagccaccagccctgcagcctgccctatctccgcatttccagttgtattagccaatagatttcctacttatttaagctatttgagctccgggtctcttctacctgcattctaaaacattcaaagtaataaaaatttctccacatt

SEQ ID NO: 1266 - DNA, 7932 bp, HOMO SAPIENS
tggcagctgaacaggggcactgaggtgtcggccggcggggcagtggcccggagcggggggcgggggcgttgatcatgtttccctttgggccccatagccctggaggggacggatcggccggagccggggctgaggagccgacgccccacgaggggcaggcagcagccaccgggccgccctcgccactacatcccggggctgatgcgacccatccccctccacccgcccgaagccctcgccgccccggcgccccatcgctgtccccggccccgcgctccggagagctagggctgcctggagctccggagtcctcaactgcctccgccccgggagagccgtcacctccctcccctccgtgccggcggcccgggccagactgcagggccaagagccggggccgacacggcctcggcgcgggcctgggcggccctggcgctaggctgttcgggtggctgaaagagcgcagcctgggccgcgggctgttcgtggacccggcgcgggacaattttcgcaccatgactagcctctacggttccatccaccccgcggactcggtgtacctcagcacccgcacccacggcgccgtcttcaacctcgagtactcgcccgacgggtcagtgctgacagttgcttgtgaacaaactgaagttctgctttttgaccctatatcttcaaagcacataaaaacactttctgaagctcatgaagactgtgtaaataatatcagatttcttgataaccggctgtttgctacctgctctgatgacactacaatagcactatgggatctgagaaaattgaacaccaaagtatgcactttacatggtcacactagctgggtgaagaacatcgaatatgatactaatacaagactcttagtaacatcaggatttgatggaaatgtcattatttgggacactaacaggtatacagaagatgggtgtccacataagaaattctttcacacacgttttctcatgcgaatgaggttaacaccagattgttccaaaatgttgatttcaacgtcctctggatatctcttaattttgcatgaccttgacttaactaagtctttagaagtaggcagctatcccattttaagagcaagaagaactacttcaagttcagatttgaccacttcatcaagttcatctggtcctagagtttctggctcaccttgtcatcatagtgattctaattcttctgagaaacacatgtcacgagcctctcaaagagaaggagtttcaccacgaaatagtcttgaagtcgtaacccctgaagttcttggtgagagtgaccacggaaactgcatcacgtccttacagctgcacccaaaaggctgggccactcttcttcggtgctcaagcaacagtgatgatgaggagtgtacttgtgtctatgaattccaagaaggagctccagtgcgacctgtctcacctcgctgttctctacgactgactcattacattgaagaagccaatgtaggcaggggttacatcaaagaactttgcttcagccccgatggacgaatgatttcttccccacatggctatgggattcgcttgttgggatttgacaaacagtgcagtgaacttgttgactgcttgcccaaagaagccagtcccctgcgggtgatccgttctctgtactctcataatgatgtggtactgacaacaaagttctctccaacacattgtcagattgcctcagggtgccttagtggacgggtttctttgtatcagccaaagttttaggcacaacttacatcaaataaggaactcttctggtgtttgacttaggaattgcttcaatttagatgaagtattttctttttagaagatcttataagtttgggtcaagatcctggttcttatgggtccatgaacacacttgtgaccttagtacttggtcatccagcatcatacaggcatctccaagttagactctatgcagcatcatcttttgcagcattcctctgctcctgctgatctgtgccactgaactccagttcttctggtcattttgcatggtagctcttgtcacgttccttccttcctcactctctatttctctttccctctccctgtccctctctttctttgtgtttgttgattttggtgtcaattttgtggacatttggcaggagttttgactggggtaggagaaacccatgacattagaattgaataaaacctagaagttggatattggcatattggttgttgaaaaataaatttcatcctcacttatgagtatacttggccttttaaagttactgttatgtttatctatattgagcacagataatggcattattcttataattgttaagatagtcttgcaacaaaatgtcttttaagtttcctgttaaaattataaaaagattttcatggtgagagggattttattgtgaaattctagaaaaaaatattaccacctctctttgtaatttactttacttgtatgaatttaacatctctagcatgtatccttacttgatattttgttcctatcaacagcattagaaaggaaaggagacagaatgagctttggttatttctattgcacagaaaaggatttttaaaattagattagtataatatctggccatagagtgataagaacaatatgacttagattttctgtatttcatctgccagattatttgaatcacacaggatgatgtgttaacagtattagggtggaagaggaatcaagagtaaagaggtaggggtttactcatttttcttccctgagccaggtgtgacaagccaactctgtcaccattcgtgaggggagagttgcagtcctcttcaagctgttatcataagtacagtagtcagctacttggatatcaagactaagtgctgatatgaagacttgcctttgtgttttgttatgaaacacgcaagcataaagcaggactcaagcacaaggctgactgttctactttgaataacagcttccttgcagtctcctccacatgggtggtactgtgtttagaagggattaccaaaggctggagcgatttaagctatgcactagccttgccctcttaggttgcattctctttaggccactggttctcaaacattagggtgcactgtaaccattacagagcttgtgaaaagtgcagaaacctgagcctcaccttatgagattctgattcagccagggggaggacaggaatctgtatttttcatagcaacctcaagtaatctttattctgagggtctcgggattgcaggttgaaaaacacaaccttaatcagcagtaaattcttctctactcggccaggcgcagtggctcatgcctgtaatcccagcactttgggaggccgaggtgggtggatcacaaggtcaggagttcgagaccagcctgaccaacatggtgaaacgccatctctactaaaaatacaaaaattagccgggcgtggtggtgctcacctgtaatcccagctacccaggaggctgaggcaagagaatcacttgaacccgggaggcagagggtgcagtaagccgagattgcaccactgcactccagcctaggcgacagagcgagactctgtctcaaaaaaaaaaaaaaaaaaaaaaaattcttctctacccatttgggcttaagacaattcccagaaagtgttttcattatttaaaaaataataatagtaaatgaaagcaattttagaggtggaaaataccttagaatggaatcatttgcattatttgacaaatgagagaagtgacatgacttgcctaaggtcatcctgcaaagttagtggcagagttaggacttgaattccagtcttctaattccttggtcagggcaatttctactgtgttatgctgtctgttagaaataatgacttatggacactttgtctttaagttgtattattgtaaatacccttaaactggccaatagattttagaaaggcaggcatgggagtagatgctgagaattctagccataagaagaaaagtattttaaatcttacagaaatgtttaaacaacccaaaatacatgaataaaaatgacatttctttgtaggacctgccaactaactattcacacacatttatagaggttataaggatcttggctctagaacaaatttttgaaattagatcattttaccatggatgttaacaaaattggaaattttttgtcactgagaaaattatcacaaagcacagtaaatacatatacttaccatacattttgtaaaaaacacattttttaaagaaaatagggatgggtatggtggctcacgtctgtaatcccagcactttgggaggccaaggtgggaggttcacttgagcccaggagttccagaccagtctgggcaacatggcgaaaccccatctctaccaaaaatacaaaaattagatgggcatgttggtacacgcctgtagtcctagctactcaggaggctgaggtgggaggatggtttgagcctgggaggcagaggctgcagtgagccaagattgcactattgcactccaccctgggcaatagagccagatcctgtctcaaaaaataaaaatagactgggcatggtggctcatgcctgtaatcccagcactttgggaggctgaggtgggtggatcacttgaggtcaggagtttgagaacagcctagccaacatggtgaaaccctgtctctaccaaaaatacaaaaatcatagccaagcgtggtggcaggtgcctgtaatcccagctactcaggaggctgaggcaggagactcgcatgaacctgggaggcagaggttgcagtgagccgagatcgcaccactgtactctagcctgaccagcagagcgagactctgcctcaaaaaaaaaaaaaaaaataaaataaaataaaattagttttggaggtgaaaacacccaaactgttattatttaaaaatacctaccaagtactgtggtcatattgacattcaaaagaagtttcataaatcgtatcaactctggaaagagttcatgtcagatgctagaccagcaagttacccaactcaaaattcagccaatgattctttactatagagtacctatcatgtgtcaaataatatacagacttcactactaaccctcacaaaaacttgcagggtaggtggaatgagccccaatttaatttggaggtaatagtgggtcagaaagattaaatgacttgccttaagtcatagagttagcagtgagtggcagcactgggattcaaacccaggtttgtgtcttgtccaaagcctgtgcttactgctttaccattgtgctctttagtttgtaaagtatggtaagctggcctgttatttgtttagtatcttctggattttttttttttaattatagagctagcttaccgtgtgtatcatgtaaaaaaaattcataagattaacaatttccatgagaatatcataaactcagggcacacattctggccattcctgactaaaaaacttcaagcagaataagcagctataaaatagaaaagaaaaattaaggataaacggcattgtgaaaaaaaaccgagccacacagatgagaattaaaaattaacagccagcaaactcaaaagaacctttgtcctccttgagatatggtgatgatcaaaaagttagcaaggaatattaatcaaggaattaaagggcattaggaatgctatagtattggaagaaattacatcttaacatttcaaagccccatttcacttaagagtaaaatctaatctgatgttttttactctgaattttattcagtaatttttattcataattcatgataattggtaatgtagtataattgttagtaaatgcagtacaaattgttctactgttttaaaaagttttccgcagaacagtgcatttatggcaatgctatgtttaatgagttagggacatcaaatatatagtagttccttattttcagttgtgaaaatgaaatggctaaagcagaagagacgtctattttagtcttttaaaaatgtgtgtgggtggtcttttttcctcagaagcccaaagcacatgtatattttgttatttctccttgctatattcctgagactatactaaaaactttaagaaaaggaacaagaaaaaggtaaattcatgtgttccccactgctgtgtctagaaccaagatcacattatatcattgttaaaattgtgttatctagaaagtgcaatatagggaaaacactctaagaatcttttaaaagcctagtgtttcccttatttgtcagaatatgtggtagtggcatccataagtatcttttaacttgcatttagcaggacaaatagtgtgatacttatactgatgacaatcatccccatttaatgaccagcagtcactgagcgctgtgaaaattcactcagtgataccccgtgttggtcttgaaggaaaccgtacatatgaatttttggatagctaatgtatatctctcaagtgccaacatttaaaacttgtaattatttttgatgtgagtatttcaggtatgttagtataccttcctgccttcttcttaaacatcatgctcagtataattcacattttcatgatgaaaagttaaagttatattcataatgtattattataagtatccagctctgatgtatgtaaaacacttcataaaatgtaaagggctataacaaatatgttataaagtgattctctcagccctgaggtatacagaatcatttgcctcagactgctgttggattttaaaatttttaaaatatctgctaagtaatttgctatgtcttctcccacactatcaatatgcctgcttctaacaggctccccactttcttctaatgtgctgttatgagctttggacatgagataaccgtgcctgttcagagtgtctacagtaagagctggacaaactctggggggacacagtctttgagacagctcttttggttgctttccacttttctgaaaggttcacagtaaccttctagataatagaaactcccagttaaagcctaggctagcaattttttttagttgcaactaagtaagatatactacaaactaaggatgctgctagactaaggaataaacagcaaggtaccaaagtacagcaaagcaacaacaaaggctctgtatttgcagaggggtctatcatgcttttaagaaaaaagaagagtacaggaaaaaaattcagatagacataagagtattttggatgccattaaactttgtcaataaccattaaaacataggcttaaattatcacgtattgttacaaagacacagttttgtctcattataaaataagattatatgaaatttatattctagaaatgattccaaatcatgtcctaagaatttctcccattcaaatgataatggaaattactgtcaaaaggaaaatctcaaagttaccattacgctgctctcttgtaaatgaactagggataaagatatgggttttatcaaaagccctaaggaatatatctcacattcacctcctatatgtatgtgtatatataaatgccactataaatgaaaatgtcacccagagataataaaataatttttaaagtttaaatctggtccaaagtctttaaaataggtagattttcagctttcttaagtttctccctcatttagatttcatggtttttacataaagggtgaatatttgaattttcttttaaatttcactgcatcttcaattgcccaactgtgtttcctgataaattttagattcacatttttaggaaatttggagtattccagacaatatactagatacccagaaacttttctcagtaggttctgaggtgttttaagttcttatgctagactgtaagctccttgagggcagagactgttttatttattcttgtatcctcagtgcctggtacaggacttgacacagagtagttgttcaataaatatttgttgaatgaatcaaaaaaaaaaaaaaaaaaaa

SEQ ID NO: 1267 - DNA, 7760 bp, HOMO SAPIENS
gggcggtgcggtgcggaagcggaagtgaagggtgcgcttggcggcggcggcgggagctgcggagtcgggaatcaaaacaaagggcctggggggggcggggggaaggcggcggggccggaatgtgagcggaggtggagccggcggcagagggtggaagaatgaaagaaaagaaagatgaaaggatgttgaatcactttgcatggctgtatgatggaaggaaacggaactgagaactcctgcagtagaacacgtggatggcttcaacaagataatgatgctaagccatggctttggaaattctctaattgcttttctcgtcctgagcagacgctgccacatagtccccaaacgaaagagtacatggagaacaagaaagttgctgtggaactaaaggatgtaccatcaccccttcatgctggctctaagctttttccagcagtcccacttcctgatattcgttctcttcagcagcctaaaatacagctttcttctgtccccaaagtaagctgctgtgctcattgccctaatgaaccctccacttcgccaatgcgttttggtggtggtggtggcggtagcggaggtaccagtagcttgattcacccgggcgcactgttagactcgcaaagcaccaggacaatcacgtgtcaggtagggtcagggtttgctttccagtctgcatcttcactccagaatgcctcagctaggaacaatttggcaggcattgcaagtgactttcccagcatgtgtctagagagtaacctgtcttcctgcaaacacctgccctgttgtggaaaactccacttccagtcatgtcatggtaatgtgcacaagctgcatcagtttccgagtctgcagggctgcacctccgctggctatttcccctgttctgatttcacaagcggggctccagggcatttggaagagcacatttcacagtcggagctaacgcctcacttgtgcaccaactctttgcaccttaatgtggtacctccggtttgtttaaagggctcactttactgcgaagactgtctaaacaagccagcaagaaatagcataatcgatgcggctaaagtctggccaaatataccacctccaaatactcaacctgcacctcttgctgtccctctgtgtaatggctgtggaaccaaaggaacagggaaggagaccacgttgttattggcgaccagtctaggcaaagctgcttcaaaatttgggtcaccagaagttgcagtagctggacaggtgctagaaaacttaccccccattggagttttttgggatattgaaaactgctccgttccctctggccggtcagcaactgctgttgtgcaaagaatccgtgagaagttttttaaaggccacagagaagcagaattcatctgtgtatgtgacatcagtaaagaaaacaaggaagttattcaagagctgaataattgccaggtaaccgttgcccacatcaatgctactgcaaagaatgccgctgatgataaactgcggcagagtctccgcagatttgcaaatacacacactgctccagccacagtggttcttgtgtcaactgatgtcaattttgcattggaacttagtgacctgagacacaggcatggtttccacattattttggtccataaaaaccaggcctcagaagcactgctgcatcatgctaacgagctgatcagatttgaagagttcatttccgacttgccccccaggttaccactaaaaatgccacagtgccacactctgctctatgtttataacctaccagcaaataaggatggcaagagcgtcagcaacaggctcagacgcctgtccgataattgtggtgggaaagtgctgagtatcacaggctgcagtgcaattctccgcttcataaaccaagatagtgcagagcgcgctcagaagcgaatggaaaacgaagatgtctttggtaataggatcattgtgtcatttactccaaaaaatagagaactctgtgaaacaaagagttcaaatgcaattgctgataaagtgaagtctcccaaaaaacttaagaatccaaaattgtgcctcatcaaagatgcaagtgaacaatcttccagtgccaaagccacgcctggaaaagggtcacaggcaaattctggatctgctacaaaaaatacaaatgttaaaagtttacaggagctgtgccgcatggagtcaaaaactggtcatagaaacagtgagcaccagcaaggtcacctgaggctggtcgtacccactcacggtaactcaagtgctgcagtgtcgacgccgaaaaactcgggggtggcagaacccgtttacaaaaccagtcagaaaaaggagaacctcagtgcccgaagtgttaccagttctcctgtagagaaaaaagataaagaggagactgtattccaagtgagttacccgtctgcttttagcaagttagttgcatccaggcaagtcagtcctctgctcgcatctcagtcttggtcttctaggagtatgtctccaaaccttttaaacagagcatccccgcttgctttcaacattgcaaattcgagcagcgaagccgactgcccagacccatttgcaaatggtgctgatgtccaagtcagcaacatagactacagattatcccggaaggagctgcagcagctcctgcaggaagcatttgccaggcatggcaaggtgaagagtgttgagctcagcccccatacagattatcaactcaaggctgttgtgcaaatggaaaacttacaagatgcgatcggtgcagtgaatagcctccacagatacaaaattggcagcaaaaagatcctggtctcacttgccaccggggctgccagcaaatcactctctttactgagtgcagaaacaatgtctgttcttcaggatgcccctgcctgttgcctgcctctgtttaaatttacagatatctatgaaaaaaagtttggacacaagttgaatgtgtcagatctatataaattaacagacacggtcgcaatccgtgaacaaggaaacggacggctggtgtgtctcctacccagcagtcaggcccgccagagccccttggggtcttcccagtcacacgacggctcctccacgaattgcagcccaattatatttgaagagttagaatatcacgagcctgtctgcagacagcattgttccaataaggatttcagcgaacatgaatttgatccagactcttacaagattccttttgtgattctttctttgaagacatttgcgccccaggttcacagtcttctccagacccacgagggcaccgtgcctttattgagctttccagattgttacattgcagagtttggcgatctagaagtagtgcaagaaaaccaaggaggtgttcccttagaacacttcattacctgtgttccaggtgtaaacattgccactgctcagaatggcatcaaagtggttaaatggattcacaacaagcccccgcctcccaacactgacccttggcttctgcgttcgaagagtcctgtaggtaacccccagctgatccagttcagtagagaagtgattgacttgctgaaaagccagccatcttgtgtcatacccatcagtcatttcatcccatcctatcaccatcattttgcaaagcagtgccgagtgtcagactacggatactccaagctgattgagttattagaagcagtgcctcatgtattgcagattcttggaatgggctccaaacgtctgctgacccttacccacagggcccaggtgaagcgctttactcaggatttactaaaacttctcaaatcccaggccagcaaacaggtcattgtgagagaattctcacaggcttatcactggtgtttctcaaaggactgggatgtcactgaatatggtgtttgtgagttgattgacatcgtatcagagattccagacacaaccatctgcttgtcccaacaagataatgaaatggtgatttgtatccccaaaagagaacgcactcaggatgaaatagaaaggacaaaacagttctccaaggatgtcgttgatttgctgcgtcaccaaccccatttccggatgccctttaataaatttatcccttcttaccatcaccactttggccggcagtgcaaacttgcgtactatgggtttaccaaactacttgaactttttgaagccatacctgatactttacaagtattggaatgtggagaagaaaagatccttactctgacagaggtggagcggttcaaagctctagctgcccagtttgttaaactccttcggtcccaaaaagataactgccttatgatgacagatctccttacagaatatgctaaaacttttggttatacatttcgtctccaagactatgatgtcagttccatttcggctttaactcagaaactctgccatgtcgtgaaggttgccgatatagaatctggcagacagattcagctgatcaaccgaaagtctctgcgatctctcactgcccagttgctggtattgttgatgtcttgggaaggaaccacccatctttctgttgaggagctcaagagacattacgaaagtacccacaacactccccttaacccctgtgaatatggattcatgaccttgaccgaactgctgaagagcctgccatacttggttgaggttttcactaatgataagatggaagaatgtgtgaagctcacaagtctgtatttgtttgcaaagaatgtgcggtctttacttcatacttaccactaccagcagattttccttcatgagttttccatggcctataccaagtatgtcggagaaactctgcagcccaagacctacggccacagcagcgtggaggagctcttgggagcaattccacaggtggtctggataaaaggacatggtcataagagaattgtagtgttaaaaaatgacatgaaaagtcgtttgagttcactcagtctctcccctgccaatcatgaaaaccagccctcggagggcgagcgcatcctggaggtgcccgaatcgcacacagcctcggaactcaagcttggagctgacggcagtgggcccagtcacacagagcaggagcttctccgcctgaccgacgactcccccgtcgacctcctgtgtgcgcctgtcccctcgtgcctgccgtcccctcagctgagaccagaccccgttatcctccaatctgctgatctcattcagtttgaggagcgccctcaagagccttctgaaattatgattttaaaccaagaagaaaaaatggagattccaataccaggaaagagcaaaactctgacctctgactccagctcgtcctgcatctcagcagctgtccccgtgcctccctgcccctcctcggaaacctccgagtcactgctcagcaaggaccccgtggaaagcccggccaaaaagcaacccaaaaatagagtcaaattggcagccaacttttccttagcacctataaccaagctttaactcccatttggaatatagaattaggatgggaaaacactgtctgattctgcacacaaaagtgggtttcaaaaatacatccttttctgtgtcatgaaaaccccccgaagccattgacttcatcttacctgtgttctatcatgtttttcttttccattgaacacagctttgagctgaagtctttcttttcttcttcctttttctttcttttttcaattatttgaagaacttgtggcatttgttaaagaatccttaatatattttaccaaatttttagtaactattatgaaatacaatggtgttccaaaagaagaaagcactaaaaactcaactagcaggaagcggttttgcttccattgagccacgtcggtggtgtcatcctacatgtagcataatagagtctctcagcctttgcttactggtgtttccgacagtattaacccagtgcgtggcatgtctttgaagcaaagcctgtcccgctagcctgtgtgttcacacaccaaaggagaagggtaggcgaggggttcggagtgtattttcaggttggaatgtgaaggttcctggcttccatgtgacttgtaagtgtgccttgttttttatttaaactatgtctgtagttgacaaaagtggcttcatcacaaatttttttaaacgtttctactttggggttccatttaggagctttctagaaagttgaggatgtttgaagcttcccttctgtgttccagtttgatatgggttaggttaaggaaaaggagatggtctcgatgtcatggatttaaagtcagcatttggattacaacacacattattgtgtgtcgagaggcagcattggaaagagcctgattttctaaaatatgcatcaagtgcataaattacaaatcagagctgagtggggaggtgcttcagcagcagcgggatcaatacgatttccactgggaagagacaggaattctacctacacataggaaggccaaggttgatccacttaaccttgttattgtaattttaaagctggtatcggtagctgggaagctttatgtgtgtgtatgtcagctcagcatcttttaatcgtgtctgattttactctcgttacttctcgctgttggaagcatctctgggtttcttgtggcgtctggtgtggaatggccttcctctctaggtgcctgaggtgtccgctgacgggtggcctctcacccccctctagagaaacctgacatttacaatggattgtatttgtccggcaaaaaaggcggattcattcatagagcagaaagaacctgttggcgtaaggtcttccactagttagatggtttcttttggggaaatgtttatatttggtaacttctagaaagccagaaaatggactctgatttcatagcattttgataaaatgccacaaaataagggctatagagagatttttacaagtcagattttttgttccccaaatcttttaaatgaagccagtgactcccagttctcaacacatggccccagtcaagacagaacaccatggaaaaaaccctgtaagtattatggcactctccgaatcctcctgaaggcatttcctctacagacatagtgttacaggaagtgaaatgcaaatgtgcaattttttttaaaggagcttttaaacaaagtaataataattggtgttgagaacatcagttgccttattctaagatttcataaggctgagtttgcacgcttggacttcagttctgctagcatgtaaagagtggtggactttaaaaccgtaagaggtatcattacaagtcacctggaacagactcaaagaacaggttctttgggcaacagacaaagaagaatcaagttctgtgctgtcccgtgagtgtgtctgagtaccattcactggagttgctgcttaggtctgggacgtgtgtgtgactcttaacaattgctgtctgaaaatgagagagaagacttcggaagcacattgtgttcataatgtactccacaatggccagtccaattgctatctatttttttatccagaggcttaattaaatgatgtggtaaaatgatgtttgagcattaagacaatgtaattctttatttctgggtggaaagatataccggattaaatttatctgtttaaaaaaatgacaaaagttatcaccaaaaccccctttcccatcttgcactgtttgttttggattgggtttgggggaaagagatgtttttcttagttgtctactttgtttgaacacttttgttgtggttcaagtgctgttttgtgtgttgggaccaaacagttgtcaataaactttacaagcgagcatctattttgagtttcccaagtg

SEQ ID NO: 1268 - DNA, 3318 bp, HOMO SAPIENS
aacctgctgtcctatgaaggcctctaggtcaccggtgctaaagccctcctttctccaccctccttaagtggaggtaaacgtcccagcaggaagtcaaggctggattggcgctcttcgcgagcaccctgggaacgggagtctgggtcacgggtgctagagccctcccctctcctcccggccggtgtatgggaaattgtccccgcagaaagtaaaggctggccaggccgcccccagcacgtagagggaatgagtcaggctccggctccacactggcacgtagtgggcggatcgcgccggcgctgagtaggaaggagcttcagccgccagcccggaacgcatcataggttagcttttcaagacacttcctgcatctctgacctgttgcacctctgttatcttggcacctctgttatcttagcagcaagcacctgcctcagctgacccttgagccataacccataagctcctgaaaagtacatcaagtctaaagtgaaccagctaactcattaagactggaatcatgagcaacaatggagcagacctaacctttggttacatctcctgttttgtagctatccttttgtttggctcaaattttgtgccacttaaaaaatttgatactggtgatggaatgtttctccagtgggttctttgtgctgccatatggttggttgccttggttgtcaatctgatattacattgtccaaagttttggccttttgcaatgcttgggggctgcatttgggcaacagggaacattgctgttgtcccaattatcaaaaccattggtttaggccttggaatcttaatctggggatcatttaatgccttaactggctgggcaagctcaaggtttggctggtttggattggatgcagaagaagtatcaaatccgctgctaaattacattggagctgggctatcagtagtaagtgctttcatatttttgttcatcaaaagtgaaataccaaataacacgtgttccatggataccactccattaataacagagcatgtgatcaacacaacccaagacccctgttcctgggtggataaactttctacagtacaccaccgcatagtgggctgcagtcttgcagtgatatctggagtactctatggatctacatttgtgccaatcatctacatcaaggaccacagcaaaagaaatgatagtatatatgcaggggcaagccaatatgatttagactatgtgtttgcgcacttcagtggcatctttcttacaagtactgtctactttctggcctactgcatagccatgaaaaatagtcctaaactatatcctgaagcagtcctaccaggattcctgtcaggagtactttgggctatagctacctgctgttggttcatagcaaatcactctctgagtgctgtggtcagttttccaataatcactgctggtccaggatttatagctgcaatgtggggtatcttcatgtttaaggaaataaagggtctacaaaactacctattaatgatacttgcattttgcatcatcttgactggagccttatgcactgctttttctaaaatctaacaatgacaaaaccagcaggtggcagcagtagttaagagaacgcgtctatcggacagcggagagatcatgctgagaaaagagtgcattttcatatagcaaatggatctcagccactgttggagtgggtaaatgatttttttccccaaaaatgtgagaatgaaggaagattgagtttcattcaagtataaaaatgaaaatttcttctgatgaactgtttatgaaggtagtactttactgggtgactaaaatgtctacattattatagcattacatacgaggatgctctttttaccacagtatgtacctagtgttgcataatctagaacacagtatagagtccatatacaaagaagttacagtccatatttctcacctattaccccagtgaagtgaggcagaaataccttgggcgaggagggagagccttaccttctaatggaattagattccaaagatatttggatcctttgtttcataaagtaaatgcatagttggtaactaaatgttaaaaaggccattttattattgttagccaaaacttctgtttatttcaagttaatatcgcccaactctacatcatctacccattttagctcataatgcttttgattatcgccagataaagtccattctcagagaacaaaaatttttcatcattgagaaaatgtgcataacataatacatacatacacaagtatattcacgtacataaatacacacagatatgttgctaaagtgagattgtaggttatcagtaacaatttaaaggaaacaaccactcttttgaatgtacaacttttttttctgaaatacacttttctaaaaccctcttaactggaggtttcctgttttcttcttgttttaactggtggtttccagtaggcaaaataaaatgacaggcatgctagttttttttttttttttttttttttaagaaaactgaaattaagccaggcagggtggcgcactactataatcccagctgctggggcggctgaagtaggagggtcacttagcccaagagtgcaaatctgccagcctaggcaacatagcaaggtcccatctctaaaaaagaaatttaatttaaatttgtaagaaaaaagaaaactgaaacagaactgccagtacaatgtttgttgcaattgtttccaaaactttgagataacgaaacccctattcaaatgtaaattttacccattcccacctgatagtactgtttattactttgctatgcaggagaaacaaaacagctttttatttgtgtgtatactctgaagtcaatgtgcatgggttaaatcccacctctgcttcattttatttgtgtggctttggacaagttcctaagccctctgtgtcaggcccctcattaacaaaatggagtttatgatggcatctacctcacatggttattgtgtggttgaaattagttcaaatctgtaaagtatgttgatgagtatctggtacttggcaaacactatataattgttagctttattattatgtgttgtttgaaggggaaaaaagtttttgtagattggagaacaccatgtaagagctactaagctcaccaccttcccatccaaacaattattactcctctaaatgaatactacttaaaagtgatggagcttctgtttgtttattgaattgctaatacaaataaatatttgactataacttcttatactcattttaattttaacctgaaatgtcattaaattatgctgataaactttgaataaattgtgatacaaaagcta

SEQ ID NO: 1269 - DNA, 223 bp, HOMO SAPIENS
  misc_feature (58)..(58): n is a, c, g, or t
  misc_feature (78)..(78): n is a, c, g, or t
  misc_feature (101)..(101): n is a, c, g, or t
tattaatctgttcctgtaaccctaaacatcttgtgactactaagaatgcagccaacangtctctgcctgattttaccntactgcctcttcaagatggaatngctctggttccaatgcctctgacaaactggctgcttgatctctaggttgtgaccatgtcagggatagaggcagcttaggtagaggtagactttcttgtactcaacattgaattgtggcttag

SEQ ID NO: 1270 - DNA, 2166 bp, HOMO SAPIENS
agtacagctccggccgccgcgccgcctggctttcgtattcgttgttctcggcgggctgtggggcctccgcgccgcggccgttagtcatgtcggattctggaagttacggtcagtctgggggtgagcagcaaagttattctacctatggaaatccaggcagccaaggctatggacaagcatcacaaagctattctggctatgggcaaacgactgattcctcttatggacagaactacagcggttactccagttatggacaaagttattcacagtcctatggtggttatgagaatcaaaagcagagctcatatagccagcaaccatataataaccagggacagcagcaaaacatggaatcatcaggaagccaaggtggaagagcaccttcctatgaccagccagactatggtcaacaagattcatatgaccagcagtcaggctatgatcaacatcaaggctcatatgatgagcagtcaaattatgatcagcagcatgattcctatagtcaaaaccagcagtcctatcattcacaaagggaaaactacagccaccacacacaagatgaccgtcgtgatgtgagtaggtatggagaagataatagaggatatggcgggtcacagggaggaggtagagggcgtgggggatatgacaaggatggaagaggtcctatgacaggatcaagtggtggtgaccgcggtggcttcaaaaattttggtggtcacagggattatggacccagaacagatgctgattcagaatctgataattcagataacaacacaatctttgtgcaaggacttggggagggtgtgtctacagatcaagttggggagttctttaaacaaataggaattatcaagacaaataagaagaccggaaaaccaatgataaatctttatacagacaaggacacaggaaagccaaagggggaggcaacagtgtcatttgatgaccctccttcagctaaggcagccattgactggtttgatggaaaagaattccatggcaacatcattaaagtgtcctttgccactagaagacctgaattcatgagaggaggtggaagtggaggtgggcggcgaggccgtggaggatatagaggtcgtggaggctttcaagggagaggtggagaccccaaaagtggggattgggtttgccctaatccgtcatgcggaaatatgaactttgctcgaaggaattcctgcaatcagtgcaatgagcctagaccagaggactctcgtccctcaggaggagatttccgggggagaggctacggtggagagaggggctacagaggtcgtgggggcagaggtggagaccgaggcggctatggtggagacagaagtgggggtggctatggtggagacagaagcagcggtggtggctacagcggagatagaagtgggggcggctatggtggagacagaagtgggggtggctatggtggggacagaggcggcggctatggtggggacagaggaggcggctatggaggagaccgaggaggtggctatggaggagatcgaggtggctatggaggagaccgaggtggaggctatggtggagaccgaggaggctatggaggagatcgaggaggttacggaggagatcgaggaggttatggaggagatcgaggaggctatggaggagacagaagccgggggggctatggaggagaccgtggtggtggcagtggctacggtggagaccgaagtggaggctatggaggagacaggagtggtggcggctatggaggagaccgaggtgggggctacggaggagaccgaggtggctatggaggcaaaatgggaggaagaaacgactacagaaatgatcagcgcaaccgaccatactgatgactgttttgaatgttcctttgtctctgacatgatccatagtgaaattgccagagttttgcctgctgctttcctcgtggcctcttcttgggtagtgaaattaagtgacatttggatttttatttgggtgggagggctgggacagtttttcttctagaaatgtctgttgagatttccccctttagtttccaaccttctccccaacccttggagctaaatgcgttgtaaaatattgccaaaatgaaaagtgttttgtaatactgcaataaaggctgcttgtttttgtggaaaaaaaaaaaaaaaaaaaaaa

SEQ ID NO: 1271 - DNA, 694 bp, HOMO SAPIENS
gacatcaccaagggcctggcaccaggtgcccagtcttccagttgcgagggcaagcaaacccgtcatgagcaactcccttccccatctctgctcaccatgtggacgctgaaatcgtccctggtcctgcttctgtgcctcacctgcagctatgcctttatgttctcttctctgagacagaaaactagcgaaccccaggggaaggtgccgtgtggagagcactttcggattcggcagaacctaccagagcacacccaaggctggcttgggagcaaatggctctggcttttgtttgctgttgtgccgtttgtgatactgcagtgtcaaagagacagtgagaagaataaggagcagagtcctcctggccttcgaggcttcccatttcgcactccactaaagaaaaatcaaaatgcttctctttacaaagactgtgtattcaataccttaaacgaacttgaagtggagcttttgaaatttgtgtccgaagtgcagaatcttaaaggtgccatggcaacaggcagtggcagtaacctcaagcttcgaaggtcagagatgcctgcagatccataccatgtcacaatctgtaaaatatggggagaagaaagctctagctgaatggatttgtgtgtcaggagagaaaaaagttgagtgttgacaaactgtatgcaaactaataaaactattctgaagaaaagaa

SEQ ID NO: 1272 - DNA, 2862 bp, HOMO SAPIENS
agattcctacttcttacgccccccacatcacccgcctcgagacctcaagggtagaggtgggcacccccgcctccgcacttttgctcggggctccagattgtagggcagggcggcgcttctcggaaagcgaaagccggcggggcggggcgggtgccgcaggagaaagaggaagcgctggcagacaatgcgacccgaccgcgctgaggctccaggaccgcccgccatggctgcaggaggtcccggcgcggggtctgcggccccggtctcctccacatcctcccttcccctggctgctctcaacatgcgagtgcggcgccgcctgtctctgttcttgaacgtgcggacacaggtggcggccgactggaccgcgctggcggaggagatggactttgagtacttggagatccggcaactggagacacaagcggaccccactggcaggctgctggacgcctggcagggacgccctggcgcctctgtaggccgactgctcgagctgcttaccaagctgggccgcgacgacgtgctgctggagctgggacccagcattgaggaggattgccaaaagtatatcttgaagcagcagcaggaggaggctgagaagcctttacaggtggccgctgtagacagcagtgtcccacggacagcagagctggcgggcatcaccacacttgatgaccccctggggcatatgcctgagcgtttcgatgccttcatctgctattgccccagcgacatccagtttgtgcaggagatgatccggcaactggaacagacaaactatcgactgaagttgtgtgtgtctgaccgcgatgtcctgcctggcacctgtgtctggtctattgctagtgagctcatcgaaaagaggtgccgccggatggtggtggttgtctctgatgattacctgcagagcaaggaatgtgacttccagaccaaatttgcactcagcctctctccaggtgcccatcagaagcgactgatccccatcaagtacaaggcaatgaagaaagagttccccagcatcctgaggttcatcactgtctgcgactacaccaacccctgcaccaaatcttggttctggactcgccttgccaaggccttgtccctgccctgaagactgttctgaggccctgggtgtgtgtgtatctgtctgcctgtccatgtacttctgccctgcctcctcctttcgttgtaggaggaatctgtgctctacttacctctcaattcctggagatgccaacttcacagacacgtctgcagcagctggacatcacatttcatgtcctgcatggaaccagtggctgtgagtggcatgtccacttgctggattatcagccaggacactatagaacaggaccagctgagactaagaaggaccagcagagccagctcagctctgagccattcacacatcttcaccctcagtttcctcacttgaggagtgggatggggagaacagagagtagctgtgtttgaatccctgtaggaaatggtgaagcatagctctgggtctcctgggggagaccaggcttggctgcgggagagctggctgttgctggactacatgctggccactgctgtgaccacgacactgctggggcagcttcttccacagtgatgcctactgatgcttcagtgcctctgcacaccgcccattccacttcctccttccccacagggcaggtggggaagcagtttggcccagcccaaggagaccccaccttgagccttatttcctaatgggtccacctctcatctgcatctttcacacctcccagcttctgcccaaccttcagcagtgacaagtccccaagagactcgcctgagcagcttgggctgcttttcatttccacctgtcaggatgcctgtggtcatgctctcagctccacctggcatgagaagggatcctggcctctggcatattcatcaagtatgagttctggggatgagtcactgtaatgatgtgagcagggagccttcctccctgggccacctgcagagagctttcccaccaactttgtaccttgattgccttacaaagttatttgtttacaaacagcgaccatataaaagcctcctgccccaaagcttgtgggcacatgggcacatacagactcacatacagacacacacatatatgtacagacatgtactctcacacacacaggcaccagcatacacacgtttttctaggtacagctcccaggaacagctaggtgggaaagtcccatcactgagggagcctaaccatgtccctgaacaaaaattgggcactcatctattccttttctcttgtgtccctactcattgaaaccaaactctggaaaggacccaatgtaccagtatttatacctctaatgaagcacagagagaggaagagagctgcttaaactcacacaacaatgaactgcagacacagctgttctctccctctctccttcccagagcaatttatactttaccctcaggctgtcctctggggagaaggtgccatggtcttaggtgtctgtgccccaggacagaccctaggaccctaaatccaatagaaaatgcatatctttgctccactttcagccaggctggagcaaggtaccttttcttaggatcttgggagggaatggatgcccctctctgcatgatcttgttgaggcatttagctgccatgcacctgtccccctttaatactgggcattttaaagccatctcaagaggcatcttctacatgttttgtacgcattaaaataatttcaaagatatctgagaaaagccgatatttgccattcttcctatatcctggaatatatcttgcatcctgagtttataataataaataatattctaccttggaaaaaaaaaaaaaaa

SEQ ID NO: 1273 - DNA, 2300 bp, HOMO SAPIENS
ggacaacaccttcaaagacaggccctctgagtccgacgagctccagaccatccaagaagacagtgcagccacctccgagagcctggatgtgatggcgtcacagaagagaccctcccagaggcacggatccaagtacctggccacagcaagtaccatggaccatgccaggcatggcttcctcccaaggcacagagacacgggcatccttgactccatcgggcgcttctttggcggtgacaggggtgcgcccaagcggggctctggcaaggtaccctggctaaagccgggccggagccctctgccctctcatgcccgcagccagcctgggctgtgcaacatgtacaaggactcacaccacccggcaagaactgctcactacggctccctgccccagaagtcacacggccggacccaagatgaaaaccccgtagtccacttcttcaagaacattgtgacgcctcgcacaccacccccgtcgcagggaaaggggagaggactgtccctgagcagatttagctggggggccgaaggccagagaccaggatttggctacggaggcagagcgtccgactataaatcggctcacaagggattcaagggagtcgatgcccagggcacgctttccaaaatttttaagctgggaggaagagatagtcgctctggatcacccatggctagacgctgaaaacccacctggttccggaatcctgtcctcagcttcttaatataactgccttaaaactttaatcccacttgcccctgttacctaattagagcagatgacccctcccctaatgcctgcggagttgtgcacgtagtagggtcaggccacggcagcctaccggcaatttccggccaacagttaaatgagaacatgaaaacagaaaacggttaaaactgtccctttctgtgtgaagatcacgttccttcccccgcaatgtgcccccagacgcacgtgggtcttcagggggccaggtgcacagacgtccctccacgttcacccctccacccttggactttcttttcgccgtggctgcggcacccttgcgcttttgctggtcactgccatggaggcacacagctgcagagacagagaggacgtgggcggcagagaggactgttgacatccaagcttcctttgtttttttttcctgtccttctctcacctcctaaagtagacttcatttttcctaacaggattagacagtcaaggagtggcttactacatgtgggagcttttggtatgtgacatgcgggctgggcagctgttagagtccaacgtggggcagcacagagagggggccacctccccaggccgtggctgcccacacaccccaattagctgaattcgcgtgtggcagagggaggaaaaggaggcaaacgtgggctgggcaatggcctcacataggaaacagggtcttcctggagatttggtgatggagatgtcaagcaggtggcctctggacgtcaccgttgccctgcatggtggccccagagcagcctctatgaacaacctcgtttccaaaccacagcccacagccggagagtccaggaagacttgcgcactcagagcagaagggtaggagtcctctagacagcctcgcagccgcgccagtcgcccatagacactggctgtgaccgggcgtgctggcagcggcagtgcacagtggccagcactaaccctccctgagaagataaccggctcattcacttcctcccagaagacgcgtggtagcgagtaggcacaggcgtgcacctgctcccgaattactcaccgagacacacgggctgagcagacggccccgtggatggagacaaagagctcttctgaccatatccttcttaacacccgctggcatctcctttcgcgcctccctccctaacctactgacccaccttttgattttagcgcacctgtgattgataggccttccaaagagtcccacgctggcatcaccctccccgaggacggagatgaggagtagtcagcgtgatgccaaaacgcgtcttcttaatccaattctaattctgaatgtttcgtgtgggcttaataccatgtctattaatatatagcctcgatgatgagagagttacaaagaacaaaactccagacacaaacctccaaatttttcagcagaagcactctgcgtcgctgagctgaggtcggctctgcgatccatacgtggccgcacccacacagcacgtgctgtgacgatggctgaacggaaagtgtacactgttcctgaatattgaaataaaacaataaacttttaatggtaaaaaaaaaaaaaaaaaaaaaa

SEQ ID NO: 1274 - DNA, 1952 bp, HOMO SAPIENS
gtgtttagggtgttggcggagacaaaggggaagagtcatcgcctgtcggggctaggatatgatgggtgagaggtgtcaaaccaaattctctcggtttggaaacggagaaaatctaaaaatgaggatgtgaggaaagagtccgctctcaaggcgcgttgtggtctatccgagccccgtcccctgggctccctcgggctggggtgaggcgggcagcgctacgcgtggggtaggaccatcttacgctgggaccccgccaaggagccccaggaagtaggtgaaagggcaggggcgtggctctcggggcgccacccacgctcttgaaatctgggtgattgcgagcggccgctcagcgtcccccacaccacagacccgcgccgccgacgacccagcagccgccatggctctgctccgaggtgtgtttgtagttgctgctaagcgaacgccctttggagcttacggaggccttctgaaagacttcactgctactgacttgtctgaatttgctgccaaggctgccttgtctgctggcaaagtctcacctgaaacagttgacagtgtgattatgggcaatgtcctgcagagttcttcagatgctatatatttggcaaggcatgttggtttgcgtgtgggaatcccaaaggagaccccagctctcacgattaataggctctgtggttctggttttcagtccattgtgaatggatgtcaggaaatttgtgttaaagaagctgaagttgttttatgtggaggaaccgaaagcatgagccaagctccctactgtgtcagaaatgtgcgttttggaaccaagcttggatcagatatcaagctggaagattctttatgggtatcattaacagatcagcatgtccagctccccatggcaatgactgcagagaatcttgctgtaaaacacaaaataagcagagaagaatgtgacaaatatgccctgcagtcacagcagagatggaaagctgctaatgatgctggctactttaatgatgaaatggcaccaattgaagtgaagacaaagaaaggaaaacagacaatgcaggtagacgagcatgctcggccccaaaccaccctggaacagttacagaaacttcctccagtattcaagaaagatggaactgttactgcagggaatgcatcgggtgtagctgatggtgctggagctgttatcatagctagtgaagatgctgttaagaaacataacttcacaccactggcaagaattgtgggctactttgtatctggatgtgatccctctatcatgggtattggtcctgtccctgctatcagtggggcactgaagaaagcaggactgagtcttaaggacatggatttggtagaggtgaatgaagcttttgctccccagtacttggctgttgagaggagtttggatcttgacataagtaaaaccaatgtgaatggaggagccattgctttgggtcacccactgggaggatctggatcaagaattactgcacacctggttcacgaattaaggcgtcgaggtggaaaatatgccgttggatcagcttgcattggaggtggccaaggtattgctgtcatcattcagagcacagcctgaagagaccagtgagctcactgtgacccatccttactctacttggccaggccacagtaaaacaagtgaccttcagagcagctgccacaactggccatgccctgccattgaaacagtgattaagtttgatcaagccatggtgacacaaaaatgcattgatcatgaataggagcccatgctagaagtacattctctcagatttgaaccagtgaaatatgatgtatttctgagctaaaactcaactatagaagacattaaaagaaatcgtattcttgccaagtaaccaccacttctgccttagataatatgattataaggaaatcaaataaatgttgccttaacttcaaaaaaaaaaaaaaaaaaa

SEQ ID NO: 1275 - DNA, 375 bp, HOMO SAPIENS
  misc_feature (140)..(140): n is a, c, g, or t
gatgctggagaagttatcactcagagagagctggtctccaggcaggtgagcaacgaccttacggagcaagcagccacatttgggctcatcctggacgacgtgtccttgacatatctgacctttggaaaggagttcacagnagcagtggaagccaaacaggtggctcagcaggaagcagagagggccagatttgtgaaggaaaaggctgagcagcagaaaaaggctgagcagcagaaaaaggttgagcagcagaaaaaggcagccgtgatctctgctgagggcgactccaaggcaaccgagctgattgccaactcactggccaccgcgggggacggcctgatggagctgtgcaagttggaagccgcggaggctctc

SEQ ID NO: 1276 - DNA, 283 bp, HOMO SAPIENS
ttttaagtttttgctctggaaggagcagtatcgtttctttccagaaattctggtgggtaacttgataatttgacactagaaataatgggacaagaaaaacagcctggtttgacagagaggcccattttaacttttgttggtattcactagggtttctcacataagtacatgtgataacttttaaaatgtccaatactggaaaaagcagttttgagagctttaaagtgttagctctcacttaaatatcctgaaatatcctcctgagatggcttgctaattccta

SEQ ID NO: 1277 - DNA, 2182 bp, HOMO SAPIENS
aggtaagaggaaactccattggataaatggcgaggaaacgtatactccctcttaaggaacacggtgtcttccttcgtctccgggttcccgagaccccagagtcactgacctccgtccctcagctttcggggttcggcagcagaaggggcgggcccgggcctgggattggctggcgtcgtccgacccccttcgctgctctccattcgcaatcgcccgcgggcgcctgcgcgatgggtcggccgtggggagcggggcgggaagcgcttcagggcagcggatcccatgtcggccctgaggcgctcgggctacggccccagtgacggtccgtcctacggccgctactacgggcctgggggtggagatgtgccggtacacccacctccacccttatatcctcttcgccctgaacctccccagcctcccatttcctggcgggtgcgcgggggcggcccggcggagaccacctggctgggagaaggcggaggaggcgatggctactatccctcgggaggcgcctggccagagcctggtcgagccggaggaagccaccaggagcagccaccatatcctagctacaattctaactattggaattctactgcgagatctagggctccttacccaagtacatatcctgtaagaccagaattgcaaggccagagtttgaattcttatacaaatggagcgtatggtccaacataccccccaggccctggggcaaatactgcctcatactcaggggcttattatgcacctggttatactcagaccagttactccacagaagttccaagtacttaccgttcatctggcaacagcccaactccagtctctcgttggatctatccccagcaggactgtcagactgaagcaccccctcttagggggcaggttccaggatatccgccttcacagaaccctggaatgaccctgccccattatccttatggagatggtaatcgtagtgttccacaatcaggaccgactgtacgaccacaagaagatgcgtgggcttctcctggtgcttatggaatgggtggccgttatccctggccttcatcagcgccctcagcaccacccggcaatctctacatgactgaaagtacttcaccatggcctagcagtggctctccccagtcacccccttcacccccagtccagcagcccaaggattcttcatacccctatagccaatcagatcaaagcatgaaccggcacaactttccttgcagtgtccatcagtacgaatcctcggggacagtgaacaatgatgattcagatcttttggattcccaagtccagtatagtgctgagcctcagctgtatggtaatgccaccagtgaccatcccaacaatcaagatcaaagtagcagtcttcctgaagaatgtgtaccttcagatgaaagtactcctccgagtattaaaaaaatcatacatgtgctggagaaggtccagtatcttgaacaagaagtagaagaatttgtaggaaaaaagacagacaaagcatactggcttctggaagaaatgctaaccaaggaacttttggaactggattcagttgaaactgggggccaggactctgtacggcaggccagaaaagaggctgtttgtaagattcaggccatactggaaaaattagaaaaaaaaggattatgaaaggatttagaacaaagtggaagcctgttactaacttgaccaaagaacacttgatttggttaattaccctctttttgaaatgcctgttgatgacaagaagcaatacattccagctttcctttgattttatacttgaaaaactggcaaaggaatggaagaatattttagtcatgagttgttttcagttttcagacgaatgaatgtaataggaaactatggagttaccaatattgccaagtagactcactccttaaaaaatttatggatatctacaagctgcttcttaccagcaggagggaaacacacttcacacaacaggcttatcagaaacctaccagatgaaactggatataatctgagacaaacaggatgtgtttttttaaacatctggatatcttgtcacatttttgtacattgtgactgctttcaacatatacttcatgtgtaattatagcttagactttagccttcttggacttctgttttgttttgttatttgcagtttacaaatatagtattattctct

SEQ ID NO: 1278 - DNA, 5582 bp, HOMO SAPIENS
ccgctccgcagcgcagcgcatggagcccggcggggaccaccggagccggagcagcggcggcaggggcggccccgggccagcagtggcctcggcacggggccgacggctgccgcccgccggatcgagcggcagcgcggagccagaggaagacgaaggcgggcaagatcttcagctggaagggggtgccttggggtcctgggggagtgcccccctgccctcctccagggccaggggaccagcatcttcaggcaggaaatattcagaccactgtgaggcccgggcctcgaggcctggaaagagccgcatccctggccgtgaccaccggcgctactaccacgaccactggcggctggagtacctgatggacttcaaccctgcccggcacggcatggtgtgcatggtgtgcggcagctccctggccaccctcaagctcagcaccatcaagcgccacatccgccaaaagcacccctactccttgcattggagtccccgggagaaggaagtcatcagcaacagctgggatgcacacctggggctgggggcctgcggagaggccgagggcctgggggtccagggggctgaggaggaggaggaggaggaagaagaggaggaggaggagggggccggtgtcccagcttgcccgcccaagggcccaggcaaagccccagctggtgggggctgccggcgccagcggcgagggggcccagtggcaccccgggctcggcgtctgcgcctctcagcctcccggagggccgggggcagcagggggctgggggcccggcgcctggagaggaggctgaaggagtccctgcagaactggttccgggccgagtgtctcatggactatgacccgcgggggaaccggctggtgtgcatggcctgtggccgggcactgcccagcctgcacctggacgacatccgtgcccacgtgctggaggtgcaccctggctccctggggctcagcggcccccagcgcagtgccctgctgcaggcctgggggggccagcccgaggcgctgtctgagctcacccagtccccaccaggcgatgacctcgccccccaggacctgaccggaaagagccgggactcggcctccgctgctggagccccctcctctcaggatctcagccccccagacgtaaaggaagaggctggctgggtccctgagaggcccgggcccgcagaggaggaggaggagctggaggagggcgagggcgagagggcgggggtcccgggccggtcgccgcggggccgcgcccaccgccgccacccccaggagcgctggcggctggagtacctcatggagttggacggcggccggcgcggcctggtgtgcggggtgtgcgggggcgcgctggcctcgctcaagatgagcaccatcgagcgccacatccgccggcgccacccgggctccacgcgcctcggcgggcctgtccaggccctcatcgcccgggagtggagcgagaaggccgcccacctgctggccctggggccgccccgccccgagtccccccagggccccatcccccccggcactgccgcagcctccgacgaggggggaggggacgaggaggaggagccagaggaggaggaggaggagtggggcgacgttccgctgtcccctggagctcccttggagcggcccgccgaagaagaggaggacgaagaggacggccaggagcctgggggactcgccttgccgccgccgcctcctcccccgcctccgcccccgccccgcagccgggagcagcggcggaactaccagccgcggtggcggggcgagtacctgatggactacgacggcagccggcgcggcctggtgtgtatggtgtgcgggggcgcgctggccacgctcaaggtgagcaccatcaagcgccacatcctgcaggtgcaccccttctccatggacttcacgcctgaggagcgccagactatcctggaggcctacgaggaggcggcgctgcgctgctacggccacgagggcttcgggccgcccgccccggcgccgcgtgacggcggcgcggacctcaagtctggcgctgtgtgtcgggcgtagcggcctagcgggcccccgggtcaggtcgggtcgggtcggatcggccccgccccgccctgtgctcgcccggcccttcggctgggagaccctcgcgtccggtgttagcgcttcccgcggccgcgccccccgctggccgggccgggcggagacgggggatcgggtggggccaccggcgtctgcgcggtgccacttgggtccctgagccagtcggtgcgctgcgggaagcgcactctcccatcggcccggagccctgccctccccgcgcagggcccacgttttccgagaatcctcagtggcctccacgtgttagcgccgagcgctcccggccgcaccccgcgagggggttctccgcaggccgggactgggggcgccgtcagtcagtattagggccgaaggggggccgtgcgggctctggctctggccctggctgggggcccagttccctgcagccttgcacgctggcaggcacggctcccggcttgggggctgctggctgcccttccctaattgggattctcggcctctcggaggccccggctgcggactggggcttccagcgggaggctgggccgcagggctcgggagccttcccggggtgggaaggcgcgttggaccgagggcggggctacgcgcccggggcccgggctggaccagctgcgcttacctccccggcaggctcagtgagaaccgtgcgcccggcggccccactctcctcccaggccgctgccacgccctccaggaaagctcttgtaaagggattagcacttttttcctttgctcctcttgccccgagggtctctgcttacccctaaaccaagtccgtgggagcccggggcacaggcggtcccggcagtcagccttcgattcccgccccatccccatccccctttgtccgcggtggatgcggcgtccgttctcaacccgcagggcctggggccgggcctcggcctcttttccccgtggcagccgcaggccctgtgtggcagggatggggccccgcgatctcccaggcaggtccgagagggatgtgtagattcattctcctgtggagaacaggtggccccgagatcaggcccttttttgctctttgtattttattttgaaactgtatttaatgcttttatatgaaagggggaggggcggggacagagctgacccagtcacccttatgtgcaaatgtcttatttattatgcgtgtatcagagataagctgtgaggtggtggagggaggacctgaaggaaggaggagcgagggcagaggcggggacgggaggaccccaactagctgtgctgatgttaatcccgctgggagactccgggccctactgtctgctcttcacaaagccaggctgctgcaggaacagttcccgcggtcctaaagccggggcggggaggctagtgggtggaacttgagggttgggtctggaggaagagatgcctgggcagcgtggtccagcccctgcctcggggtggaaaggcagagagcaaagaggaggcccctcttattccggacccccaggccagagcccaggagtgggaaagcagagggcaaagaggaggcccctcctctcatccctgacccccaggccagagcctaaggttcaagtgcctcaggcccagtccccttgacgcttcctgtttgggagttggattttataccacggattttatagcatttttatataattgaggattgtcagaattggaaagggccctggagatcactagtactaccctcctcaccttcacagataggtaaattggagcccaggaaccgagatgatcacacagccaggtagggacagtacaagaactagaatgaaaatcctagctcctgactcagtgttctttgcacgatgccacactgcttcccaattcgctggtcagttattaaaatttgtcaggcctgccgaaggattgacatgctgggcaatgcaggccaccacggtggatctgtgactcctgaaggtggcaaagccctgcacactgccttgggatgagcacactgagctctgcagggcctcagctggaaggcgccatccaatcgtccttcccctccccagcagaactccagaggtggggcggctgccgcagggcccaaggctgcctcggcagggggctttgtgctttttgttgtggaggccaccagggattcaggaagatcctgaatgggttgtcaattgactgaaaagtaaattcccagtgagtttgaacctccacggtttttgagacagtattaaaagcttgagaacggagattatggatggcaccaggctgggcactgccattcttttactttccttcatgcattttttcggatccagagtattaacaccactttttttactctgcccattcaaaaacagtaggcaaattgggggaaccaatttataatcactcaagcccactgccaaagttcggataagccagggcagaggggttagattcccccccctccgtaggcagagagaggcctcaggagagtggacatctttactgagacagccccaaacacaccagtggctctcaaagtgtgtccctgagaccagcagcatcaccttaggaatctgctagaaataaaaattcttgggccataccccagggttactgaatcagaaacttggttggggcctagcagtgttttcatgagccctccattgatcttgatgcagctgaagtgccgggcaccagtgaaagggaagggctgcggtagtgattccattgattcctgctttgatggaagttatggcctcacaggttagacgttgcaagttgagttggccctcttgcctaggtgtgcctccttgccttgggattctgacatgaacaggtgaagtctcttcatgattttttttgttgttgttgttaatggtatgcttgctattatggccaatatgtaaatgttactctgaatacatatttatataccatgttacttagtgacattattcaaacatttgtatgcgtatttgtgaaattgtttgcatcagtcatttaaaaaatatttcagcctaagttttctaagaggtatgttgaatacatttttaaaagccagcttaagggtcacagcagccttagtttaggagaagagctaatcacaggtgaccactcaagttctttcaatgaagacctgatgatgtatttagttcccattttccacggtgattgactcaatttaagtgtattgtggctatatgtaatttacaggctgctttgcgttgcaggtgggaaaatctcccaggctggtgtgaggctgaactggggtaaaagaccccctgacccctcctcattcttctaaggtcaccacctcttagagggtctcttattttctttcagagatcaaatgcacagttatgctgtacaactaaattctgcagtcttgggaatccttacgagtaccaactattagtcactttttaaagtccccaaagtggagtgaggatagggggagtggaagcagtgtttggttcttactttacccaaactgtgtataaagaataaagttagcagaatgatgccacagtca

SEQ ID NO: 1279 - DNA, 1040 bp, HOMO SAPIENS
gtgagtgaaatggagaaggctaaactttttcttcccacatgctcacttccttgcttgttcgctagctgctgcatctggcccctcaagggtaaagtcaaggggaaaaggagattgagaggaaggacagtctgtgaattgggtctcaccgtgtttcccaggctgaagtacagtgttgtgatatcagttcattgcaacttctgtcttctgagctcaagcaatcctcttgcctcagcctctcaagtagctgggactgactacaggcatgaaccaccacacctggctaattttttttgtatttttgtcgaaaagacagtttcgccatgttgtacagaactacttctcaaatcactattcacatcctggtagaagtcaagcaatgaagatggcacagaaacacatcccaaatactatgataccataaagtatactgtagcaatgcattggcacaccctcatttgaacatttgtctcagaagattttgacagaagataaaattgtctggtttttatttcattggtttcatgaaaatttatttcactggtttcatgtcacaggcccatgactgtataaagagtcataatctttacaaacacaacaatgactcacagcgacatgttgcaaagctgtaatcgaaaacactgatgttgatttcagaggccattaatggtgttaagaaggcgcttttgttaaccaaataattgaatactcgtaattacttttcagttctagttcagttcttgacaccaaaacaagccattttctttacatagtgaatgcagaacttgccagtaagaactttcatactaaacttctatgtaaaacaaaacatgtcaaaatcagtaactactttaatggaatggtaaagaatttacttaaacacaaaggaatgaaaatatctctgcaaatatgtctattgacttttcaaatttggtgacttctttcgaattaattcccttacgtctgttcctcatccacataaaaatgacaaaaatgaaagataattttccagcctataattaaatttctccattgttggtata

SEQ ID NO: 1280 - DNA, 289 bp, HOMO SAPIENS
gatgagcatcacaagattccagagtaaaatagatcaaagagcagggaggtacatggccaatatgatttcatctgtcttaaatccttaatatccagtagccactgtgggacaggtctgcccatccttaattactatattattggctggagttactgactggtttttaggtcactgaagcaccaagattcctgtacagagctactgagcaaagtacttgttcacaattttcagtctaactaaaacctttaagaaaatttagactttgagaactctaagtctttagcataga

SEQ ID NO: 1281 - DNA, 4744 bp, HOMO SAPIENS
atggtctctagcgaccggcccgtgtcactggaggacgaggtctcccatagtatgaaggagatgattggaggctgttgcgtttgctcagacgagagaggctgggccgagaacccgctggtttattgcgacgggcacggctgcagcgtcgcggtgcatcaagcttgctatggcattgttcaagtacccactggaccgtggttttgcaggaaatgtgaatctcaggagagagcagccagagtgagatgtgaactttgtccccataaggatggagctttaaaaagaacagataatgggggttgggcccatgtggtttgtgccctgtatattccagaggtacaatttgccaatgtttccacaatggaaccaattgttttacagtctgttccgcatgatcgttataataagacttgctacatttgtgatgaacaaggaagagaaagcaaagcagccactggtgcttgcatgacatgtaataaacatggatgtcgacaggctttccatgtaacatgcgctcagtttgccggactgctttgtgaagaagaaggtaatggtgccgataatgtccaatactgtggctactgtaaataccattttagtaagctgaaaaagagcaaacggggatctaataggtcatatgatcaaagtttaagtgattcttcctctcactctcaggataaacatcatgagaaagagaaaaaaaaatataaagagaaggacaaacacaaacagaaacacaagaagcagccagaaccatcacctgcattggttccatccttgactgttactacagaaaaaacttatacaagcactagcaacaactctatatctggatcattgaagcgcttggaagatactactgcacgatttacaaatgcaaatttccaggaagtctctgcacacacctctagtggaaaagatgtttcagagactagagggtcagagggcaaagggaagaaatcttcagctcacagctcaggtcaaaggggaagaaagcctggtggtggaagaaatccaggaacaactgtgtcagcagctagcccttttcctcaaggcagtttttcaggaactccaggcagtgtaaagtcatcttctggaagttcagtgcagtctccccaggatttcctgagctttacagactcagatctgcgtaatgacagttactctcactcccaacagtcatcagcaaccaaagatgtacataaaggagagtctggaagccaggaagggggggtaaatagttttagtaccttaattggcctcccttcaacctcagctgttacttcacagcctaaaagctttgaaaattcacctggagatttgggtaattccagccttcctacagcaggatataagcgggctcaaacttctggcatagaagaagaaactgtaaaggaaaagaaaaggaaaggaaataaacaaagtaagcatgggcctggcagacccaaaggaaacaaaaatcaagagaatgtttctcatctctcagtttcttctgcttcaccaacatcatctgtagcatcagctgcaggaagcataacaagctctagtctgcagaaatctcctacattgctcaggaatggaagtttacagagcctcagtgttggctcatctccagttggttcagaaatttccatgcagtatcggcatgatggagcttgcccaacaactacgttctcagagttgctgaatgcaatacacaacggtatttataacagcaatgatgtagcagtatcgtttccaaatgtagtatctggctcgggatctagtactcctgtctccagctctcacttacctcagcagtcttctgggcatttgcaacaagtaggagcgctctctccctcagctgtgtcatctgcagcccctgctgttgctacaactcaggcaaatactctatctggatcttctctcagtcaggcaccatctcatatgtatggcaatagatcaaattcatcaatggcagctcttatagctcagtctgaaaacaatcaaacagatcaagatcttggagacaatagccgcaacctagttggcagaggaagctcaccccgaggaagtctctcgccacgatcccctgtaagcagcttacagattcgctatgatcaaccaggcaacagcagtttggaaaatctgcctccagtagcagccagcatagaacagcttttggagaggcagtggagtgaaggacagcaatttttactagaacagggtactcctagtgacattttaggaatgctgaagtcattacaccaacttcaagttgaaaaccgaagattagaggaacaaattaaaaacttgactgccaaaaaggaacggcttcagttattgaatgcacagctttcagtgccttttccaacaataacagcaaatcctagtccgtctcatcaaatacacacattttcagcacagactgctcctactactgattccttgaacagcagtaagagccctcatataggaaacagctttttacctgataattctcttcctgtattaaatcaggacttaacctccagtggacaaagtaccagcagctcatcagctctttctaccccacctcctgctgggcagagtccggctcaacaaggctcaggagtgagtggagttcagcaggtcaatggcgtgacagtgggggcactagctagtggaatgcagcctgtaacttccaccattcctgccgtgtctgcagtgggtggaataattggagctttgccaggtaaccaactggcaattaatggcattgtaggagctttaaatggggttatgcagactcctgtcacaatgtcccagaaccctacccctctcacccacacaaccgtaccacctaatgcaacacatccaatgccagctacactgactaacagtgcctcaggactaggattactttctgaccagcaacgacaaatacttattcatcaacagcagtttcagcagttgttaaattctcaacagctcacaccagtacacaggcacccccacttcacacagctaccaccaacccatttctcaccatccatggagataatgcaagtcagaaagtagcaagacttagtgataaaactgggcctgtagctcaagagaaaagttgacacctgagaaacatctagaaattgcctatcctgctgttctagcacttcatctggctgcctttgcagtccttttactacagctatgaagaaacgcaacaagaaactcaatgcacaacaaaggattaattgctgcaaggacattcttgtaaggctttgattagttttcttgttgctttgttgcactgaaatggaattcccatgcccctaccccttaccccagttttttgaacatggaaagaaaatttaataactttttaaagtgacataatttacatgcaatatgtttatcaactcaagaatttaatatagttggtacacaactagttttgtttataaattggagatgcaaatagcaaaactaaatacttgctccatttacaaactacttgattttattgtacaagttgaaatatgctcttttgtttgggttacagtatgcttgctctaagtcaaattccaaggaactaatttcttctcctggagttgcattgattcagtattacaaatatatagcacatcacctgggacttggcaatctttgttaaaaaaaaatttcctttctaatgggatttggccaattttggtaatgaagttaggatggtaatgtctgcatctgctaaaggtaattttcttttgagaattgctttctttagtgttaagacctactcatattttgaagaaatcttgagttaagtgagttctgaggctgctgggggaaccagatcaattcaaagctaaatacttctttcagaaaggggccactgtggaaagtgctggtggggtttgcccttgatcaagtgcctccattgtgctgcaagggctgtagacagcagggtgggacagtcagtcctccgagcagcaggaatcatcccgtcacctgcagccttcccatgcttccgcctttattcagaactttctgtgccactgtagatagctcaggcaaaactattacctgggtatttatccactaatgagtcacaagaaaaggagtggatttggtaagaatagagatttgttttatttaaaccacttcccattactgaccattaaaagctcaccactagagttcctgaaacaggtgaaacctgtatgacagcccttccactttggggagccacgcttttgatgtgacagtaccgcagagtgattcccccactgaggatgtcatcatcaaactcttctttggtgtgtgaattattagtggaaaagacccagctgtaattagacctccactgtgtacttagctggaagaacatgttaattctgcaatatgtttcttggttaaacattgcacagttcttacctcatttctgtaaataaagttttgtgaatctgttttgtattgtgacaaattcataagataacattgatattttgatttgtaatatttctaattggtagatttaattgaaaagtaaaattaatttatttttatatgttcaggggaattttaaagtcaaatcttttgtagataatttaaaaaatcagtgtggtttattttacttatttaacccactggttgttattctgtaacagtttgtataaatggtaaattttgaatgtgttgttattttacctagatgtaaaattccacatgtattaaaatgtacaaaatgttttgttaataaaatttaataatgttaaaaaaaaaaaaaaaaaaa

SEQ ID NO: 1282 - DNA, 306 bp, HOMO SAPIENS
gggtttccaaggttgagcactaggtgagggacagtggccaggtgacatttagaggccagggacaaaagcttctcgtcttcaaccctgagtcgcactcagccctgaaacacccattaagagacacaggaaactaagtccgacctaaggagaagcatccaatctcccatctcaggctggctgcaggccacatgctttgatacacttgcactattttaattcccttcctttcttttcctcacctgtaagcacagtgaactttgttgtagaagatacatacatatatgatgggacttcactctatcttct

SEQ ID NO: 1283 - DNA, 8168 bp, HOMO SAPIENS
ctgccgtcgtggaagcaggatttccgcggttgtgtaacggcctgtcgcaggcgtgcagggacctggactccgcctcgtccccggggctcgggcagccgagccatggcggggaactgtggggcccgcggcgcgctgtcggcgcacacgctgctgttcgacctgccgcccgcgctgctcggagagctctgcgctgttctggacagctgcgacggcgcgctgggctggcgcggcctgggagcagtgttgagtccttcagagaagagttatcaggaaggtggatttccaaatatattattcaaggaaacagccaatgtcaccgtggataatgttcttattcctgaacataatgaaaaaggaatactgcttaaatcttccatcagctttcaaaatatcatagaaggaactagaaatttccacaaagacttcctaattggagaaggagagatttttgaggtatacagagtggagattcaaaacctaacatatgctgtcaaattatttaaacaggagaaaaaaatgcagtgtaagaagcattggaagaggtttttatctgagcttgaagttttactactgtttcatcacccaaacatactagagttggctgcatattttacagagactgagaagttctgtctgatttatccatacatgagaaatggaacactttttgacagattgcagtgtgtaggtgacacggccccactcccttggcacattcgaatcggtatattaataggaatatccaaagccattcactacctgcacaacgttcaaccatgctcggtcatctgtggcagtatatcaagtgcaaacatccttttggatgatcagtttcaacccaaactaactgattttgccatggcacacttccggtcccacctagaacatcagagttgtaccataaatatgaccagcagcagcagtaaacatctgtggtacatgccagaagagtacatcagacaggggaaactttccattaaaacagatgtctacagctttggaattgtaataatggaagttctaacaggatgtagagtagtgttagatgatccaaaacatatccagctgcgggatctccttagagaattgatggagaagagaggcctggattcatgtctctcatttctagataagaaagtgcctccctgccctcggaatttctctgccaagctcttctgtttggcaggccggtgtgctgcaacgcgggcaaagttaagaccatcaatggatgaagttttaaatactcttgaaagtactcaagccagcttgtattttgctgaagatcctcccacatcactaaagtccttcaggtgtccttctcctctattcctggagaatgtaccaagtattccagtggaagatgatgaaagccagaataacaatttactaccttctgatgaaggcctgaggatagacagaatgactcagaaaactccttttgaatgcagccagtctgaggttatgtttctgagcttggacaaaaagccagagagcaagagaaatgaggaagcttgcaacatgcccagttcttcttgtgaagaaagttggttcccaaagtatatagttccatcccaggacttaaggccctataaggtaaatatagatccttcttcagaagctccagggcattcttgcaggagcaggccagtggagagcagctgttcctccaaattttcctgggatgaatatgaacagtacaaaaaagaataaattctaccagaagataaagaaaaaagcaagtattgcataggcacctgagcataggtatgaccttgggaagacattggctccataagcaatgccaagagaatgatcaatagtgagtttgggtgatgcagataaacaatctggataattccatttcttttttcccaaaccctcaaacagagtgccttaaaaaattgttttatcaggataattgtctcatgaccaaatccacgctcaattagagccattcaaaattccttaagatcatgggttctgacttcagccaaacaaaacaatcaaaacctaccaaaaagggactggattgtaatgtcctctccatcatcctcagtgtgagtcctcagagcctccatctgccaagaacattcagttggattccatcgtttggtttagcttgcttgcacgggttgtaggaaatgtctaatttgtaaatgttaatagatacctttggaaagaatcaccttgttattctgattgacccctcttgttttttggttaatccctgactagcctgcttgtctgaaaatgagccaggttcacccttagctacggcatgctctgggttgaaaggggatttcttcccaagatctatcctaaactcttaggacagtttatcctgtattgactattattacagctttttaaaaacagacttagtgacctattatatcttaaggagactatgtgaaatgtccatcaagtaatttttattcctgagaaaatggctggtcaagggcctaggtcagctttttgtttaatctacacctttcaactctgggccttcattcctgctgtttcttggatctccctcttttgaaatcctaccaatcatcagagctctacaaaacagccacctcctggaagcttccctaatctctacaaccagaagtactccctttatcagtatttccacagcaatttctttgtatttctattttatatttatcactttctgaattatatcaaagctgcttgtcttatctctttttttttttgagacggagtctcgctctgtcatccaggctggagtgcagtggcacaatctcggctcaccgcaaggtctgcctcccgggttcacgccattctcctgcctcagcctcccgagtaaaggtgggactacaggcgcccgccactacgcccggctaattttttgtatttttagtagagacggggtttcaccatgttaggcaggatggtctcgatctcctgacctcatgatccgcctgcctggcctcccaaagtgctgggattacaggcgtgagccaccgcgcccagccttcatctcttttactaggttgtaaactccctatattagttttctattgtttttgtaacacattatcacaaatttagtgacttaaagtaacataaattaattattttgcagttctggaggtcagaattccttagcattctttctggaggctgttggggagaactcactgccttgccttttccagcttctagaggccacctgccttctttggctcatggcctcttcctccgtcttcaaagccagcaacgtgacatttcagatctccctctctctgtctgtctcaccgcatctcttcactaccctcttcctctcattctggcccttctgcatgtcttttataaagacctttgtgatttcactgggcccactcatataagccaggaaaatctctgtgtctcagatccttaatttaattacacctgcaaagtccgttttctcgtgtaaagtaacatattcacaggtttctggaattgggacgtggacatcttcgggggaccattactctgtctgtcatactccctgagtgtgtaagggccatctcttcagagcctaatgtgtcatcctacacagagcaggtgtttccttataaattaagttgaattaaattacccctatgaagccacataatcaataattcagctataataaacattgccgaataaattaacaaagggaggataatgactccttatgatgatggatagaaacactgaagaaaaccattttcagaggatttactgaattttcctctccaaggagcttgtaatagaagggtaaacctctagtttcttgtccagcagaggaataggctcatgtcttttgttttattttatttttttggtgagtcagtatggttgggttaatcatattcacattagattccatgttgaagaacaactaatcaaagaagaaaatcatcaggaatcagggtgagattaacagaccaaggtcagaaacatggagttacaattttccaaaaaagcacgaagtgagattaaaaccacagtaagtcttagtctgactgacaggctttatacaggccctcggtaagcagttgggagaacccatgcccaccactgctctgtacggtatctggctgctcagagctctctgattcacaaaagagatcatcaagaattgactctgtgttaaactgtttttcacttagaatatggacccccaccaatacattcaatgaagggtcattaaggaagctctgattaacaccaggcccatgcagttactccgcacatataatctgtgggtattatgttgatttgaacttgcttagctgacttaaagcagggtttctcaaactgtagtatgcatcagaatgacttggaaagctggttaaaaacgcagattgctgggtccacccagcttctgatgcaataggtctggggttagaaattttgctttctaatgagttcccaggtgatgctgatgccaatgatgtgaagcccgctcttcacatccgtgaaaatcgctgccttaaggtgctcttaaattgttatagattggtagatcctacctttccatcactggtatgttttttgagaaaaggatcctttcttttcattctgttatattcatcctattacataggatgttggttagcacagagtgggagctctagaaagattgttgaccaatcatcttattgactagaccatctttctagagtataactattttggacacctcaaagatgaagtcagataagctggcagtgacctgattaacgttgtggtaagcagatgccactgtggctgggaagtaccaaatcttctgttgagtgattcagtcttcctgactagatttgccttctagtgggtgtattaataagcgttagttgatatgaattaaatgttgcaactttctatgggtaataagaggatacctttatagtttcatgatgtggagaccaagatacataagaaagcaagaatgagtctccgggtgttccctctgatcagcaaacatgaattcataatttcatttactctcatttttgtaatgcactctgagcaatcctccaggcagatcctatttactaagcttcaggcttttgtcccattttataatgcccaaacacatggagaaaacattttgttgtttttaaaaacaggtatgggatttctgatataatcaattttattgacttcttgggagttgtaatgatctgtgactcactgcataatattgtagttttatagggtggcacatcaccctgtgtaaaacaactttaatgacctgaggactgatgagtacaggaagtgaggtttatcatgagtagcatttattaagcatctgctagaatcaaagcactgcattagctactaaggtacaaagtaagacacagtttaataaggaagacagggcatctacccaagtcaacagttcagtgacatctgttatttgaaccacacaccaatgcaaccgaagtaaatgctgaaagggtgagaagaaggaatagattactatgcatttttgagaggatgaagaaggcttcttggagaaggtttctgaaaagagatacggaattaagagaaatagaaaagagcactgacgaagcactcaggatggctattcaaggaattggggatccacagcagctgtgcacaaccatccctaatgccagaaaaatggggtaagggtgaagggaactgggtctagagctttgcatgtttttttctggttaacccttagagtcaccctgaaggtgtggatcccatcttataataaggtgaggacactgagtcaggaaactaacttgctaaaatcaagtcctcccagtcctcccatcaggtccttccagatctggaggagccaggatttgaactcacatttgtctgacttcaaaatccatgctttttcttgtgttccaaattgcacaatggagtcactgccagttcaagctcctatgaaaagggatggatgtgaaaagtcatttgttgattccacagatttttagtaggtaccatgtctcctgcctttatcactatcctactcctctgctacaacttctctgctacaggcacccactgcagttacttgatatgagttaaatgaatccatccatccaaacttccattcattgaataaatacttagcaatggcttcctttgtatcaggcactattctaggagctggggctacagtgcagatggaaaccagcaaagctcactgccctcatggagcttatatgtaagtgaataaatctcagggtggttctcctgtcataggtcctggctcctctgccagctcttccaaatgggttcagagaggttttctccttgtcctgttgtgtaactgataatcccatggtggacctcactttgctattcatatgcactaagtagtttatggtgtgctttgtggctggcaattgtgacagattctattcttctattggtatgtggtttctttggggcatttgtttggatactgatggcatcttccgggggtctgaggcacctacacaaacctcaggtcactatcacgtgatactggagttgcctgttaaattatatttcttcttccacaaaactgcaggttccctgagggaaaggtctatgtcctgctcatttttggatccctaatggctggcacagtacctggtgcataatatggttcaacaaatatttgtaaaatgaatgaatcaaatagtccttcaaagcatcttcagaatcaagattgtcatctagattgcacccgaagtttatctttctagtattcagaatataatcaatcattgcttaaattattccatttcatcattcttgaataaaagctactaattttaaatactaatatctgagatatcttcgaaaagaagattagtcgttgtatgtgttgcttataaattttctctatggtggaaaatattcccaaaccatgtctaagcaatgaaaaaccagtgttctggcaggaaataaactgatgtttgttgtgttttgtatctgtcttcccgttccaaatcatttatatatacttgatggtctgtgggcttgacttgcaagtattttcctgggagacatttttattcaaaagacctgtattgcctgccaaaccttcatttaagagactcattatggatgtcatctgcatcattgcaaacttttctggtcgtctctataaatagcaagataatatttacagagttttacattggctcttgaattttaaaatattcttatagacaaacattaattggaatggggggtaaggaggtaggaatggcttacttgcggaaatgcaggctcattgttgtgtctagtaggtgctaggtgcattcacacatctcttaagctttaaacaacctattgagccggtttccatttccttgatctattagatttaaaaaaatgaagcataaaggagttggctcttgccctaagtcatactactgatggaatgagaatacaaaccaaaaacactttattcaagtccaggaaatatctgccttgaaaaagaataacttaaaaattaaaagtgtcctctatttgaacatgaaaacagctaataaagatgtgttattttattttattattattaattttgtcctcccatattggcaaagataaagcaattgacaaaaatggaattcttgttcaatactggcaggagtgaaaattggtagaacctttctagaaggcaatttggcaacatgtatgaaaacctaaatgttgatacacctttacccagcagtttgtttaggaatttatcctaatgaataaaagttgtccaagtcttcaaacatgagcccaaaggtatatttcatgatgtttatgatattaaaacattggaaacaactgaaacatccttcagtaaaagatggattaaataaattccatgcagttgtcatttaaaaatatttagatatatgtttattgctatggatatatgttcccaaaatattattgaatcaaaaagtagactacaggatatatgttgaatatgagctcatttataacattgaatattttaagataatgtatgtttcatagagagatcttcaccaaatgttaaggatttttttttctgggctgtggtatttgggtgatctttacattcttcagactcatgtgtgtttgaaactttttataatgaacatatatcatttttattagaaaagaataaagtttttgaaaaaaaaaaaaaaaaa

SEQ ID NO: 1284 - DNA, 499 bp, HOMO SAPIENS
  misc_feature (208)..(208): n is a, c, g, or t
  misc_feature (240)..(240): n is a, c, g, or t
ggaccaaatgtgtgagccttcccagcccaggctccaaatatgcaagtagtaagccttcatttctttttggttttaatttttttttttaaataaatcgaaatgggttctcactatgttgcccaggctggtcttgaactcctaagctcaagtaatcctcctacctcagtctcccaaagtgctggaattgtaggcatgagccaccatgccnggctgcaattagtaagtcttcagatgcttccntcaccagccaccatccgatgacaaccccatgaatgaccctcagcaagaactacctagctgaatccagccaaactccagacccatgagagagaaataaaattgttgtttgagtcactaaatacggagtaatttatattatcaacagataactggaaccacaagtgtaattgttaaaggtaaaactttgaatacatttatatttgccttctgccacattccataattgacttttgttcatgaacctattggcaagtttgcc

SEQ ID NO: 1285 - DNA, 2051 bp, HOMO SAPIENS
tcatttcatgttatgttttcatttcccctctgtctgagagattgctctgatgtctttccttccataagtcctacggagatcgagcttacctcatttttctcccaggcctaggagctcaattaccaggatcactttcttccccagggtgtactacagacctccacatgttggacagtaggattcagcagagaatgagtcccacatcctcttttcatccataagccactcttcccaactactcttccgccttccattgtccctatgtctactttactgctcaatctggattttggggaacctcctcccaaaaaggcattagaaggaaatgccaagcaccgaaattttgtcaagaagcggaggctcttagaacggagaggctttctgagtaaaaagaaccaaccccctagcaaggcgcctaagttgcactctgaaccttcaaagaaaggggagactcctacggtcgatggcacttggaagaccccttccttcccaaaaaagaagacagctgcttccagcaatgggtcaggacagcccctggacaagaaagctgcagtgtcttggttgacccctgccccttcaaaaaaggctgattctgttgctgctaaagtagatttgctgggggagttccagagtgcccttccaaagatcaatagccacccaacccgctctcagaagaagagctcccagaagaaatcctctaaaaagaaccatcctcagaagaatgccccacagaactccacccaagctcattcagagaataaatgctccggagcatcccagaagttgccacggaagatggtggcaattgactgtgagatggtgggcacaggaccaaaggggcatgttagttccttggctcgatgtagcattgtcaactacaacggagatgtgctttatgacgagtacattcttcccccctgccacattgtggactaccgaaccaggtggagtggtatccggaagcagcacatggtgaatgccacacccttcaagattgctcgaggccagatcttgaagatactcacagggaagatagtggtggggcatgccatccacaacgacttcaaagcccttcagtactttcaccccaaatccctcacccgtgacacctcccatatcccccccctcaaccggaaggctgactgcccggagaatgccaccatgtctctgaagcatctcaccaagaagctgctaaaccgggatatccaggttgggaagagcggacattcctctgtggaagatgcccaggccaccatggagctatataagttggttgaagtcgagtgggaagagcacctagcccggaatccccctacagactagtggcaatggggacgctggtgatatgaggaggcagaggcagcacccaggagaaacagggcagtggaccaatggacagctccaccagctccacatctttggaagctagatttggggagagagaagctctaccccagacttaatacccattgaaatttcacctcaggtgttgtgtcctgtgtctggttaagtgtcccatggaaggggaaagccttcacgtcagaacccaaccctataccttttacttcttaaatggtgctaaccacaggtgtcccagggtgctctgtgccagttaagatttttaactttcaaggggcagggcatactgggaaatgtagtttcccaaactgccttatcacttgggtggacatatgtctccttttatgccttttggtcttgagtaattaacagcatcctcttccacgctcagaagtgttctggttggggccaggcatggtggctcacgcctgtagtcccaacacttagggaggccgaggcgggcggatcacctgagatcaggagttcaagaccagcctggccaacatggcgaattcccgttctctactaaaaatacaaaaaatgtgtggggtgtggtggcaggagcctgtaatcctagctactcaggaggctgaggcaggagaatcgcttgagcccaggaggcggagattgcagtgagccgagatcgtgtcactgcactccagcctgggtgacaagagtgagactccgtctcc

SEQ ID NO: 1286 - DNA, 3439 bp, HOMO SAPIENS
acggcgcatgctccgcaatcatcttctttaccctggagctgctgctgctgctgctgcttttgcttttggggctgagtttaataagcgagcgagcgagcaagcgagcgcggggggaaaaaggcagagaatgtccgccatctaccctccgctcctgggcgcgctctcattcatagcagcctcttcatgaattacagctgagggggggcggaggaggggggggtaccacacaacaccccagcaaacctccgggcccccaggcatggctagctcgtgtgccgtgcaggtgaagctggagctggggcaccgcgcccaggtgaggaaaaaacccaccgtggagggcttcacccacgactggatggtgttcgtacgcggtccggagcacagtaacatacagcactttgtggagaaagtcgtcttccacttgcacgaaagctttcctaggccaaaaagagtgtgcaaagatccaccttacaaagtagaagaatctgggtatgctggtttcattttgccaattgaagtttattttaaaaacaaggaagaacctaggaaagtccgctttgattatgacttattcctgcatcttgaaggccatccaccagtgaatcacctccgctgtgaaaagctaactttcaacaaccccacagaggactttaggagaaagttgctgaaggcaggaggggaccctaataggagtattcataccagcagcagcagcagcagcagcagtagcagcagcagcagcagcagcagcagcagcagtagcagcagcagcagcagcagcagcagcagcagtagcagcagcagtagcagcagcagcagcagcagtagtaccagtttttcaaagcctcacaaattaatgaaggagcacaaggaaaaaccttctaaagactccagagaacataaaagtgccttcaaagaaccttccagggatcacaacaaatcttccaaagaatcctctaagaaacccaaagaaaataaaccactgaaagaagagaaaatagttcctaagatggccttcaaggaacctaaacccatgtcaaaagagccaaaaccagatagtaacttactcaccatcaccagtggacaagataagaaggctcctagtaaaaggccgcccatttcagattctgaagaactctcagccaaaaaaaggaaaaagagtagctcagaggctttatttaaaagtttttctagcgcaccaccactgatactcacttgttctgctgacaaaaaacagataaaagataaatctcatgtcaagatgggaaaggtcaaaattgaaagtgagacatcagagaagaagaaatcaacgttaccgccatttgatgatattgtggatcccaatgattcagatgtggaggagaatatatcctctaaatctgattctgaacaacccagtcctgccagctccagctccagctccagctccagcttcacaccatcccagaccaggcaacaaggtcctttgaggtctataatgaaagatctgcattctgatgacaatgaggaggaatcagatgaagtggaggataacgacaatgactctgaaatggagaggcctgtaaatagaggaggcagccgaagtcgcagagttagcttaagtgatggcagcgatagtgaaagcagttctgcttcttcacccctacatcacgaacctccaccacccttactaaaaaccaacaacaaccagattcttgaagtgaaaagtccaataaagcaaagcaaatcagataagcaaataaagaatggtgaatgtgacaaggcatacctagatgaactggtagagcttcacagaaggttaatgacattgagagaaagacacattctgcagcagatcgtgaaccttatagaagaaactggacactttcatatcacaaacacaacatttgattttgatctttgctcgctggacaaaaccacagtccgtaaactacagagttacctggaaacatctggaacatcctgaggatataacaactggatgcatcaagaactattgtgttttttttttttggttttttttttttttggttgtgattttttgttcttgttgtttatatgaaaacactcaaaatgatgcaaccaaaagggaaaaaataaaaatcaaacaaccttcagctttatttttctttaaagccagtcatcatctcttgataaaggagaggttaaagcaaaccagcctcagcggaccactcttctctccaaggaaatccccgggaagagttagcctggatagccttgaaaacaaacaaatcaaacacaacacaagaaaactcaaagaatgtgtatggtatcatgtatctctctgtggtggttcattccacaggacgaatgcatattcaacacactgccttattacataactgatctatttattatcgcatacagatattctaagtcgttgagggaatgacaccatcagacattataagtacttggtcccgtggatgctctttcaatgcagcacccttgccatcccaagcccagtgaccttactcgtataccgtgccactttccaccaactttttccaagtcctttaactcgttgcagtctgtattttccaccttttgtttttccagttccaggacacagattatcaactggggggaccaaatagccaccttgattttcttctttgtggtctttttcctgaaagttggggcccagtccttggctgtatccatgtaatgatcttggaccatggtagaaaatgcaccaaataggatcatatgaattgctgtctagccttagtcaataaacttgtaggacttttaaacaaaagtgtacctgtaaatgtcctgaatccagcattgttgagctgtcatcaacattcttgtgtctgttttactgttacaatattaggtgaatatggaagtaaaggcattccacaggatcatcatttaaaaaaaaagaattctggtcctgttttctaaaaaaaaaaactgttgtagaaattcttaatttggatctatttattagtcagagtttcagctttcttcagctgccagtgtgttactcatctttatcctaaaaatctggaatcagagatttttgtttgttcacatatgattctcttagacacttttatatttgaaaaaattaaaatctttctttggggaaaaattcttggttattctgccataacagattatgtattaacttgtagattcagtggttcaatacctgtttagttgcttgctaatatttccagaaggatttcttgtattggtgaaagacggttggggatggggggatttttttgttcttgttgtacccttgttttgaaactagaaatctgtcctgtggcatgcaaaagaaagcaaattatttttaaaagaaaaaaaccaaagtacttttggtgtcattattccatcttctccataagtggagaaatgaaaagtaagaacagctcatcttcaaagtttttactagaaattc

SEQ ID NO: 1287 - DNA, 1040 bp, HOMO SAPIENS
cacatgtaaactacttgaactccatttcatcttttttcataccatctctaagattgctgccgcatttgcttgttaaactgaaagcatgtttcttgcaaaggctctattggaaggagcagatcgaggtcttggagaagctcttggaggcctctttggaggaggtggtcagagaagagaaggaggaggaagaaatattggagggatagttggaggaattgtgaattttatcagtgaggctgcagcagctcagtatactccagaaccgcctcccactcagcagcatttcaccagtgtggaggcctcagaaagtgaggaagttaggcgatttcggcaacaatttacacagctggctggaccagacatggaggtgggtgccactgatctgatgaatattctcaacaaagtcctttctaagcacaaagatcttaagactgacggttttagtcttgacacctgccggagcattgtgtctgtcatggacagtgacacgactggtaagctgggctttgaagaatttaagtatctgtggaacaacatcaagaaatggcagtgtgtttataagcagtatgacagggaccattctgggtctctgggaagttctcagctgcggggagctctgcaggccgcaggcttccagctaaatgaacaactttaccaaatgattgtccgccggtatgctaatgaagatggagatatggattttaacaatttcatcagctgcttggtccgcctggatgccatgtttcgtgccttcaagtctctggatagagatagagatggcctgattcaagtgtctatcaaagaatggctgcagttgaccatgtattcctgaagtgggaactgagaagtcaagatcctccctggaggacaggactgaaaaccttgccaagctgtacacagttgctgataccctgtgcaacagctctcatttcctggcaagctctttcacaaccctacatatttctgatcatgtgctgccttttactgctgaattaaaacagatatttcataaaaaaaaaaaaaaaaaaaaaaaaaaaaaa

SEQ ID NO: 1288 - DNA, 3936 bp, HOMO SAPIENS
ggggggggcggggcctcgcggccctgcagcctcgtcaggctcagtcccctcccgataaacccctaaatagggactttcccggggggtgaccctggcttttttggcgaaaacccccagtttaaggaggccttccccctggcttcacgttgtggagtcgaaaggaaccttgaagcggagaatgagctcgtgacgtggacccgaggaaaaaacctgccaaccaggatttaatagaattcagctctttcaggctttggagggaaggcgatttgaacgggatttcaatgaaaaaccctgtcccttcggctttttttttttcctctctcgggtctcgtcacgtgatggtcctactttatttttaaaaattaaatggcgcatattccccagcatcctaaatctagtgcaacctagtggcaagtggagaaaaaaataactgccaacctggcttcctacgaggtcccccggagttctcgcaaagttgcgacccagttggcaaaaatacagtgtgtgcaaagactcaactggacattgccaccaagaatcaagagatttttggggactttagcaagaaaacgttatttttaaaagccctgctccaaagctggttacaaatgaatactgcgtttccagtgacaggttgggcgagcagaaaggaaatcttacgacggagtcttgccctgtcgcctaggctagagtgcagtggtgtgatctcggctcactgcaaccgccacctcccggtttcccgtgattctcctgcctcagcctcctgagtagctgggattacagacaccatgccacaaggagagtgatctcttcccctgttttcacaatggaggactccggaaagactttcagctccgaggaggaagaagctaactattggaaagatctggcgatgacctacaaacagagggcagaaaatacgcaagaggaactccgagaattccaggagggaagccgagaatatgaagctgaattggagacgcagctgcaacaaattgaaaccaggaacagagacctcctgtccgaaaataaccgccttcgcatggagctggaaaccatcaaggagaagtttgaagtgcagcactctgaaggctaccggcagatctcagccttggaggatgacctcgcgcagaccaaagccattaaagaccaattgcagaaatacatcagagagctggagcaagcaaatgacgacctggaaagagccaagcgcgccacgatcatgtctctcgaagactttgagcagcgcttgaatcaggccatcgaaagaaatgccttcctggaaagtgaacttgatgaaaaagagaatctcctggaatctgttcagagactgaaggatgaagccagagatttgcggcaggaactggccgtgcagcagaagcaggagaaacccaggacccccatgcccagctcagtggaagctgagaggacagacacagctgtgcaggccacgggctccgtgccgtccacgcccattgctcaccgaggacccagctcaagtttaaacacacctgggagcttcagacgtggcctggacgactccaccggggggacccccctcacacctgcggcccggatatcagccctcaacattgtgggagacctactgcggaaagtcggggcactggagtccaaactcgcttcctgccggaacctcgtgtacgatcagtccccaaaccgaacaggtggcccagcctctgggcggagcagcaagaacagagatggcggggagagacggccaagcagcaccagcgtgcctttgggtgataaggggttggacacgagttgccgctggttgtccaaatcaacaaccaggtcgtccagctcctgctgaagcctgttcttggtcttttccagtttatcataagcggccgccttctcctcgtactgctgggtgaggttctcgatctccttctggaacctcttcttcccctcttccagagcttccacggtgctggcaaagtcctgcagcttcttcttcgagtcggagagctacaaggacagcgtccagggtagggtgagagggggaccatgagtggcccctgtccctggccccacagactctgagaagcgaagaccatgtctcctcgttggagaaacccaatagcaggggaagctggggggtcaagcaccatcgcaccaacactccaccgcgatctgcctgcgggggatctcagcgcagagaagttgagaggacccatgaaggaagcaaggacacggggcaggcacctggatgttgagagtggagatgtggcgctccaggttctgcttggcctccatctcctcgtccagctggtcttgcaggctgttccgctcctcctccagctggcgcagcttcgtagacacgttgagcttctgccgggtttcttcttgaagcagctcctgcaaaagggatgcaaagaggtcccagggacctgccccgaggaaggccaccccccaggtcccctggatgatgtggcaggacactcacctgggtgtcctggagctgggaactgagggacgccacgtccttggccagcttaatggccttcccctcggcctcgttaagcatccctgtgacgctctcaacttcattctaagggtgccaagagactggttagtcaaagcctctagaaggggatcctcgttgaaaggagccctttttactcaaaacacatgggctagtacttgaggtgttcactgattgagaaaatacccgtgaggtatgggactctgataaaaaaaaaaaaaaacacacacacacacaaaaaaaacagaatctgtggcttgaagggaactccgtcacctatgagttgggaccctggccctagactctgtggttctaagaacttatttgagccccaatggtattgactgggacctgatcccactaaatggatcctagatccctgccaaggttggtagagacaaagcagcaggtctgagagtccagacgaggtgctctggctggtccactctctaaggctggagaagggagaccaggatggtacttgaacgtcccagggatgctgtcccatcccttccttcctcactcctactctttgaccctgatggccaaagccagagacgcaggccctaaaggtaaaaacgtcctctctgtattctctggcttttactccctagtgtctctgcataagtccctttgaggctgttagcctacccctccatctcttccattgacaaggaggatatgaatgatcttgacactgcttatatgagggcggcaaaagccctgctctcaactgcatgtgagaaaaaaacatctcacttaattcttccctcgccccttggtccctggctgtggacatgttaaacatttgtgaaaactttggccacgtccccatgagtggcaaggcagggtaaatggctatgccaagtgaaagaagaccaaagacaaaaagaccatgtcattcagcagcttaaaacccctcaacagcttcacattgcccagagtaaggatcaacatacatgtaataggttctcaaaagccctacatcatctgggtacaagctccccctccaaccccactctgtactatctccccctacccccaaccccagctgggcactccagctctactggctgtatgtctctctcctaatttttctacttaccacagggcctttgcacacgctgttccctctgcctggtagacttatccatgctccttagggaagcctttcgtggctcctcctcccccaggttaggccccctggttatttacacttgggcatcatgtgccttccctttgctgcatcatttgacattcatttgtgtgattattcatgtctttcccttcccttcccttccccttactcggctggagtcctactggggcagcgacagtgtctcttcttccttgctgttggatctcaggattaagcacagtgcctggcatacagcaggtgctcaataaatacttatcaaattggaaaa

SEQ ID NO: 1289 - DNA, 2756 bp, HOMO SAPIENS
gaaagggagtgttcgggtttcgctggggcctcgcggctccagagcccagcatggcttcctcgcgagcctcttccacgcaggcaaccaaaactaaagcacccgacgacttagttgctccggtcgtgaagaaaccacacatctattatggaagtttggaagagaaggagagggagcgtctggccaaaggagagtctgggattttggggaaagacggacttaaagcagggatcgaagctggaaatattaatataacctctggagaagtgtttgaaattgaagagcatatcagcgagcgacaggcagaagtattggctgagtttgagagaaggaagcgagcccggcagatcaatgtttccacagatgactcagaggtcaaagcttgccttagagccttgggggaacccatcacactttttggagagggtcctgctgaaagaagagaaaggttaagaaatatcctctcagttgtcggtactgatgccttgaaaaagaccaaaaaggatgatgagaagtctaaaaagtccaaagaagagtatcagcaaacctggtatcatgaaggaccaaatagcttgaaggtggcaagactatggattgctaattattcgttgcccagggcaatgaaacgcttggaagaggcccgactccataaggagattcctgagacaacaaggacctcccagatgcaagagctgcacaagtctctccggtctttgaataatttttgcagtcagattggggatgatcggcctatctcctactgtcactttagtcccaattccaagatgctggccacagcttgttggagtgggctttgcaagctctggtctgttcctgattgcaacctccttcacactcttcgagggcataacacaaatgtaggagcaattgtattccatcccaaatccactgtctccttggacccaaaagatgtcaacctggcctcttgtgcggctgatggctctgtgaagctttggagtctcgacagtgatgaaccagtggcagatattgaaggccatacagtgcgtgtggcgcgggtaatgtggcatccttcaggacgtttcctgggcaccacctgctatgaccgttcatggcgcttatgggatttggaggctcaagaggagatcctgcatcaggaaggccatagcatgggtgtgtatgacattgccttccatcaagatggctctttggctggcactgggggactggatgcatttggtcgagtttgggacctacgcacaggacgttgtatcatgttcttagaaggccacctgaaagaaatctatggaataaatttctcccccaatggctatcacattgcaaccggcagtggtgacaacacctgcaaagtgtgggacctccgacagcggcgttgcgtctacaccatccctgctcatcagaacttagtgactggtgtcaagtttgagcctatccatgggaacttcttgcttactggtgcctatgataacacagccaagatctggacgcacccaggctggtccccgctgaagactctggctggccacgaaggcaaagtgatgggcctagatatttcttccgatgggcagctcatagccacttgctcatatgacaggaccttcaagctgtggatggctgaatagatgacaatgggaaaaggacttgaacctcaagctctctctaaggagctgttttcctcaaacgagaagaattgaagtgtttagttctatcatgttttctgccaattaccatgcatagaccctcagtagaattggatttccatgtcagcccccactccaggaaggcagcccaatccctaggtgatggggaacccctctcacggttgaaaatttattacctttttacgccctgccacgaactgtgtagacattgtttttattaatcttttgtttggccgggcgtggtggctcacgcctgtaatcctagcactttgggaggccgaggtgggtagatcgcttgagctcaggagttcaagacgagcctgggcaacatggcaaatgccgtctctgcaaaaaaatactaaaattagctggtcgcggtggcttctgcctgtgattccggctacttgggaggctgaggtgggagggattgcttaagcctgggaggcagaggttgcagtgagccgagattgcgccattgcactctagcctgtgtgacagagcaagaccctgtctcaaaaaaaaaaaaaatttgttcgaatgccttatagccttcctcacagcacccaggattgtgactgactctgcatttttaattcttgaaacttggctttccataacatggtacatgcttcaggactacatatgacccagagagcaaggtggctgaactatagtctggaagccctcaggtaaagaggcacatctcaccactcattggttaaacaatgcatcatagcgagcacttttcctttccctggagaatgggatgtgaagcagtagaccgcagccacgccgatggttatacagtgaagaagacttcacctcttcctattgagtttgcttggaatgctgacagcatcaggcaactctgaactgaacatttgctttgtcagaaaatatctttttttttactttgaagtttggcaaccttcatgttaccccaaagcaaaaccattgtgtcaggagtcaaacaaatgtttagaaagcaaacatgacgtctctattgtacaacctcctttctcttggctgtttaaaggatgtacttcgtgtattaaagggtactttatgttgaagtaaaaaaaaaaaaaaaaaaaaaaa

SEQ ID NO: 1290 - DNA, 13493 bp, HOMO SAPIENS
gcggcggcggcagcggcgtcggctcggggttctccgggagagggggagtgcgcggcggccgcagctgccacaaaccaggtgaagctttgttctaagaatatttgtttcatctagtttatgagtccaaatgatatagactgtaaatgtcacagcagtggtgaaagactgctcggtcatgagcaccgacagtaactcactggcacgtgaatttctgaccgatgtcaaccggctttgcaatgcagtggtccagagggtggaggccagggaggaagaagaggaggagacgcacatggcaacccttggacagtaccttgtccatggtcgaggatttctattacttaccaagctaaattctataattgatcaggcattgacatgtagagaagaactcctgactcttcttctgtctctccttccactggtatggaagatacctgtccaagaagaaaaggcaacagattttaacctaccgctctcagcagatataatcctgaccaaagaaaagaactcaagttcacaaagatccactcaggaaaaattacatttagaaggaagtgccctgtctagtcaggtttctgcaaaagtaaatgtttttcgaaaaagcagacgacagcgtaaaattacccatcgctattctgtaagagatgcaagaaagacacagctctccacctcagattcagaagccaattcagatgaaaaaggcatagcaatgaataagcatagaaggccccatctgctgcatcattttttaacatcgtttcctaaacaagaccaccccaaagctaaacttgaccgcttagcaaccaaagaacagactcctccagatgctatggctttggaaaattccagagagattattccaagacaggggtcaaacactgacattttaagtgagccagctgccttgtctgttatcagtaacatgaacaattctccatttgacttatgtcatgttttgttatctttattagaaaaagtttgtaagtttgacgttaccttgaatcataattctcctttagcagccagtgtagtgcccacactaactgaattcctagcaggctttggggactgctgcagtctgagcgacaacttggagagtcgagtagtttctgcaggttggaccgaagaaccggtggctttgattcaaaggatgctctttcgaacagtgttgcatcttctgtcagtagatgttagtactgcagagatgatgccagaaaatcttaggaaaaatttaactgaattgcttagagcagctttaaaaattagaatatgcctagaaaagcagcctgacccttttgcaccaagacaaaagaaaacactgcaggaggttcaggaagattttgtgttttcaaagtatcgtcatagagcccttcttttacctgagcttttggaaggagttcttcagattctgatctgttgtcttcaaagtgcagcttcaaatcccttctacttcagtcaagccatggatttggttcaagaattcattcagcatcatggatttaatttatttgaaacagcagttcttcaaatggaatggctggttttaagagatggagttcctcccgaggcctcagagcatttgaaagccctaataaatagtgtgatgaaaataatgagcactgtcaaaaaagtgaaatcagagcaacttcatcattcgatgtgtacaagaaaaaggcacagacgatgtgaatattctcattttatgcatcatcaccgagatctctcaggtcttctggtttcggcttttaaaaaccaggtttccaaaaacccatttgaagagactgcagatggagatgtttattatcctgagcggtgctgttgcattgcagtgtgtgcccatcagtgcttgcgcttactacagcaggcttccttgagcagcacttgtgtccagatcctatcgggtgttcataacattggaatatgctgttgtatggatcccaaatctgtaatcattcctttgctccatgcttttaaattgccagcactgaaaaattttcagcagcatatattgaatatccttaacaaacttattttggatcagttaggaggagcagagatatcaccaaaaattaaaaaagcagcttgtaatatttgtactgttgactctgaccaactagcccaattagaagagacactgcagggaaacttatgtgatgctgaactctcctcaagtttatccagtccttcttacagatttcaagggatcctgcccagcagtggatctgaagatttgttgtggaaatgggatgctttaaaggcttatcagaactttgtttttgaagaagacagattacatagtatacagattgcaaatcacatttgcaatttaatccagaaaggcaatatagttgttcagtggaaattatataattacatatttaatcctgtgctccaaagaggagttgaattagcacatcattgtcaacacctaagcgttacttcagctcaaagtcatgtatgtagccatcataaccagtgcttgcctcaggacgtgcttcagatttatgtaaaaactctgcctatcctgcttaaatccagggtaataagagatttgtttttgagttgtaatggagtaagtcaaataatcgaattaaattgcttaaatggtattcgaagtcattctctaaaagcatttgaaactctgataatcagcctaggggagcaacagaaagatgcctcagttccagatattgatgggatagacattgaacagaaggagttgtcctctgtacatgtgggtacttcttttcatcatcagcaagcttattcagattctcctcagagtctcagcaaattttatgctggcctcaaagaagcttatccaaagagacggaagactgttaaccaagatgttcatatcaacacaataaacctattcctctgtgtggcttttttatgcgtaagtaaagaagcagagtctgacagggagtcggccaatgactcagaagatacttctggctatgacagcacagccagcgagcctttaagtcatatgctgccatgtatatctctcgagagccttgtcttgccttctcctgaacatatgcaccaagcagcagacatttggtctatgtgtcgttggatctacatgttgagttcagtgttccagaaacagttttataggcttggtggtttccgagtatgccataagttaatatttatgataatacagaaactgttcagaagtcacaaagaggagcaaggaaaaaaggagggagatacaagtgtaaatgaaaaccaggatttaaacagaatttctcaacctaagagaactatgaaggaagatttattatctttggctataaaaagtgaccccataccatcagaactaggtagtctaaaaaagagtgctgacagtttaggtaaattagagttacagcatatttcttccataaatgtggaagaagtttcagctactgaagccgctcccgaggaagcaaagctatttacaagtcaagaaagtgagacctcacttcaaagtatacgacttttggaagcccttctggccatttgtcttcatggtgccagaactagtcaacagaagatggaattggagttacctaatcagaacttgtctgtggaaagtatattatttgaaatgagggaccatctttcccagtcaaaggtgattgaaacacaactagcaaagcctttatttgatgccctgcttcgagttgccctcgggaattattcagcagattttgaacataatgatgctatgactgagaagagtcatcaatctgcagaagaattgtcatcccagcctggtgatttttcagaagaagctgaggattctcagtgttgtagttttaaacttttagttgaagaagaaggttacgaagcagatagtgaaagcaatcctgaagatggcgaaacccaggatgatggggtagacttaaagtctgaaacagaaggtttcagtgcatcaagcagtccaaatgacttactcgaaaacctcactcaaggggaaataatttatcctgagatttgtatgctggaattaaatttgctttctgctagtaaagccaaacttgatgtgcttgcccatgtatttgagagttttttgaaaattattaggcagaaagaaaagaatgtttttctgctcatgcaacagggaactgtgaaaaatcttttaggagggttcttgagtattttaacacaggatgattctgattttcaagcatgccagagagtattggtggatcttttggtatctttgatgagttcaagaacatgttcagaagagctaacccttcttttgagaatatttctggagaaatctccttgtacaaaaattcttcttctgggtattctgaaaattattgaaagtgatactactatgagcccttcacagtatctaaccttccctttactgcacgctccaaatttaagcaacggtgtttcatcacaaaagtatcctgggattttaaacagtaaggccatgggtttattgagaagagcacgagtttcacggagcaagaaagaggctgatagagagagttttccccatcggctgctttcatcttggcacatagccccagtccacctgccgttgctggggcaaaactgctggccacacctatcagaaggtttcagtgtttccctgtggtttaatgtggagtgtatccatgaagctgagagtactacagaaaaaggaaagaagataaagaaaagaaacaaatcattaattttaccagatagcagttttgatggtacagagagcgacagaccagaaggtgcagagtacataaatcctggtgaaagactcatagaagaaggatgtattcatataatttcactgggatccaaagcgttgatgatccaagtgtgggctgatccccacaatgccactcttatctttcgtgtgtgcatggattcaaatgatgacatgaaagctgttttactagcacaggttgaatcacaggagaatattttcctcccaagcaaatggcaacatttagtactcacctacttacagcagccccaagggaaaaggaggattcatgggaaaatctccatatgggtctctggacagaggaagcctgatgttactttggattttatgcttccaagaaaaacaagtttgtcatctgatagcaataaaacattttgcatgattggccattgtttatcatcccaagaagagtttttgcagttggctggaaaatgggacctgggaaatttgcttctcttcaacggagctaaggttggttcacaagaggccttttatctgtatgcttgtggacccaaccatacatctgtaatgccatgtaagtatggcaagccagtcaatgactactccaaatatattaataaagaaattttgcgatgtgaacaaatcagagaactttttatgaccaagaaagatgtggatattggtctcttaattgaaagtctttcagttgtttatacaacttactgtcctgctcagtataccatctatgaaccagtgattagacttaaaggtcaaatgaaaacccaactctctcaaagacccttcagctcaaaagaagttcagagcatcttattagaacctcatcatctaaagaatctccaacctactgaatataaaactattcaaggcattctgcacgaaattggtggaactggcatatttgtttttctctttgccagggttgttgaactcagtagctgtgaagaaactcaagcattagcactgcgagttatactctcattaattaaatacaaccaacaaagagtacatgaattagaaaattgtaatggactttctatgattcatcaggtgttgatcaaacaaaaatgcattgttgggttttacattttgaagacccttcttgaaggatgctgtggtgaagatattatttatatgaatgagaatggagagtttaagttggatgtagactctaatgctataatccaagatgttaagctgttagaggaactattgcttgactggaagatatggagtaaagcagagcaaggtgtttgggaaactttgctagcagctctagaagtcctcatcagagcagatcaccaccagcagatgtttaatattaagcagttattgaaagctcaagtggttcatcactttctactgacttgtcaggttttgcaggaatacaaagaggggcaactcacacccatgccccgagaggtttgtagatcatttgtgaaaattatagcagaagtccttggatctcctccagatttggaattattgacaattatcttcaatttccttttagcagttcaccctcctactaatacttacgtttgtcacaatcccacgaacttctacttttctttgcacatagatggcaagatctttcaggagaaagtgcggtcaatcatgtacctgaggcattccagcagtggaggaaggtcccttatgagccctggatttatggtaataagcccatctggttttactgcttcaccatatgaaggagagaattcctctaatattattccacaacagatggccgcccatatgctgcgttctagaagcctaccagcattccctacttcttcactactaacgcaatcacaaaaactgactggaagtttgggttgtagtatcgacaggttacaaaatattgcagatacttatgttgccacccaatcaaagaaacaaaattctttggggagttccgacacactgaaaaaaggcaaagaggacgcattcatcagtagctgtgagtctgcaaaaactgtttgtgaaatggaagctgtcctctcagcccaggtctctgtcagtgatgtcccaaagggagtgctgggatttccagtggtcaaagcagatcataaacagttgggagcagaacccaggtcagaagatgacagtcctggggatgagtcctgcccacgccgacctgattacctaaagggattggcctccttccagcgaagccacagcactattgcaagccttgggctagcttttccttcacagaacggatctgcagctgttggccgttggccaagtcttgttgatagaaacactgatgattgggaaaactttgcctattctcttggttatgagccaaattacaaccgaactgcaagtgctcacagtgtaactgaagactgtttggtacctatatgctgtggattatatgaactcctaagtggggttcttcttatcctgcctgatgttttgcttgaagatgtgatggacaagcttattcaagcagatacacttttggtcctcgttaaccacccatcaccagctatacaacaaggtgttattaaactattagatgcatattttgctagagcatctaaggaacaaaaagataaatttctgaagaatcgtggattttccttgctagccaaccagttgtatcttcatcgaggaactcaagaattgttagaatgcttcatcgaaatgttctttggtcgacatattggccttgatgaagaatttgatctggaagatgtgagaaacatgggattgtttcagaagtggtctgtcattcctattctgggactaatagagacctctctatatgacaacatactcttgcataatgctcttttacttcttctccaaattttaaattcttgttctaaggtagcagatatgttgctggataatggtctactctatgtgttatgtaatacagtagcagccctgaatggattagaaaagaacattcccatgagtgaatataaattgcttgcttgtgatatacagcaacttttcatagcagttacaattcatgcttgcagttcctcaggctcacaatattttagggttattgaagaccttattgtaatgcttggatatcttcaaaatagcaaaaacaagaggacacaaaatatggctgttgcactacagcttagagttctccaggctgctatggaatttataaggaccaccgcaaatcatgactctgaaaacctcacagattcactccagtcaccttctgctccccatcatgcagtagttcaaaagcggaaaagcattgctggtcctcgaaaatttccccttgctcaaactgaatcgcttctgatgaaaatgcgttcagtggcaaatgatgagcttcatgtgatgatgcaacggagaatgagccaagagaaccctagccaagcaactgaaacggaacttgcgcagagactacagaggctcactgttttagcagtcaacaggattatttatcaagaatttaattcagacattattgacattttgagaactccagaaaatgtaactcaaagcaagacctcagttttccagaccgaaatttctgaggaaaatattcatcatgaacagtcttctgttttcaatccatttcagaaagaaatttttacatatctggtagaaggattcaaagtatctattggttcaagtaaagccagtggttccaagcagcaatggactaaaattctgtggtcttgtaaggagaccttccgaatgcagcttgggagactactagtgcatattttgtcgccagcccacgctgcacaagagagaaagcaaatttttgaaatagttcatgaaccaaatcatcaggaaatactacgagactgtctcagcccatccctacaacatggagccaagttagttttgtatttgtcagagttgatacataatcaccaaggtgaattgactgaagaagagctaggcacagcagaactgcttatgaatgctttgaagttatgtggtcacaagtgcatccctcccagtgcatcaacaaaagcagaccttattaaaatgatcaaagaggaacaaaagaaatatgaaactgaagaaggagtgaataaagctgcttggcagaaaacagttaacaataatcaacaaagtctctttcagcgtctggattcaaaatcaaaggatatatctaaaatagctgcagatatcacccaggcagtgtctctctcccaaggaaatgagagaaaaaaggtgatccagcatattagaggaatgtataaagtagatttgagtgccagcagacattggcaggaacttattcagcagctgacacatgatagagcagtatggtatgaccccatctactatccaacctcatggcagttggatccaacagaagggccaaatcgagagaggagacgtttacagagatgttatttaactattccaaataagtatctccttagggatagacagaaatcagaagatgttgtcaaaccaccactctcttacctgtttgaagacaaaactcattcttctttctcttctactgtcaaagacaaagctgcaagtgaatctataagagtgaatcgaagatgcatcagtgttgcaccatctagagagacagctggtgaattgttactaggtaaatgtggaatgtattttgtggaagataatgcttctgatacagttgaaagttcgagccttcagggagagttggaaccagcatcattttcctggacatatgaagaaattaaagaagttcacaagcgttggtggcaattgagagataatgctgtagaaatctttctaacaaatggcagaacactcctgttggcatttgataacaccaaggttcgtgatgatgtataccacaatatactcacaaataacctccctaatcttctggaatatggtaacatcaccgctctgacaaatttatggtatactgggcaaattactaattttgaatatttgactcacttaaacaaacatgctggccgatccttcaatgatctcatgcagtatcctgtgttcccatttatacttgctgactacgttagtgagacacttgacctcaatgatctgttgatatacagaaatctctctaaacctatagctgttcagtataaagaaaaagaagatcgttatgtggacacatacaagtacttggaggaagagtaccgcaaaggagccagagaagatgaccccatgcctcccgtgcagccctatcactatggctcccactattccaatagcggcactgtgcttcacttcctggtcaggatgcctcctttcactaaaatgtttttagcctatcaagatcaaagttttgacattccagacagaacttttcattctacaaatacaacttggcgactctcatcttttgaatctatgactgatgtgaaagaacttatcccagagtttttctatcttccagagttcctagttaaccgtgaaggttttgattttggtgtgcgtcagaatggtgaacgggttaatcacgtcaaccttcccccttgggcgcgtaatgatcctcgtctttttatcctcatccatcggcaggctctagagtctgactacgtgtcgcagaacatctgtcagtggattgacttggtgtttgggtataagcaaaaggggaaggcttctgttcaagcgatcaatgtttttcatcctgctacatattttggaatggatgtctctgcagttgaagatccagttcagagacgagcgctagaaaccatgataaaaacctacgggcagactccccgtcagctgttccacatggcccatgtgagcagacctggagccaagctcaatattgaaggagagcttccagctgctgtggggttgctagtgcagtttgctttcagggagacccgagaacaggtcaaagaaatcacctatccgagtcctttgtcatggataaaaggcttgaaatggggggaatacgtgggttcccccagtgctccagtacctgtggtctgcttcagccagccccacggagaaagatttggctctctccaggctctgcccaccagagcaatctgtggtttgtcacggaatttctgtcttctgatgacatatagcaaggaacaaggtgtgagaagcatgaacagtacggacattcagtggtcagccatcctgagctggggatatgctgataatattttaaggttgaagagtaaacaaagtgagcctccagtaaactttattcaaagttcacaacagtaccaggtgactagttgtgcttgggtgcctgacagttgccagctgtttactggaagcaaatgcggtgtcatcacagcctacacaaacagatttacaagcagcacgccatcagaaatagaaatggagactcaaatacatctctatggtcacacagaagagataaccagcttatttgtttgcaaaccatacagtatactgataagtgtgagcagagacggaacctgcatcatatgggatttaaacaggttatgctatgtacaaagtctggcgggacacaaaagccctgtcacagctgtctctgccagtgaaacctcaggtgatattgctactgtgtgtgattcagctggcggaggcagtgacctcagactctggacggtgaacggggatctcgttggacatgtccactgcagggagatcatctgttccgtggctttctccaaccagcctgagggagtatctatcaatgtaatcgctgggggattagaaaatggaattgtaaggttatggagcacatgggacttaaagcctgtgagagaaattacatttcccaaatcaaataagcccatcatcagccttacattttcttgtgatggccaccatttgtacacagcaaacagtgatgggaccgtgattgcctggtgtcggaaggaccagcagcgcttgaaacagccaatgttctattccttccttagcagctatgcagccgggtgaatgcgaatgaacttcacgttctccaaagcactttaactccaaactagatttgttgacttcaccagttttaggaggttgaacctaaagaaatggatgactggacaaaccatccaaataatgataaagtctattcatctgcacaaaattctgaagagtcacatgatcctaagaggaaagttctgttctattttagtgataatctggaagattgtgtcaatatgcactagccaacaagttttaagcctcgcatggtacattaaaatgatattcttaaaattttttcccaccaaggtattccaaagaaaatattaaggtctcccctttttctatgattccaaaaggaccagtagaatttaaattggttggttgattgtttatataaaacacactaaaattatattttaaaagtttactgccatgaaatactcctcccaccacacacacatgctccaaaagaggaaagaaaaaaagataatttttaggacttgataattgctttctttgagaagcaaattattcagtaggtgcctctgtaccaaatattttatggaatatctaaatactaaaataaactatgaatgaatctcaaaattaggcagtttttgccagttgctttcttagctcaaaggagaaccagaatttttttgacagccacaaacaagaatacaggtatcttggatttcagacacattctgtttcttcataaaaattttacttaaaatctgtaacgctagatattgactatccttagttgagtcactgaggtttaaacacaatggtaagtcttaaagtctgctatttacagagcattgaatctgtaccaatttgcaatagaaagccttcagtatgcaagaagtttgcatgggtattaagaacacagcctaaataaggcatttgatctaatctgcaggaagaattttcttccccaaaacagaattataaaagcttactttaaacaggaggcagaataattcttttaggaaaccatttcattctgtttctactaacctataccatctgagaattctaggaagaataataaaatctcgtgtattccacagcaaacttacataccataaagacagaattcctaaacatcttggagccgtctgtctctcccatatgatggctgtctgtatatttttacttggggtgctgctttattggctttgaaaacactgtcagataagctcagtaatatgttaccatgggataaaaatatgtatccctgcctaagaataacttgtgcatttgttatggaaatttaattcatatggtgtttacagtactacttttgtaacttccagactttctaaaacattctgcttaaaaaccatataaaatataattccaaagtctctgctgtcaagatagattcgagagaaagcacgtggccatgtatgctttaaccttaaactgcatacacatgtagtgatacctaggctgcatttagatcaccgtgtgctcaggccaggtgtgaatcctgaggtccatggaggtgcagagatgagattactcctattcacgttgaagtgatttgctttgttaacaaaaaattgcagctattgtctagctttcatttttttactgagaactttaaattagtcccctattagaatagggttgctactcatctttttttaaaaaccgaatttcatcatttatctaaagagaaaatatgcagaataactggtcttgttaagagtgcaatattatatttttatgtaaaaataaaaattaatttggggggattatttattcagcatgaaacctaatatgtatatgtttgaaatacttcataatgtgcatgttgtagcaaacatttctgtaaattatcacaagctctgttacctttatatacactgcctcttcaatttggaaataaatttcataaaaaaaaaaaaaaaaaaaa

SEQ ID NO: 1291 - DNA, 1126 bp, HOMO SAPIENS
tccccatgtgacagtgagcggggtccccgctccaggagacgctcgagtctgcgtcccggccctcagcactgtccactgtttcggtgccagcagagaccagcaggcccgggacagttggtgtttggccgtgccgctgtctaacttggtgtgcagagtgaattgccgctgccggagcggagagaggcggagcggccaggagagaggggatttctgtcagcgccggcctcgggagctcggagacatgaacggcttcacgcctgacgagatgagccgcggcggggatgcggccgccgcagtggccgcagtggtcgctgccgcggccgccgccgcctcggcggggaacgggaccggcgcgggcaccggggctgaggtgccgggcgcgggggcggtctcagcggctgggcccccgggggcggccgggccgggccccgggcaactgtgctgcctgcgggaggatggtgagcggtgcggccgggcggcaggcaacgccagcttcagcaagaggatccagaagagcatctcccagaagaaggtgaagatcgagctggataagagcgcaaggcatctttacatatgtgattatcataaaaacttaattcagagtgttcgaaacagaagaaagagaaaagggagtgatgatgatggaggtgattcacctgttcaagatattgataccccagaggttgatttataccaattacaagtaaatacacttaggagatacaaaagacacttcaagctaccaaccagaccaggacttaataaagcacaacttgttgagatagttggttgccactttaggtctattccagtgaatgaaaaagacaccttaacatatttcatctactcagtgaagaatgacaagaacaaatcagatctcaaggttgatagtggtgttcactaggagacgtggaattgagactaataacttggatgttaacactgtttactgttttttcacatgtagaaatgttctttgtgtattttttctacagaggattttctctgattttattttctttgtttctgactctaataattagttggaaactcatataaaatgagctttcctaaattaaatctattttaaataaaggttattactattaaaaaaaaaaaaaaaaaa

SEQ ID NO: 1292 - DNA, 3632 bp, HOMO SAPIENS
actcactgcccgggccgcccggacagggagcttcgctggcgcgcttggccggcgacaggacaggttcgggacgtccatctgtccatccgtccggagagaaattacagatccgcagccccgggatggggccggccccgctgccgctgctgctgggcctcttcctccccgcgctctggcgtagagctatcactgaggcaagggaagaagccaagccttacccgctattcccgggaccttttccagggagcctgcaaactgaccacacaccgctgttatcccttcctcacgccagtgggtaccagcctgccttgatgttttcaccaacccagcctggaagaccacatacaggaaacgtagccattccccaggtgacctctgtcgaatcaaagcccctaccgcctcttgccttcaaacacacagttggacacataatactttctgaacataaaggtgtcaaatttaattgctcaatcagtgtacctaatatataccaggacaccacaatttcttggtggaaagatgggaaggaattgcttggggcacatcatgcaattacacagttttatccagatgatgaagttacagcaataatcgcttccttcagcataaccagtgtgcagcgttcagacaatgggtcgtatatctgtaagatgaaaataaacaatgaagagatcgtgtctgatcccatctacatcgaagtacaaggacttcctcactttactaagcagcctgagagcatgaatgtcaccagaaacacagccttcaacctcacctgtcaggctgtgggcccgcctgagcccgtcaacattttctgggttcaaaacagtagccgtgttaacgaacagcctgaaaaatccccctccgtgctaactgttccaggcctgacggagatggcggtcttcagttgtgaggcccacaatgacaaagggctgaccgtgtccaagggagtgcagatcaacatcaaagcaattccctccccaccaactgaagtcagcatccgtaacagcactgcacacagcattctgatctcctgggttcctggttttgatggatactccccgttcaggaattgcagcattcaggtcaaggaagctgatccgctgagtaatggctcagtcatgatttttaacacctctgccttaccacatctgtaccaaatcaagcagctgcaagccctggctaattacagcattggtgtttcctgcatgaatgaaataggctggtctgcagtgagcccttggattctagccagcacgactgaaggagccccatcagtagcacctttaaatgtcactgtgtttctgaatgaatctagtgataatgtggacatcagatggatgaagcctccgactaagcagcaggatggagaactggtgggctaccggatatcccacgtgtggcagagtgcagggatttccaaagagctcttggaggaagttggccagaatggcagccgagctcggatctctgttcaagtccacaatgctacgtgcacagtgaggattgcagccgtcaccagagggggagttgggcccttcagtgatccagtgaaaatatttatccctgcacacggttgggtagattatgccccctcttcaactccggcgcctggcaacgcagatcctgtgctcatcatctttggctgcttttgtggatttattttgattgggttgattttatacatctccttggccatcagaaaaagagtccaggagacaaagtttgggaatgcattcacagaggaggattctgaattagtggtgaattatatagcaaagaaatccttctgtcggcgagccattgaacttaccttacatagcttgggagtcagtgaggaactacaaaataaactagaagatgttgtgattgacaggaatcttctaattcttggaaaaattctgggtgaaggagagtttgggtctgtaatggaaggaaatcttaagcaggaagatgggacctctctgaaagtggcagtgaagaccatgaagttggacaactcttcacagcgggagatcgaggagtttctcagtgaggcagcgtgcatgaaagacttcagccacccaaatgtcattcgacttctaggtgtgtgtatagaaatgagctctcaaggcatcccaaagcccatggtaattttacccttcatgaaatacggggacctgcatacttacttactttattcccgattggagacaggaccaaagcatattcctctgcagacactattgaagttcatggtggatattgccctgggaatggagtatctgagcaacaggaattttcttcatcgagatttagctgctcgaaactgcatgttgcgagatgacatgactgtctgtgttgcggacttcggcctctctaagaagatttacagtggcgattattaccgccaaggccgcattgctaagatgcctgttaaatggatcgccatagaaagtcttgcagaccgagtctacacaagtaaaagtgatgtgtgggcatttggcgtgaccatgtgggaaatagctacgcggggaatgactccctatcctggggtccagaaccatgagatgtatgactatcttctccatggccacaggttgaagcagcccgaagactgcctggatgaactgtatgaaataatgtactcttgctggagaaccgatcccttagaccgccccaccttttcagtattgaggctgcagctagaaaaactcttagaaagtttgcctgacgttcggaaccaagcagacgttatttacgtcaatacacagttgctggagagctctgagggcctggcccagggctccacccttgctccactggacttgaacatcgaccctgactctataattgcctcctgcactccccgcgctgccatcagtgtggtcacagcagaagttcatgacagcaaacctcatgaaggacggtacatcctgaatgggggcagtgaggaatgggaagatctgacttctgccccctctgctgcagtcacagctgaaaagaacagtgttttaccgggggagagacttgttaggaatggggtctcctggtcccattcgagcatgctgcccttgggaagctcattgcccgatgaacttttgtttgctgacgactcctcagaaggctcagaagtcctgatgtgaggagaggtgcggggagacattccaaaaatcaagccaattcttctgctgtaggagaatccaattgtacctgatgtttttggtatttgtcttccttaccaagtgaactccatggccccaaagcaccagatgaatgttgttaagtaagctgtcattaaaaatacataatatatatttatttaaagagaaaaaatatgtgtatatcatggaaaaagacaaggatattttaataaaacattacttatttcatttcacttatcttgcatatcttaaaattaagcttcagctgctccttgatattaacatttgtacagagttgaagttgttttttcaagttcttttctttttcatgactattaaatgtaaaaatatttgtaaaatgaaatgccatatttgacttggcttctggtcttgatgtatttgataagaatgattcattcaatgtttaaagttgtataactgattaattttctgatatggcttcctaataaaatatgaataaggaagaaaaaa

SEQ ID NO: 1293 - DNA, 3479 bp, HOMO SAPIENS
aactcacacggcctcttgcaaacgttcccaaatcttcccagtcggcttgcagagactccttgctcccaggagataaccaggtaaaggagtatgaaagtttgggtacaaactcattgctgcaaattgaaaaccatgcaaaggctgtcttcctctggggagttcaatgcctctctttttcttatcactttaccattggttggactttgattccagggatcctacgattactcaataccctacaggatatacatggttaaccatttgcatttgggcaaataggcgttacttttcaataggaagtggcaatccagaacttgcttttgggcaattctagtagctcaccgcttttttcttaatgactgctagaagctgcatcttattgacagatggtcatcacattggtgagctggagtcatcagattgtggggcccggagtgaggctgaagggagtggatcagagcactgcctgagagtcacctctactttcctgctaccgctgcctgtgagctgaaggggctgaaccatacactcctttttctacaaccagcttgcattttttctgcccacaatgagcggggaatcaatgaatttcagcgatgttttcgactccagtgaagattattttgtgtcagtcaatacttcatattactcagttgattctgagatgttactgtgctccttgcaggaggtcaggcagttctccaggctatttgtaccgattgcctactccttgatctgtgtctttggcctcctggggaatattctggtggtgatcacctttgctttttataagaaggccaggtctatgacagacgtctatctcttgaacatggccattgcagacatcctctttgttcttactctcccattctgggcagtgagtcatgccaccggtgcgtgggttttcagcaatgccacgtgcaagttgctaaaaggcatctatgccatcaactttaactgcgggatgctgctcctgacttgcattagcatggaccggtacatcgccattgtacaggcgactaagtcattccggctccgatccagaacactaccgcgcagcaaaatcatctgccttgttgtgtgggggctgtcagtcatcatctccagctcaacttttgtcttcaaccaaaaatacaacacccaaggcagcgatgtctgtgaacccaagtaccagactgtctcggagcccatcaggtggaagctgctgatgttggggcttgagctactctttggtttctttatccctttgatgttcatgatattttgttacacgttcattgtcaaaaccttggtgcaagctcagaattctaaaaggcacaaagccatccgtgtaatcatagctgtggtgcttgtgtttctggcttgtcagattcctcataacatggtcctgcttgtgacggctgcaaatttgggtaaaatgaaccgatcctgccagagcgaaaagctaattggctatacgaaaactgtcacagaagtcctggctttcctgcactgctgcctgaaccctgtgctctacgcttttattgggcagaagttcagaaactactttctgaagatcttgaaggacctgtggtgtgtgagaaggaagtacaagtcctcaggcttctcctgtgccgggaggtactcagaaaacatttctcggcagaccagtgagaccgcagataacgacaatgcgtcgtccttcactatgtgatagaaagctgagtctccctaaggcatgtgtgaaacatactcatagatgttatgcaaaaaaaagtctatggccaggtatgcatggaaaatgtgggaattaagcaaaatcaagcaagcctctctcctgcgggacttaacgtgctcatgggctgtgtgatctcttcagggtggggtggtctctgataggtagcattttccagcactttgcaaggaatgttttgtagctctagggtatatatccgcctggcatttcacaaaacagcctttgggaaatgctgaattaaagtgaattgttgacaaatgtaaacattttcagaaatattcatgaagcggtcacagatcacagtgtcttttggttacagcacaaaatgatggcagtggtttgaaaaactaaaacagaaaaaaaaatggaagccaacacatcactcattttaggcaaatgtttaaacatttttatctatcagaatgtttattgttgctggttataagcagcaggattggccggctagtgtttcctctcatttccctttgatacagtcaacaagcctgaccctgtaaaatggaggtggaaagacaagctcaagtgttcacaacctggaagtgcttcgggaagaaggggacaatggcagaacaggtgttggtgacaattgtcaccaattggataaagcagctcaggttgtagtgggccattaggaaactgtcggtttgctttgatttccctgggagctgttctctgtcgtgagtgtctcttgtctaaacgtccattaagctgagagtgctatgaagacaggatctagaataatcttgctcacagctgtgctctgagtgcctagcggagttccagcaaacaaaatggactcaagagagatttgattaatgaatcgtaatgaagttggggtttattgtacagtttaaaatgttagatgtttttaattttttaaataaatggaatactttttttttttttttaaagaaagcaactttactgagacaatgtagaaagaagttttgttccgtttctttaatgtggttgaagagcaatgtgtggctgaagacttttgttatgaggagctgcagattagctaggggacagctggaattatgctggcttctgataattattttaaaggggtctgaaatttgtgatggaatcagattttaacagctctcttcaatgacatagaaagttcatggaactcatgtttttaaagggctatgtaaatatatgaacattagaaaaatagcaacttgtgttacaaaaatacaaacacatgttaggaaggtactgtcatgggctaggcatggtggctcacacctgtaatcccagcattttgggaagctaagatgggtggatcacttgaggtcaggagtttgagaccagcctggccaacatggcgaaacccctctctactaaaaatacaaaaatttgccaggcgtggtggcgggtgcctgtaatcccagctacttgggaggctgaggcaagagaatcgcttgaacccaggaggcagaggttgcagtgagccgagatcgtgccattgcactccagcctgggtgacaaagcgagactccatctcaaaaaaaaaaaaaaaaaaaaaggaaagaactgtcatgtaaacataccaacatgtttaaacctgacaatggtgttatttgaaactttatattgttcttgtaagctttaactatatctctctttaaaatgcaaaataatgtcttaagattcaaagtctgtatttttaaagcatggctttggctttgcaaaataaaaaatgtgttttgtacatgaa

SEQ ID NO: 1294 - DNA, 4285 bp, HOMO SAPIENS
aaaggcgcaagaagcgggcaccccgggaaccccattccctcggctcactcggcgcggagaagcgacgcccgctgactccgagagccccggtgctccgtgcacctggtccccaagttgaggagcgacacccctccacaggggactagcccgcgcggggagcattccggtctcactgaccccggcccacccgcgggactccaggcacctcttctgcccgcaccccgcgacccctcccgggaccccggagacagccggcctgcccccggcgtcccccttggccagcacgccatgccggggctgcgccgggaccgcctactgactctgctgctgctgggcgcgctgctctccgccgacctctacttccacctctggccccaagtacagcgccagctgcggcctcgggagcgcccgcgggggtgcccgtgcaccggccgcgcctcctccctggcgcgggactcggccgcagctgcctcggaccccggcacgatcgtgcacaacttttcccgaaccgagccccggactgaaccggctggcggcagccacagcgggtcgagctccaagttgcaggccctcttcgcccacccgctgtacaacgtcccggaggagccgcctctcctgggagccgaggactcgctcctggccagccaggaggcgctgcggtattaccggaggaaggtggcccgctggaacaggcgacacaagatgtacagagagcagatgaaccttacctccctggaccccccactgcagctccgactcgaggccagctgggtccagttccacctgggtattaaccgccatgggctctactcccggtccagccctgttgtcagcaaacttctgcaagacatgaggcactttcccaccatcagtgctgattacagtcaagatgagaaagccttgctgggggcatgtgactgcacccagattgtgaaacccagtggggtccacctcaagctggtgctgaggttctcggatttcgggaaggccatgttcaaacccatgagacagcagcgagatgaggagacaccagtggacttcttctacttcattgactttcagagacacaatgctgagatcgcagctttccatctggacaggattctggacttccgacgggtgccgccaacagtggggaggatagtaaatgtcaccaaggaaatcctagaggtcaccaagaatgaaatcctgcagagtgttttctttgtctctccagcgagcaacgtgtgcttcttcgccaagtgtccatacatgtgcaagacggagtatgctgtctgtggcaacccacacctgctggagggttccctctctgccttcctgccgtccctcaacctggcccccaggctgtctgtgcccaacccctggatccgctcctacacactggcaggaaaagaggagtgggaggtcaatcccctttactgtgacacagtgaaacagatctacccgtacaacaacagccagcggctcctcaatgtcatcgacatggccatcttcgacttcttgatagggaatatggaccggcaccattatgagatgttcaccaagttcggggatgatgggttccttattcaccttgacaacgccagagggttcggacgacactcccatgatgaaatctccatcctctcgcctctctcccagtgctgcatgataaaaaagaaaacacttttgcacctgcagctgctggcccaagctgactacagactcagcgatgtgatgcgagaatcactgctggaagaccagctcagccctgtcctcactgaaccccacctccttgccctggatcgaaggctccaaaccatcctaaggacagtggaggggtgcatagtggcccatggacagcagagtgtcatagtcgacggcccagtggaacagttggccccagactctggccaggctaacttgacaagctaagggctggcagagtccagtttcagaaaatacgcctggagccagagcagtcgactcgagtgccgaccctgcgtcctcactcccacctgttactgctgggagtcaagtcagctaggaaggaagcaggacattttctcaaacagcaagtggggcccatggaactgaatctttactccttggtgcaccgcttctgtcgtgcgttgccttgctccgtttttcccaaaaagcactggcttcatcaaggccaccgacgatctcctgagtgcactgggaaatctgggtataggtcaggcttggcagccttgatcccaggagagtactaatggtaacaagtcaaataaaaggacatcaagtggatacctgacttctcaggatccttattctagctacaagtcaaagataactcctggtccagacaaaacacctggcctatcacaagctgactaaaaatctgcactttgggccagcgcaggcaacagtaactctgacaggttcaaattagacctcacactttctactcatattctagtcactggacccatctgaatcagtaatccctactgcccggtcctggagtaacttcttagagatattataacaagtggcaaaaataaaagagggatttgctaagaatatcagaaaaggagtgttccaatttgaagagtattacaattgaaataacatcaaatatgtcacactaagcagccagtaacagaataaataattacaacgaaggaaaaaaaaaggaaagtcctccaaggtcaggatggcatgggaacaggcctagcagggacacaagcctggagtaaggcaggaaaagagccaaggctgactacagcccaccaaccacaatcttcttccctaagaccccaggattgtccccggcccatccccaaaagaagaaaggggctatgtggaaaggtgaggccctctagatgcccctccctgtgacggctggctcaaaaaagactaagtcaggttttttattgaagcctcccttagaagaaagtgtagtagggattccttgtctcctctaccttctccctgacttgttgatatctgaaactccttttaataggaggctttgtttcttattccataattaatgaccgaaaacacaaaggacagtaaggtcttcattccatggagtgactagtcagtcaacaaaagtaaaaatgcctcatttcatcaaatcaacttttccagtaaaggccagagttcaaatactgtaagcatgagaatagaatggagctgtcactaaagagagtacaaggtcaagaaccagaaatgtctccaagctttctgcagtgtgagcaaagatagcctcgactggacaaataacacttctgaccccgtggtacccccacatgactggtatgctgcccctggactttgtgtctctctaaaatcactaccattcactgagatctgaccaggtgaggcactcaccaacgctacagaagcaacacacaggtttccaatcctctcaaacacagatacaacccccatcctccaatgtgcatggaagaactttaaatctcagagagagtaagcaaaatcacacaatttagtggtttagacctattccaaagtcttcttttcactgtaacacaaaacccaacagtatcccacccaatttatgaagtcaaatttgtttgcttaaaaaaaaaatcagctgggcatgggctcacacctgtaatcccagcactttgggcctaaacaggcagatcgcttggtctcaggagctcgagaccagcctgggtaacatgacaaaaccctgtctctacaaaaaaatacaaaaaaaaaaaaatttttttttaaatcaactctttaacagagaaaccttaatcccaaagatttccttaactgttgtggccctactgcagcatagggctccccacttcattcactgtctctcctgcttcaagatgtttcttccctgtggatgaagaaccaggagatcacacacagaaatgggaaaatatctgggtaaaaacattcaaagaatagcacaaaatggtttgggacttccaaataagactctcaggaaagcaggctacagctctacctcaaaacccgccacctcctataacgaaggactggttttccaatggcctatatacacattttgctgcactctacaaacagaaagcaataggcttgaatttcaccatgatatgtggtacacctaccttattattcacttatctttcaaccttccattactttttgattagtaacaaaattaagactcatttctcaaaaatatcagaaaaccaaccgtttcattcttactcgagttcttccagcatgttcattttgaactgtttacctcccatgaaataaaaagtctcttgactctgaaaaaaaaaaa

SEQ ID NO: 1295 - DNA, 1310 bp, HOMO SAPIENS
gctcggagcccggagcgtgcctcggcggcctgtcggttttcaccatggagcagctgagctcagcaaacacccgcttcgccttggacctgttcctggcgttgagtgagaacaatccggctggaaacatcttcatctctcccttcagcatttcatctgctatggccatggtttttctggggaccagaggtaacacggcagcacagctgtccaagactttccatttcaacacggttgaagaggttcattcaagattccagagtctgaatgctgatatcaacaaacgtggagcgtcttatattctgaaacttgctaatagattatatggagagaaaacttacaatttccttcctgagttcttggtttcgactcagaaaacatatggtgctgacctggccagtgtggattttcagcatgcctctgaagatgcaaggaagaccataaaccagtgggtcaaaggacagacagaaggaaaaattccggaactgttggcttcgggcatggttgataacatgaccaaacttgtgctagtaaatgccatctatttcaagggaaactggaaggataaattcatgaaagaagccacgacgaatgcaccattcagattgaataagaaagacagaaaaactgtgaaaatgatgtatcagaagaaaaaatttgcatatggctacatcgaggaccttaagtgccgtgtgctggaactgccttaccaaggcgaggagctcagcatggtcatcctgctgccggatgacattgaggacgagtccacgggcctgaagaagattgaggaacagttgactttggaaaagttgcatgagtggactaaacctgagaatctcgatttcattgaagttaatgtcagcttgcccaggttcaaactggaagagagttacactctcaactccgacctcgcccgcctaggtgtgcaggatctctttaacagtagcaaggctgatctgtctggcatgtcaggagccagagatatttttatatcaaaaattgtccacaagtcatttgtggaagtgaatgaagagggaacagaggcggcagctgccacagcaggcatcgcaactttctgcatgttgatgcccgaagaaaatttcactgccgaccatccattccttttctttattcggcataattcctcaggtagcatcctattcttggggagattttcttccccttagaagaaagagactgtagcaatacaaaaatcaagcttagtgctttattacctgagtttttaatagagccaatatgtcttatatctttaccaataaaaccactgtccagaaaaaaaaaaaaaaaaaaaa

SEQ ID NO: 1296 - DNA, 1319 bp, HOMO SAPIENS
gacgccgccgcttggcgccgtgacgctcagccgggccttgtggagtgcgggtctctgctgcggacgccgggggccggcgcggcgttggccgcccccggcctcgccgagtgcagcgcgcccgaaggccagtgcctgcgctccgtccgcggcccggcgcccagggtgggcggggaggccgccgcgcagtcgccgcacgctacaccgccggcgccgtcgtttcgcgtcgcccgcttccggccaccgcggccgccattttgttcgcgcggaagcgccgcggtagggtgggaacccaagcgggagagccgcgggatttgcggccgccgccatgccgtcgtccccgctgcgggtggcggtggtgtgctcgagcaaccagaaccggagcatggaggcgcacaacatcctcagcaaacggggattcagcgtccgatcctttggaacagggactcacgtgaagcttccaggaccagctcccgacaagcccaatgtttatgatttcaaaaccacatatgaccagatgtacaatgatcttcttaggaaagacaaagaactctatacacagaatgggattttacatatgctggacagaaataagagaatcaagccccggccagaaagattccagaactgcaaagacctgtttgatctgatcctcacttgcgaagagagagtgtatgaccaggtggtggaagatctgaattccagagaacaggagacctgccagcctgtgcacgtggtcaatgtggacatccaggacaaccacgaggaggccaccctgggggcgtttctcatctgtgagctctgccagtgtatccagcacacggaagacatggagaacgagatcgacgagctgctgcaggagttcgaggagaagagtggccgcacctttctgcacaccgtctgcttctactgagcccagcgcccgcatggagccgcctctggagcttcctgttgttcatactttttccttcctgacatttgtttttacttacaggtgttctgctggtgacggtagcattacccaaataaactgtgcatatgaaatgggagaggagatgccaaaacgccagatgaaagcaatcaagtttcttcttttccacttttacttatgagcaggatattgattacaaagtttttcttctttaaccaaaaaggaaagacaacggtttgtgtgcacttcccgacatacctgtgtcttcgtgtgcctgccttccctccctcctccccaccgggccggactgtacagagccctgctgcggcgtgttaggaatgacctggaattgtcaataaacagatgctgctgtcaaaaaaaaaaaaaaaaa

SEQ ID NO: 1297 - DNA, 7555 bp, HOMO SAPIENS
cgggcgccggggagagcgggcggccgggcggcaggcgggcgagcagcgatcgggcggccgagcgagcgagcaacgccggcgcagcgcggtgaccccagccccagccggcgcggagcaggagccggagccgagcggatctcggcgccctcgctgcgctcctcccggcccgagcctgccctacccggcggtggcggcggcgcgtcctccagcggcggcagcggcgctcgcagcgcccggactcacggcagctgtgttctgatttcgtactactgctggggctgccacctcctcctccagacgctctcagcagacttgagtcctggtccttctgcagaggcctgagcaggaggaagaggaggaggcccgttggcgtcggaccaatgctgcaaggggtgtgaggagaggagccgctgtttttcactgagctgccataccccgaaagcaggatggagctggagtgaggtggaggggccgcaagctgctgaccggcgtgtggaacactggtggtttgcagatcactgaggctggacaacgttcatggctctcgggtagaacctagtgaaacggccagaatgaattctatggacaggcacatccagcagaccaatgaccgactgcagtgcatcaagcagcacttacagaatcctgccaacttccacaatgccgccacggagctgctggactggtgcggagacccacgggccttccagcggcccttcgagcagagcctgatgggctgtttgacggtggtcagtcgggtggcagcccagcaaggctttgacctggacctcggctacagactgctggctgtgtgtgctgcaaaccgagacaagttcaccccgaagtctgccgccttgttgtcctcctggtgcgaagagctcggccgcctgctgctgctccgacatcagaagagccgccagagcgatccccctgggaaactccccatgcagccccctctcagctccatgagctccatgaaacccactctgtcgcacagtgatgggtcgttcccctatgactctgtcccttggcagcagaacaccaaccagcctcccggctccctttccgtggtcaccacggtttggggagtaaccaacacatcccagagccaggtccttgggaaccctatggccaatgccaacaaccccatgaatccaggcggcaaccccatggcgtcgggcatgaccaccagcaacccaggcctcaactccccacagtttgcggggcagcagcagcagttctcagccaaggctggccccgctcagccctacatccagcagagcatgtatggccggcccaactaccccggcagcgggggctttggggccagttaccctgggggtcctaacgcccccgcaggcatgggcatccctccgcacaccaggccgcctgctgacttcactcagcccgcggcagccgctgcagcagcggcagtggcagcagcagcagccacagctacagccacagccacggccactgtggcagccctgcaggagacacagaacaaggatataaaccagtatggaccgatgggtcccacccaggcgtataacagccaattcatgaaccagcccgggccgcgggggcctgcctccatggggggcagcatgaaccccgcgagcatggcggctggcatgacgccctcggggatgagcggccctcccatgggcatgaaccagccccggccgcccggcatcagcccctttggcacacacgggcagcggatgccccagcagacctacccgggcccccggccccagtcccttcctattcagaacataaagaggccataccctggagagcccaactatggaaaccagcaatatggaccaaacagccagttccccacccagccaggccagtacccagcccccaaccccccgaggccactcacctcccccaactacccaggacagaggatgcccagccagccgagctccgggcagtacccgccccccacggtcaacatggggcagtattacaagccagaacagtttaatggacaaaataacacgttctcgggaagcagctacagtaactacagccaagggaatgtcaacaggcctcccaggccggttcctgtggcaaattacccccactcacctgttccagggaaccccacaccccccatgacccctgggagcagcatccctccatacctgtcccccagccaagacgtcaaaccacccttcccgcctgacatcaagccaaatatgagcgctctgccaccacccccagccaaccacaatgacgagctgcggctcacattccctgtgcgggatggcgtggtgctggagcccttccgcctggagcacaacctggcggtcagcaaccatgtgttccacctgcggcccacggtccaccagacgctgatgtggaggtctgacctggagctgcagttcaagtgctaccaccacgaggaccggcagatgaacaccaactggcccgcctcggtgcaggtcagcgtgaacgccacgcccctcaccattgagcgcggcgacaacaagacctcccacaagcccctgcacctgaagcacgtgtgccagccgggccgcaacaccatccagatcaccgtcacggcctgctgctgctcccacctcttcgtgctgcagctggtacaccggccctccgtccgctctgtgctgcaaggactcctcaagaagcgcctcctgcccgcagagcactgtatcacgaaaatcaagcggaatttcagcagcgtggctgcctcctcgggcaacacgaccctcaacggggaggatggggtggagcagacggccatcaaggtgtctctgaagtgccccatcacattccggcgcatccagctgcctgctcgaggacacgattgcaagcatgtgcagtgctttgatctggagtcatacctgcagctgaattgcgagagagggacctggaggtgtcctgtgtgcaataaaaccgctctgctggagggcctggaggtggatcagtacatgtggggaatcctgaatgccatccaacactccgagtttgaagaggtcaccatcgatcccacgtgcagctggcggccggtgcccatcaagtcggacttacacatcaaggacgaccctgatggcatcccctccaagcggttcaagaccatgagtcccagccagatgatcatgcccaatgtcatggagatgatcgcagccctgggccccggcccgtccccctatcccctcccgcctcccccagggggcaccaactccaacgactacagcagccaaggcaacaactaccaaggccatggcaactttgacttcccccacgggaaccctggagggacatccatgaatgacttcatgcacgggcccccccagctctcccaccccccggacatgcccaacaacatggccgccctcgagaaacccctcagccaccccatgcaggaaactatgccacacgctggcagctctgaccagccccacccctccatacaacaaggtttgcacgtaccacaccccagcagccagtcagggcctccattacatcacagtggggctcctcctcctcctccttcccagcctccccggcagccgccacaggccgctcccagcagccatccacacagcgacctgacctttaacccctcctcagccttagagggtcaggccggagcgcagggagcgtccgacatgccggagccttcgctggatctccttcccgaactcacaaatcctgacgagctcctgtcttatctggacccccccgacctgccgagcaatagtaacgatgacctcctgtctctatttgagaacaactgagggccacccggtcggggccatccctccacactctgcatcctaccccacctacccaacacacttttccacctgggagcctgtgccctcagaccgccccgcaccagagccacgggctgtggggcggggagccctcccccgctgcagccctctcagaacagaggggtagggagggtgcaccagtgcaccaggaaggctgtgtgggtctggagcccacgtcccacctccacacccttggcttgggcccatgcccagcgcaggcctgaagaccaccctcccgagaggaaccagcccggtaagagggcacacgctgatgcggcttcccggtccctccgcgtgtgccgattccagatgaccttccagtgtccccaaggttcttccatcttctagactgtaaccctgcctccctgcttcctggtccagagcctccctccagtgactgtggagcctgagaaggcccccgggccccagcatgggccccgagccttggaggagcactggcagttggtggcagtgagaccagcccacccaccaccacccaccacagaaaagcacaaacctctgggaaagacaacgtctctcgggggccaggggtcatcggtttgacccctgacctataagccaagataccccataaacacactcagaaagcagagaaaaaggacaagagtctgtgtttgagagggggtctgccattcctgcttggggactggtggggaagagggccaggacatcttctgagccaggacgtccctgaggctccacctccaagctcagacagggcccaggcttggggaacagagagagcaggtgtacacccaaccaaagtgattgtgcccttggttggggggcgcgggcatataacctgtcagaagcaaacaggagcggcaacttctaactttgctccaagccactctctttttaaacagcaacaatttaaagctatgaagtcacctggagaaaaggaacgttgctcttggacagcaagcaaaccatttctctccgtctgttctgtttttctcctagtccctctcctgccacctctccaagacttccgtgggacacccacttccctctgtcctagttctctttgtccaatcagatggcaagggcagtgcgtggaaaggccggggaggtgcagaaaccagagcccagggcaatggtgtctgtccagcccctccctctgtccctgtgctccaagctgcccccggctgcagcccaggccatggacatgtgcaccagtatgtacctgcaggcatgggggggaggggggcgtgtttctgggcctgccccagacactgcccttggctgccagcctaccctgcctgcactcctccaccatcacaatctcacccaaactcctgctcactcaagcaaaagcagcctctggccttccctccaccgctttgctccatctggcttaccactctccagggcctcctggggagcctgtcctgtgttcactttgtttcaggctggtctgtgccccgtgagccacatggcctagggtgatgccaggttgtcccgtcactggggtcccatctgtaaattctttgcgcccttcccggctgctgcctggggccctttcctgctctcccgtccgctgtgggtggtccccagctctcctctgtgggttttaccggaaaggtggccccagctgttgacttccagtcactgtcccagacggcacaaggttttctgtaggaaagctgccattgccccggccccttttcttcctttgtcccgttgtcgaggttttttcaaatagcgtgttgttcagtatgcaaatcaattattttaagaatcgcttttgtaaatatctttgtgaatattttagtatcgtctttgataatattcaacattttcatgacctggttatagcctttgctggtgtttttaaaatacctggactcaatgacaaagaccgagtcttctttttttttaaacaaaaacaaaaaaagcaaccagggctatttgtacagttgaaggggtgaacagaatgggcggctgtgctgggagttggaagaccgggcagcccgctatttagagccatccctcagtcagctggcagggacaagccaacgccaggtagcatgtggccacccttgcccagtgtctgtggcctggcaagtggccacgccctgtgtcagaccatctgggaattaagctccagacagacttacagatgccttccttaggagttcttgcttcttgcgttgatactttgccccagaaaggcctgggattcattctggttcttatcagggtgtgtccacactctgctcacaggtggatccacggctttccagtgcggagagtcgagatgctccctgcagcccaggccccgggcacctcctgcaaccatctctgggctcagcacctgaggcgggtttcctgggtcccctctccagcaagcctccaccagcaagctcggcccagagcttcccttccggctggctctgaaccgtgcgtggtgcctacagcctgcagtctggagacaagctcttccggagtgctctgggagccaggccagggtgtgagggaggtgcagaggcatccggggcgggagcaagccccaggttgtgacaggtgcaggtagacaacgcccataaacagagatggtcctgaactctggagagatccttccctgatcctttcggacgactacttggagccataagtaacctcagcaaaaacgaggcctctgcaagccacttttccatgccaagcatccacccggcccacaggcatgtttctgccgccactccgcaagatggacagggagccagcaggcaggcgggaagggccaagtacaggcaatcacccccatcttcttggtttgaagctttatccatgtatcatgttccgtgtagccattttattttttaagaaactgctaatactttctccctaatggaagccctgatcccccagagagctacaggtctgctcccgacgggcctcgggcctgacccgtccacacagggccgtgtcaacagcagcgactcaagggacgtgtgtacatatgtaaatgagaaatagagacgtgtcaacagatgcattcatttctcttggaatgtgtattgtttttattttgcgaaacaaaacaaaacaaaaaaaaaagcttggaactccatcacgtggaaaaactagatcctgttggttatagcatttgtgagttctccacgtctgtctctctcgctcatgtaatatactctgaccctgagtggaaaggggtttttgttctgtttttattttacctacatgtactatttagcttcagtgtactagtcctgccacctgtgtatttttagggtgctatggaaataatgaaaagaaacggggatttcagaagaaaattgtaaccaaattcatactttgtataatttttgatatcatgatcacaggtgattcacacgtacacacataaacacacccaccagtgcagcctgaagtaactcccacagaaaccatcatcgtctttgtacatcgtatgtacaatgcaatcatttcatactttaaactggtcaaaaaactaattgtgatttctagtcttgcaaagctgtatgtagttagatgatgtgacaacctctaatatttatctaataaatatgtattcagatgaaacctgtatattaggtgttcatgtggttattttgtatttaaagatcaaattatttgactattgctagacatttctatactctgttgtaacactgaggtatctcatttgcccatgttaatttttttctaaataaattgacaaaaacaaaggtttggcg

SEQ ID NO: 1298 - DNA, 1619 bp, HOMO SAPIENS
aacattcctgcaaatggtttcaatatatgcagatgtctcgatataggaatgaaattacgtctttggaacaacttaaataagtcaaatatacttggagctttaaaaattaaaaggagagagattcgagcaccttttctgctgccatgacaaccatgcaaggaatggaacaggccatgccaggggctggccctggtgtgccccagctgggaaacatggctgtcatacattcacatctgtggaaaggattgcaagagaagttcttgaagggagaacccaaagtccttggggttgtgcagattctgactgccctgatgagccttagcatgggaataacaatgatgtgtatggcatctaatacttatggaagtaaccctatttccgtgtatatcgggtacacaatttgggggtcagtaatgtttattatttcaggatccttgtcaattgcagcaggaattagaactacaaaaggcctggtccgaggtagtctaggaatgaatatcaccagctctgtactggctgcatcagggatcttaatcaacacatttagcttggcgttttattcattccatcacccttactgtaactactatggcaactcaaataattgtcatgggactatgtccatcttaatgggtctggatggcatggtgctcctcttaagtgtgctggaattctgcattgctgtgtccctctctgcctttggatgtaaagtgctctgttgtacccctggtggggttgtgttaattctgccatcacattctcacatggcagaaacagcatctcccacaccacttaatgaggtttgaggccaccaaaagatcaacagacaaatgctccagaaatctatgctgactgtgacacaagagcctcacatgagaaattaccagtatccaacttcgatactgatagacttgttgatattattattatatgtaatccaattatgaactgtgtgtgtatagagagataataaattcaaaattatgttctcatttttttccctggaactcaataactcatttcactggctctttatcgagagtactagaagttaaattaataaataatgcatttaatgaggcaacagcacttgaaagtttttcattcatcataagaactttatataaaggcattacattggcaaataaggtttggaagcagaagagcaaaaaaaagatattgttaaaatgaggcctccatgcaaaacacatacttccctcccatttatttaactttttttttctcctacctatggggaccaaagtgctttttccttcaggaagtggagatgcatggccatctccccctccctttttccttctcctgcttttctttccccatagaaagtaccttgaagtagcacagtccgtccttgcatgtgcacgagctatcatttgagtaaaagtatacatggagtaaaaatcatattaagcatcagattcaacttatattttctatttcatcttcttcctttcccttctcccaccttctactgggcataattatatcttaatcatatatggaaatgtgcaacatatggtatttgttaaatacgtttgtttttattgcagagcaaaaataaatcaaattagaagcaataaaaaaaaaaaaaaaaaaaa

SEQ ID NO: 1299 - DNA, 4568 bp, HOMO SAPIENS
aggctgcccgagcttctgagcgagcgcggtgcttttgggaacgcgggacgggcgatctgcggcgccaggagctgggccgaggcgcggcggcgcggctgccggctgccctgtgaatgggaagttacgcgaagtccacccagcgtttctgaggcaatctgaaggcaaatcctgtttagacccaggcgaaggttcccggtgacccgggctctcaccagccaattgtcccttgccgtcctcctgagggtgcctggagcttaagcactgtgtgctcttggcctccacactggggatgccgctgactcccactgtccagggcttccagtggattctccgaggccctgatgtagaaacttccccattgggtgcaccaagagcagcctcacatggtgtgggctgacatcaagagctgccagatccaacagatggccaatctttcctaagctgctcaccttacaagaaaacgaatcgtactgctaagaattcaaacttcagcagtcatggggagccttggaaggagcccgaatcactgatggaattggacagtgcatggagatggttcagcaggacaaggtgtcattggaggacagtgtggagtgcagagagacatgctttgaaatgggattgatccagtcctccttccttcactaccacatgaatgctgggcagcccagggtcaacccaccgcaccctcaactcagacggttacctggcacgctggccacagtctacctcactcttatcagagtctgagctactggcagtgctttcagctctgagttcaggcacctcgaaccttgtttttgtggtgaaggaacctaaagtgctgtggggagtgatcacatttttcacaacatccctggctccacctcttctgccacaaacgtcagcatggtggtatcagccggcccttggtccagcgagaaggcagagacgaacattttagaaatcaacgagaaattgcgcccccagctggcagagaacaaacagcagttcagaaacctcaaagagaaatgttttgtaactcaactggccggcttcctggccaaccgacagaagaaatacaagtatgaagagtgtaaagacctcataaaatttatgctgaggaatgagcgacagttcaaggaggagaagcttgcagagcagctcaagcaagctgaggagctcaggcaatataaagtcctggttcactctcaggaacgggagctgacccagttaagggagaagttacgggaagggagagatgcctcccgctcattgaatcagcatctccaggccctcctcactccagatgagccagacaagtcccaggggcaggacctccaagaacagctggctgaggggtgtagactggcacagcaccttgtccaaaagctcagcccagaaaatgacgaagatgaggatgaagatgttcaagttgaggaggctgagaaagtactggaatcatctgcccccagggaggtgcagaaggctgaagaaagcaaagtccctgaggactcactggaggaatgtgccatcacttgttcaaatagccacggcccttgtgactccaaccagcctcacaagaacatcaacatcacatttgaggaagacaaagtcaactcaactctggttgtagacagagaatcctctcatgatgaatgtcaggatgctgtaaacattctcccagtccctggccccacctcttctgccacaaacgtcagcatggtggtatcagccggccctttgtccagcgagaaggcagagatgaacattctagaaatgaatgagaaattgcgcccccagctggcagagaagaaacagcagttcagaaacctcaaagagaaatgttttgtaactcaactggccggcttcctggccaaccagcagaacaaatacaaatatgaagagtgcgaagacctcataaaatctatgctgaggaatgagcgacagttcaaggaggagaagcttgcagagcagctcaagcaagctgaggagctcaggcaatataaagtcctggttcactctcaggaacgagagctgacccagttaagggagaagttacgggaagggagagatgcctcccgctcattgaatcagcatctccaggccctcctcactccggatgagccagacaagtcccaggggcaggacctccaagaacagctggctgaggggtgtagactggcacagcaccttgtccaaaagctcagcccagaaaatgacgaagatgaggatgaagatgttcaagttgaggaggctgagaaagtactggaatcatctgcccccagggaggtgcagaaggctgaagaaagcaaagtccctgaggactcactggaggaatgtgccatcacttgttcaaatagccacggcccttgtgactccaaccagcctcacaagaacatcaacatcacatttgaggaagacaaagtcaactcagctctggttgtagacagagaatcctctcatgatgaatgtcaggatgctgtaaacattctcccagtccctggccccacctcttctgccacaaacgtcagcatggtggtatcagccggccctttgtccagcgagaaggcagagatgaacattctagaaatgaatgagaaattgcgcccccagctggcagagaagaaacagcagttcagaaacctcaaagagaaatgttttgtaactcaactggcctgcttcctggccaaccagcagaacaaatacaaatatgaagagtgcaaagacctcataaaatctgtgctgaggaatgagcgacagttcaaggaggagaagcttgcagagcagctcaagcaagctgaggagctcaggcaatataaagtcctggttcactctcaggaacgggagctgacccagttaagggagaagttacgggaagggagagatgcctcccgctcattgaatcagcatctccaggccctcctcactccggatgagccagacaagtcccaggggcaggacctccaagaacagctggctgaggggtgtagactggcacagcaacttttccaaaagctcagcccagaaaatgacaatgatcacgatgaagatgttcaagttgaggtggctgagaaagtgcagaaatcgtctgcccccagggagatgcagaaggctgaagaaaaggaagtccctgaggactcactggaggaatgtgccatcacttgttcaaatagccatggcccttatgactccaaccagccacataggaaaaccaaaatcacatttgaggaagacaaagtcgactcaactctcattggctcatcctctcatgttgaatgggaggatgctgtacacattatcccagaaaatgaaagtgatgatgaggaagaggaagaaaaagggccagtgtctcccaggaatctgcaggagtctgaagaggaggaagtcccccaggagtcctgggatgaaggttattcgactctctcaattcctcctgaaatgttggcctcgtaccagtcttacagcggcacatttcactcattagaggaacagcaagtctgcatggctgttgacataggcggacatcggtgggatcaagtgaaaaaggaggaccaagaggcaacaggtcccaggctcagcagggagctgctggatgagaaagggcctgaagtcttgcaggactcactggatagatgttattcaactccttcaggttatcttgaactgaccgactcatgccagccctacagaagtgccttttacatattggagcaacagcgtgttggctgggctcttgacatggatgaaattgaaaagtaccaagaagtggaagaagaccaagacccatcatgccccaggctcagcagggagctgctggatgagaaagagcctgaagtcttgcaggactccctggatagatgttattcgactccttcaggttatcttgaactgcctgacttaggccagccctacagaagtgctgtttactcattggaggaacagtaccttggcttggctcttgacgtggacagaattaaaaaggaccaggaagaggaagaagaccaaggcccaccatgccccaggctcagcagggagctgctggaggcagtagagcctgaagtcttgcaggactcactggatagatgttattcaactccttccagttgtcttgaacagcctgactcctgcctgccctatggaagttccttttatgcattggaggaaaaacatgttggcttttctcttgacgtgggagaaattgaaaagaaggggaaggggaagaaaagaaggggaagaagatcaacgaagaaaagaaggagaaggggaagaaaagaaggggaagaagatcaaaacccaccatgccccaggctcagcggcatgctgatggaagtggaagagcctgaagtcttgcaggactcactggatagatgttattcgactccgtcaatgtactttgaactacctgactcattccagcactacagaagtgtgttttactcatttgaggaacagcacatcagcttcgcccttgacgtggacaataggtttcttactttgatgggaacaagtctccacctggtcttccagatgggagtcatattcccacagtaagcagcccttactaagccgagagatgtggatccgca

SEQ ID NO: 1300 - DNA, 4163 bp, HOMO SAPIENS
tcagagcgctgggcaccggccgggctgtggtccccgcgcgccgccgtcgcctctcgagcgggctcggctcacagcgaccggcggccggggagatgtgagctggggccggcgggcgcggccggaccgccgcgatgtggctcaagcccgaggaggtgctgctgaagaacgcgctgaagctctgggtgacccagaagagcagctgctacttcatcctgcagcggcgccgcgggcacggcgaggggggcggccgcctcaccggtcgcctggtcggcgctctggatgcagtgttggattccaatgcacgggtcgctccatttcgaattctgcttcaagttcccggctcccaggtttattctcccatagcatgtggtgcaacattagaggaaatcaatcagcactgggactggctggaacaaaatctcctccacaccttgtctgtctttgataataaagatgacattgccagttttgtcaaagggaaggtaaaggctctgatagccgaggagaccagcagcaggctcgccgagcaggaggaggaacccgagaaattccgagaagccctggtgaagttcgaggccaggttcaacttccccgaggcggagaagctggtcacctactactcctgctgctgttggaagggcagggtgccccgccagggctggctgtacctcagcatcaaccacctctgcttctactccttcttcctgggcaaggaacttaaacttgtggttccgtgggttgatatccagaaattagaaagaacgtccaatgtctttctgacggataccatccgaatcaccacgcagaataaggagcgtgacttctccatgttcctgaacctggatgaggtgtttaaggtcatggagcagctggccgacgtgacgctgcgaaggctgctggataatgaggtctttgacctcgaccccgatctgcaggagccgagccagatcaccaagagggacctggaagccagagcacagaatgagttcttccgggctttcttcaggttgccgaggaaggagaagctgcacgcggttgtggactgttcgctctggacgccgttcagtcgctgtcacaccacggggcggatgttcgcctctgacagctacatctgctttgccagcagagaagatggctgctgtaagatcatcctgccactcagagaggtggtgagcatcgagaagatggaggacacgagcctgctgccgcatcccatcattgtcagtatcagaagcaaggtggccttccagttcattgagctccgggaccgagacagcctggtggaggcgctgcttgcgaggttgaagcaggtccacgccaaccaccccgtgcactacgacacctctgcggatgatgacatggcttcactcgtgtttcattcaacaagcatgtgcagtgaccacagatttggggatcttgaaatgatgtcttctcaaaatagcgaggagagtgagaaagagaagagcccgctgatgcaccccgatgccctggtcaccgccttccagcagtcaggcagccagagccctgactcccgaatgtccagagaacagataaaaataagcctgtggaatgaccactttgtggaatacggcagaaccgtgtgtatgtttcgcacagagaagattcggaagctcgtagccatgggcatccctgaatctttgcgagggagactctggcttctcttctcagatgcggtgacggatcttgcctcacaccctggttactacgggaatctggtggaggagtccctggggaaatgctgcctggtaaccgaggagatagaacgagacctgcaccgctccctgccagagcaccccgccttccagaacgaaacgggaattgctgctttgaggagagtcttgacggcctatgcccaccggaaccccaagattggatactgccagtccatgaacatcctgacctccgtgctgctgctgtacaccaaggaggaggaagccttctggctgttggttgctgtgtgtgagcggatgctgcccgattacttcaaccaccgagtgatcggggcacaagttgaccagtctgtcttcgaggagctcatcaagggtcatctcccagagctggcagagcacatgaacgacctctcagccctggcgtccgtctctctctcgtggttcctgaccctgttcctcagcatcatgcctctagagagtgcggtgaatgtggtagactgcttcttctatgatggcatcaaagccatcttccagctgggactggctgtgcttgaggccaatgctgaggacctgtgcagcagcaaggatgatggccaggccttgatgatcctcagcaggtttctagatcacattaagaatgaggacagcccagggcccccagttggcagccaccatgcctttttctccgacgaccaggagccctaccctgtgactgatatttcggacctgatccgggattcctatgagaaatttggagaccagtctgtggagcagatcgagcacctacgttacaagcacaggatcagggtcctccaaggccacgaggacaccacaaagcagaacgtgcttcgagtcgttatcccggaagtctcaattcttcctgaagacctagaggagctctacgacttattcaagagagaacatatgatgagctgttactgggagcagcccaggcccatggcctcacgccacgaccccagccggccctatgctgagcagtaccgcatagatgcccggcagtttgcacacctgtttcagctagtctcgccctggacctgcggggcccacacggagatcctcgccgaaaggacgttcaggctcttggatgacaacatggaccagctcatcgagttcaaagcgtttgtgagctgcctcgatattatgtataatggagaaatgaatgagaagattaaactattatacaggcttcatatccctccagcactcactgaaaatgaccgagacagccagtcgccgttgaggaatcctctgttgtcaacatcgagacccctggttttcgggaaacccaatggtgatgcagttgattatcagaaacagctgaagcagatgattaaggatttagccaaagaaaaagataaaactgagaaagaattgcccaaaatgagccagagagaatttatccagttctgtaaaactctgtacagtatgttccatgaagatccagaagaaaatgatttgtatcaagccatcgccacagtcaccacactgctgctgcagatcggggaggtggggcagcgaggcagcagctctggaagctgctcccaggagtgtggggaggagctgcgggcttcagctccttctcctgaggactcggtttttgcagacactgggaagacgccccaggactcccaggcatttccagaggcggcagaaagggactggactgtctcccttgaacatattttagcttcacttctgactgaacagtcattagtcaacttttttgaaaagccactggacatgaaatccaaacttgaaaatgccaagatcaatcagtacaatctcaaaacttttgaaatgagccaccaatcacaatctgaacttaagctgagtaacttgtagcaagacagcagctgctatgcacactggagtccaccataccaaagcacgaaccagactgtttcttggggtcagccctaaaccgagatttcagtctaccttaccaatggggcatctggctaaacaacctgacaaactgtggccaggggaaccgacacaaccctcaagcatttctatgtattgagaattgtcagtgccctaaggtatccattggttcccttgatgccaacttacaatttttaccggatttgctgaaatgggcacttctgctgtgatgctagtgttgattttgctctcagatgaacacaatgtctcatactaaccaagaagcaagaaaagccccatgctttcatttttcacttggagtgacaatgggagaggtcaggaatcaagttcactttcaagatctaagggagtccactatctgtgcaattgtatttggcttttttttgcactgtttcaatgctggtaattgaaaccattttaatatatttggttgtattcactttatatgtccttccaaaaatgttgttgtgtacaaaccatgctttcaatgttggcttccaagttttttaataagaaactttttgtatttaaaaaaaaaaaaaaaaa

SEQ ID NO: 1301 - DNA, 333 bp, HOMO SAPIENS
  misc_feature (42)..(42): n is a, c, g, or t
  misc_feature (53)..(53): n is a, c, g, or t
  misc_feature (85)..(85): n is a, c, g, or t
  misc_feature (92)..(92): n is a, c, g, or t
gtgaattgactgctgcagctgccctctgggctcctgcagatncttggtaatcnaaaggattggggttcaactgccttgtgggagncaggagncagggtcttgggtccatttaagttagagataccatagtaacgtgagacactcaaaggactgtggtctcagtagagaggtgacaaatacgtcttgacctgttcttgcctgaggaaaacgtttctaagaattcttaaccacaggccctccctcatagattttcagtttcaatttatactctgtgtggtctggcaatttccaagctgtgaaacttatttaaaacagtctgatggtactcacata

SEQ ID NO: 1302 - DNA, 6112 bp, HOMO SAPIENS
cggccgccatgttgttgtggggctgaggcggcgccggcggagccctgagcggctgtgacaggctacgcaacaggttcgcgggcggcggcctgacgaccaagccagctgcagtggcggcgacggcggcagagcagggtctccccgcgcctgcccgcgcccaggctgccggtgctgagggacgcggagtcgcgctgtgacgagcgggaggcgcggcgagggcgccagatggctgagagctagcaaggaaaactcaggaccatgatggctcagtttcccacagctatgaatggagggccaaacatgtgggctattacctctgaagaacgtactaagcatgacaggcagtttgataacctcaaaccttcaggaggttacataacaggtgatcaagcacgtaattttttcctacaatcaggtctgccggcccctgttttagctgaaatatgggctttatcagacctaaacaaggatgggaagatggatcagcaagagttctccatagctatgaaactcatcaaactgaagcttcaaggccaacagttgcctgtggttctccctcctattatgaagcaaccccctatgttttctccattaatttctgctcgttttggaatgggaagcatgcccaatctgtccattcctcagccattgcctccagctgcacctataacatcattgtcttctgcgacttcagggaccaaccttcctcccttaatgatgcccactcccctagtgccttctgttagcacatcatcattaccaaatggaaccgccagtctcattcagcctttacccattccttattcttcttcaacattgcctcatgggtcatcttatagtctgatgatgggaggatttggaggtgctagtatacagaaagcgcagtctctgattgatttaggatctagtagctcaacttcctcgactgcttcactctcagggaactcacccaagactgggacctcagagtgggcagttcctcagcctacaagattaaaatatcggcaaaaatttaatactcttgacaaaagtatgagtggatatctctcaggttttcaagctagaaatgcccttcttcagtcaaatctttctcaaactcagctggctactatttggactctggctgacgttgatggtgatggacagctaaaagcagaagagtttattcttgcaatgcaccttactgacatggccaaagctggacagccattaccactgactttacctcctgagcttgttcctccatctttcagaggaggaaagcaaattgattccattaatggaactctgccttcatatcagaaaatgcaagaagaggagcctcagaagaaattaccagttacttttgaggacaaacggaaagccaactatgagcgagggaacatggagctggaaaagcgacgccaagccttgatggagcagcaacaaagggaggcagaacgtaaagcccagaaagaaaaggaagagtgggaacgaaaacagagagaattacaagaacaagaatggaagaaacaacttgaattagaaaaacgcttagagaagcaacgggaattggagagacaacgagaggaagaaaggagaaaagacatagaaagacgagaggcagcaaaacaggaacttgaacgacaacgtcgcttagaatgggagagaattcggcgacaggagcttctcaatcaaaagaatagagaacaagaagaaattgtcaggttaaactctaaaaagaagaatcttcatcttgagttggaagcactgaatggcaaacatcagcagatctcaggcagacttcaggatgtccgactcaaaaagcaaactcaaaagactgagctggaagttctggataagcagtgtgacttggaaattatggaaatcaagcaacttcaacaggaacttcaggaatatcagaataagcttatctatctggtacctgagaagcaattattaaatgaaagaattaaaaacatgcagttcagtaacacacctgattcaggggtcagtttacttcataaaaaatcattagaaaaggaagaattatgccaaagacttaaagaacagttagatgctcttgaaaaagaaactgcatctaagctgtcagaaatggattcttttaacaatcaactaaagtgtgggaatatggatgactctgttcttcagtgccttttgtctctgctaagctgtctcaacaacctcttcctcttacttaaggaactgagagaaacctacaacacacagcagttagcccttgaacagctttataagatcaaacgtgacaagttgaaggaaattgaaaggaaaagattagaactaatgcagaaaaagaaactagaagatgaggctgcaaggaaagcaaagcaaggaaaagaaaacttatggaaagaaaatcttagaaaggaggaagaagaaaaacaaaagcgactccaggaagaaaaaacacaagaaaaaattcaagaagaggaacggaaagctgaggagaaacaacgtaaggataaggatactttgaaagctgaggagaaaaaacgtgagacagctagtgttttggtgaattatagagcattatacccctttgaagcaaggaaccatgatgagatgagttttaattctggagatataattcaggttgatgaaaaaaccgtaggagaacctggttggctttatggtagttttcaaggaaattttggctggtttccatgcaattatgtagaaaaaatgccatcaagtgaaaatgaaaaagctgtatctccaaagaaggccttacttcctcctacagtttctttatctgctacctcaacttcctctgaaccactttcttcaaatcaaccagcatcagtgactgattatcaaaatgtatctttttcaaacctaactgtaaatacatcatggcagaaaaaatcagccttcactcgaactgtgtcccctggatctgtatcacctattcatggacagggacaagtggtagaaaacttaaaagcacaggccctttgttcctggactgcaaagaaagataaccacttgaacttctcaaaacatgacattattactgtcttggagcagcaagaaaattggtggtttggggaggtgcatggaggaagaggatggtttcccaaatcttatgtcaagatcattcctgggagtgaagtaaaacgggaagaaccagaagctttgtatgcagctgtaaataagaaacctacctcggcagcctattcagttggagaagaatatattgcactttatccatattcaagtgtggaacctggagatttgactttcacagaaggtgaagaaatattggtgacccagaaagatggagagtggtggacaggaagtattggagatagaagtggaatttttccatcaaactatgtcaaaccaaaggatcaagagagttttgggagtgctagcaagtctggagcatcaaataaaaaacctgagattgctcaggtaacttcagcatatgttgcttctggttctgaacaacttagccttgcaccaggacagttaatattaattctaaagaaaaatacaagtgggtggtggcaaggagagttacaggccagaggaaaaaagcgacagaaaggatggtttcctgccagtcatgttaaacttttgggtccaagtagtgaaagagccacacctgcctttcatcctgtatgtcaggtgattgctatgtatgactatgcagcaaataatgaagatgagctcagtttctccaagggacaactcattaatgttatgaacaaagatgatcctgattggtggcaaggagagatcaacggggtgactggtctctttccttcaaactacgttaagatgacgacagactcagatccaagtcaacagtggtgtgctgatctgcaaaccctggacacaatgcagccaattgagaggaaaagacagggctatattcatgagctgattcagaccgaagagcggtacatggctgaccttcagctcgtcgtcgaggtttttcagaaacgcatggcagagtcaggctttctcactgaaggggagatggccctgatttttgttaactggaaggagctcatcatgtccaacacaaagctgctgaaggctttgcgggtgcggaagaagaccgggggcgagaagatgccggtgcagatgattggggacatcctggccgctgagctgtcccacatgcaggcttacatcaggttctgcagctgccagcttaatggagcagctctgttacagcagaagacagatgaagacacagatttcaaagaatttttaaagaagctggcatctgacccgcggtgtaaaggaatgcccctctccagcttcctgctgaaacccatgcagaggatcacccgctacccactgctcatcagaagtattctggagaacaccccggagagccatgcagaccattcctccctaaagctggccctcgagcgggcagaggagctgtgctctcaagtgaatgagggagttcgggagaaggaaaactcggaccgactggagtggatccaggcgcacgtgcagtgtgaaggcctcgcggagcaacttattttcaactctctcaccaactgcctggggccccggaagctcttacacagtgggaaattatacaagaccaagagcaacaaggaactgcacggattcctcttcaatgacttcctgcttcttacctacatggtcaagcagtttgctgtttcctctggctctgagaaacttttcagctcgaagtccaatgctcaattcaaaatgtataaaacgcccattttcctgaatgaagtcttggtgaaactgcccacagacccttccagcgatgagcctgtcttccacatttcccacattgatcgggtctacaccctccgaacagacaacattaatgagaggaccgcctgggtgcagaagatcaaggcggcgtctgagcagtacatcgacaccgagaagaagaagcgtgagaaagcttaccaagcccgctcccaaaagacttcaggcattgggcgcctgatggtgcatgtcattgaagctacagaattaaaagcctgcaaaccaaatggaaagagcaacccatactgtgaaatcagcatgggctcccagagctacaccaccaggaccatccaggacacactcaatcccaagtggaattttaactgccagttctttattaaggatctctaccaagacgtgctgtgtctcaccctgtttgacagagaccagttttcaccagatgatttcctgggtcgtactgaaattccagtggcaaaaattcgaacagaacaggaaagcaaaggccctatgacccgccgactgctgctgcatgaggtccccaccggggaggtctgggtccgttttgacctgcagctttttgagcaaaaaactctcctgtaggggttctaaaggacagcaccagcgggacagcccacaaggctggggctggagaatgagagactgcgctctcttggggctgagggagcaccatgcagcttcacccctcacaaagccatgcacgctgggggctctgttttcctgcacactaaatagctagcaatctatgcaaacacctttcccataaagaaaccaaaccccatagtacagtgccttgtcctagtgttcacatgttcagctctgtttgtttagatgccaaggtttccattttcagggctataaaaagtattacttggaaatgaggcatcagaccaccagatgttaccgctcggttgaatgtgtccaccgtggagtggtttggtgacgctgtaaccattccacgccagtgacctctgctgggtcacagccactcaggaggggaagggtcaggatgagaggctgcagcctcgacacttggcgcggcctgatactgaaatagcgtctactcgtgcactgaataaaaacagaaacttgatcattttattcctgattagattttatcactctctgctaagacaatatagtctggagtataagtgggaaagcttgatttaaatactgtgaactctaataatgtggaaaatatttttcaactttaattttctgaagtataaattatttatgtaaattcattgtttttgcatatttcttaggacatgcatctttaagctttatcattgcccatatgtacagaaagagaataaagacatatgtttatggatgg

SEQ ID NO: 1303 - DNA, 5267 bp, HOMO SAPIENS
gctcagtagcgatagcagcggccgtggaggtggcgttggggactgttttctctcggaggccggagcggagccgcgtctgactgaggcgggcagcaagcggccccctcgctccctccctccctcctccgcgccctccccgccgccaccagccgtcaaacgccaaccgccgctcctggggaggagccgcggctcgcggggccggagccaggcctgcgtccggacatcagccggagccggagcgagagccggggcctcggcgtccccgccctctccccgcctcggccagcgtccgccgggcccccgcgcgtcgcgccatggactcggacgagggctacaactacgagttcgacgaggacgaggagtgcagtgaggaggacagcggcgccgaggaggaggaggacgaagacgacgacgagccggacgatgataccctggatctgggcgaggtggagctggtggagcccgggctgggcgtcggcggggagcgggacggactgctgtgcggggagacgggcggtggcggcggcagcgctctggggcccggcggtggcggcggcggcggcggcggcggtggtggtggcgggccggggcatgagcaggaggaggattaccgctacgaggtgctcacggccgagcagattctacaacacatggtggaatgtatccgggaggtcaacgaggtcatccagaatccagcaactatcacaagaatactccttagccacttcaattgggataaagagaagctaatggaaaggtactttgatggaaacctggagaagctctttgctgagtgtcatgtaattaatccaagtaaaaagtctcgaacacgccagatgaatacaaggtcatcagcacaggatatgccttgtcagatctgctacttgaactaccctaactcgtatttcactggccttgaatgtggacataagttttgtatgcagtgctggagtgaatatttaactaccaaaataatggaagaaggcatgggtcagactatttcgtgtcctgctcatggttgtgatatcttagtggatgacaacacagttatgcgcctgatcacagattcaaaagttaaattaaagtatcagcatttaataacaaatagctttgtagagtgcaatcgactgttaaagtggtgtcctgccccagattgccaccatgttgttaaagtccaatatcctgatgctaaacctgttcgctgcaaatgtgggcgccaattttgctttaactgtggagaaaattggcatgatcctgttaaatgtaagtggttaaagaaatggattaaaaagtgtgatgatgacagtgaaacctccaattggattgcagccaacacaaaggaatgtcccaaatgccatgtcacaattgagaaggatggtggttgtaatcacatggtctgtcgtaaccagaattgtaaagcagagttttgctgggtgtgtcttggcccatgggaaccacatggatctgcctggtacaactgtaaccgctataatgaggatgatgcaaaggcagcaagagatgcacaggagcgatctagggcagccctgcagaggtacctgttctactgtaatcgctatatgaaccacatgcagagcctgcgctttgagcacaaactatatgctcaggtgaaacagaaaatggaggagatgcagcagcacaacatgtcctggattgaggtgcagttcctgaagaaggcagttgatgtcctctgccagtgtcgtgccacactcatgtacacttatgtcttcgctttctacctcaaaaagaataaccagtccattatctttgagaataaccaagcagatctagagaatgccacagaggtgctctcgggctaccttgaacgagatatttcccaagattctctgcaggatataaagcagaaagtacaagacaagtacagatactgtgagagtcgacgaagggttttgttacagcatgtgcatgaaggctatgaaaaagatctgtgggagtacattgaggactgagaatggccctgcataaaatgaactctgaaaactttaccatctagagtgctcatgcaattaaaacaaaacaaacacaaacaaggaggcactaagcctattctgacaccactggtctgtagtaccagaattgttttgttaatggaaagtttaagtaaattatattgtaataaaaaggtagataaaccattgtacaacagtattctaggccaccaacaaaagtgtgacagacacactaaaagccctccaactttaacttgtaacgtagcttcattctcaaagctgactccttttttttctttttccttttcctgagtgtagtacagttaaaatttcaaacagctccttgacactgcttttcatgttcaaaccagccattttgttgtactttggtaaaggacctcttccccttcctcccctacacatacagatacacccacacacagactgactctctttctctcataccccaaggtcatgagtgaatgatgcttagttccttgtaaagaaaatcttgggatggggaaaggggtaggcagcaagaggattcaacaaacgaaaaacataaaaactttgtatatgacttttaaaacaagaggacaacacagtatttttcaaaattgtatatagcgcatatgcatggacaaagcaagcgtggcacgtgtttgcataatgtttaattacaaaaaaatatttattctttaaaaatcttcaagattatgtctatttgctgtgcattttctttcagtttgcttatctttcccgggttggggttgggataaaggtgtgtcggtttagcacctctggaagacctatctagagctctttcactttcctgaggttattttgccctttctggtgttggtatgtctgttgccggccatgggcctcatgccttgaattcctgctcttgatcagggacaagggaggtcaagctctgactaatgccatgacctgattaaggggtacagcagggagttttgttgctacagctcatgaattaacctgtcccaacctaatccccctccatggcatcatgcctctacccaagcctttgtgtgcccatgttatgcacacagctgtaggcattcttaagtcccctgtcgcatccagtggaagcattttaaaatttcttttactttttggttttcccttaattgctgcttttcagattttagttatggctcgtctgctcaccccttctctacattagggtgtcaaagagaatgttttgctttaaatataaatagccattcatttagtctcagattgtgaatttaaaatggtggataccgaaattgcttgtgtgtgttgctgtgggtttggtttgaaggcaaacacccctagaacatgatattcccatctagtgcatttaaatagaaatcactgagtttgctgcttttttattgtcagcagataggagaattaataatgcattttagctgtgatgtccatttttatgaaattcctactaagagctatgttaaaagtaaaggatggtggtggttgtattaactatatacctgtttaggccattctggctgtggtatttttcaataggtcagcatctgtaaatctgtcagttttatacaggagtgcagagtgaactaggcaactagattaagaggtctaaatatgaaataccagttgaggctgaggacctcttcgtcttcctttaaatgtcttttgcctagggagtgtttaccatttgtgaggcagctttgtctgctcttacactgtacatcctattactccattgggaagtaggttcactttcctctggccttttgcctaagttaggctttgctgaatcaaccctacttttccttttagaaaaggttgttacaggagatttactggcaactgttcttttcccatcaaaaatcagtgaatgtttgctgagtataaatgctgcttccttaaaccacttgtcgctttaggatcaactttacctgtaccttttctcctttcctcccttgccacctcaggtgcaaatctgaactcagtgtctgcttcttccattttctcgtctctctcccctcttcccccattatccatatgacattattttacttcaaatgacagcatcaatcttaaaaagatatacattaaaactaaggagtttttttaaagaaagcctgaataagttcctttccctggtaactttgaaaagcagtcagagttgctatatagatatatgtggctcctttaaaatgctttgtgtatgtgtggtgtttaaaaaaaaaaaatcttaccagttaactttgcagtgtctaggtttgagtgtcataaatccacgtgttcctgttgcaacaaatacccaaaaattgtgtgtgcacttcctaataccagtcttcacccatggaggaacagtgctttttagagatgctttctatttcaatgttggcatactgcctgagggtattgcagttgtgggtgcattccctaatttgtatgatcaagatgaactggcccttttctacttccaagcttttaacagataccaccatatttgacagaattcccagagtgaattgcttgtgttattagtagattcagtgcccccagctgggataggcaagccatgacagcttccctgtttcacctacagaagtcttatctgagggatctattcacagtaagcaccaaggtctccatgtcttgaggtcagtttcattgtcttttgaaaagtgcatgcttcatttgaacaattcattcagcagcagatggactttcagtgatttaaaataaaattttgatccaaagctcaggacacaaaccacagtggtaaaattgagtagcatataatatcagactaaattatctgtaattttccacaacccagattgtatgtgttttatgtgtgtttaaataaatatgttagatacacgtgtatacatacacccatatacaacagatccaagactggctgacttcatttgaaatggttgaatctgctgtgtaataaagtggttcaaccatgattaggaactgaaatttagtagaagagggaaaaggagttaatgtaacaaattattttagctacaaaccccggtaatagagcacttgggggatgggatggggtgggttggtgagacaatcagaatggtaaattgattaaatgctcctaaccctgtaattttgtgcatagagcaccctatgctgtggaaataactgttcttagatttcattgtaactggactgttcaggttgcccagagggaaagaacattcctaattctaataaaataaacttttattttgttaaaaaaaaaaaaaaaaa

SEQ ID NO: 1304 - DNA, 396 bp, HOMO SAPIENS
  misc_feature (288)..(288): n is a, c, g, or t
atgcgttaagtatcttgattttctcatttttttgtagttgaaggccaagaaaagatacgtttaaagtctgtagcccagctattagggatacaaataagtgtgaagttatacaagaaccctctagagagaggctgttggccagaggtagcatctgcttctttggtggtcttggagcttgagagtgttgatgtcatttggtgtgtggggaccaaagataatgagcaaactgtaaaatgcttgactgtcttggacaaagacgatttttctcatacaaacactcacagtgtncctacggaacagtaaagcagtagaactaataatagcaataaccagcccaaattgaatggaggagagaagagagaggatttgggagaaagtggttttgtcattactctt

SEQ ID NO: 1305 - DNA, 4440 bp, HOMO SAPIENS
ccctcccgctccccgcccccgcccccgcccccgcctccgccgcggcccccacctctgcctccttctactcgggcgccccggcggccgccacctctccccagcccaggagaggctgcggagccgcagccgcccagaccgcgcagcgcgggaggcaggttccgcacgaaataaatcagaatgagttatgcagaaaaacccgatgaaatcacgaaagatgagtggatggaaaagctcaataacttgcatgtccagagagcagacatgaaccgcctcatcatgaactacctggtcacagagggctttaaggaagcagcggagaagtttcgaatggaatctggaatcgaacctagtgtggatctggaaacacttgatgaacgaatcaagatccgggagatgatactgaaaggtcagattcaggaggccatcgccttgatcaacagcctccacccagagctcttggacacaaaccggtatctttacttccatttgcagcaacagcatttgatcgagctgatccgccagcgggagacagaggcggcgctggagtttgcacagactcagctggcggagcagggcgaggagagccgagagtgcctcacagagatggagcgtaccctggcactgctggcctttgacagtcccgaggagtcgcccttcggagacctcctccacaccatgcagaggcagaaggtgtggagtgaagttaaccaagctgtgctagattatgaaaatcgcgagtcaacacccaaactggcaaaattactgaaactactactttgggctcagaacgagctggaccagaagaaagtaaaatatcccaaaatgacagacctcagcaagggtgtgattgaggagcccaagtagcgcctgcgcttgcgtggtggatccaacaccagccctgcgtcgtgggacttgcctcagatcagcctgcgactgcaagattcttactgcagtagagaactctttttctcccttgtacttttttttgacctggcatctttttatagggaaaaatggcctttgtaggcagtggaaaacttgcaaggaaagctgccgtctctttggcagtctgatgcagagcctgcactctggcactcgctgaagaatctggaaggttgcggtttgctcttccagtgttcgggggcctctggctgctgaaggattcggtctaccacggagggctgtgctgttaggctgcatcccactcaaaatacaggaaaagcacgaatcatgattctgctttctgttagcttaggcagacattgggccttcacctacaagtttttccttacccctgtggtttttgtgtttttttttttttctttttccataggaaagaatatataaatttgtaaatcctaattcaaagatggctcatgtgtgagggcattgagtttgatttgttttccctttggtctgggttgtgtggcttttgggggatgcgtgtgagggggctatgtgttttttaattttttaaatatatattttggtgctgtgtgtggtaagagacttgttcctagtggatcaatgaaccatctcttctgggcagttttgttgaaaataaaggtttctctttgatttcaagaatgaccaaaatggcctctaaaagatgttaatcatctcaaatgaccttttgtctttggggcgttcttccccctgtgatagcggcagtggctttttctggtacctgcagctggaaaggccacttggccctgtgctgagtgagcggccttcattagagcgaggcagcccttggccggtggggacgcagagccccagcaggtggtgcacgactgttggcggaaggaacgcgtgttcatcctcagtgatctgccctccagcatctcggcagcatctcatcctccatcgtcagctggctctgccgatgtcctgcttctgttcactcacagaactgtcccctgctccgtggtgggcaggagggaagtggtgcagggctgcgtgcattgcctgcgagtcgggacagttgatgggcacatggccttgtagctctgggcacagatgtgtttggattcattgcagcggaccaccgggcactgttgaccccactgagcagtgctaagtgttggtttagtggatgttcgtggaattgctgacccatccaagggcgtcctttggagccagtggagcctgccggcgcatctgaggggcagaatgctgctagcacttgaatctgggatctcgccttattctcaagtagcaaggcatctcgacaagcatggtctaggtctggtggccagcttgccagtacctgagccggtcgggtcatctgcctctgagggaccgtcctcaccgagctcctgcatcccttgagtgttgatcaggaggcgtccacagcattgttctcgcctctgaatgatgcttctttctgtgttggagcctggcgaagttgtgttttcaagccctctacttctctttccagtgggtaggagcttttggcagtgtttactttacctagatggcttatataatccagtaagagatgcaaagataaaattgctgcggttgttacagaagcatggcggcctccagactgacccattggttgccctttagattttgtaaggatgcggtgctggggaggtggtgcttccctaccccctagaaatgctgccttccaactaccactctcccagatgtgacccttgcgattatttcctctgaggtttgaggatgaagataagttggagggaaagagagtaactaataggggatgaaatatagcagaagctagaagaaagcggtgaggtgagagagatgcatctgcacgttttcttcaacagcaccaggtgattcagcatattcctaattacctttcactattcgtgtatataagatcgtttacttgcataatatatcatcaatttgacatattcttaaaactagagggtgtgagaagcacagcaataggaagtctctccacaaactaggggaacacaaatggggtcattcacgtgcctggactgtcactatgtggctgtcacgtgaagtgctggtgttgatttccatttcagccagtgggtagctgataagccagtgccagcatccagcatgagcagatgtcggggagactgggaagtctccagcgttactgctctccttcccttcatgataagccagtgccagcatccagcgtgagcagacgtcggggagactgggaagtctccgatgttactgcctgccttcctttcgtgtgaggggctgcacttgcttttcttgtgatctgttagtggacgaggtcttccaaggaagtgctttgcacactttctttgctcctttttacagtctttgtctttgcagcaagcaaatgaaattaagccactttgggataatgaacattcagtataattctactttgtctcattttggatctcactgttgtctttataaaaatggcacattttacaaagtagtttattcttattatactttctgctggagagtgccttgaaataaaatgtgagagtattctggtactctgtgttccagatgcatgaaattgggtgaggaataacccctagtctggaatctttgtgaagcatagggttattgcaaggcaaatgggaactaacacatcttgccatttgaatcagggtctccagtttctagaaaaggcagacactggttgggaccaaagtctccatggcacatgactgaagactggtggtcgtgtgtgtgcggagtccacggaagcctcggggaggtggagctgctccttccattccgtcaggacgtgatctgaaaacatgtagagaagatgagttgaggacagcttttctaaggcaatgtgatgtctttgctttcttatttctctttctctgcgttgttagttttgaagagtggaggagctaggggctccagaaagaatcttacacatgtgttgaagacattgatgtcatagggagcggggagctgcattcccttctgggctgttactgctaaatctcagtatgaacagaccaggcggaaagcttggtggccaagcagtctgtgtgcttccccgctgatggagaacgttgcgttgttcacaatagggcctcatgggtgtagccgcatggcagacccatggctggcgcagctgcctgttgccgtctgtcttcagtaactgctgctctgttaactgttctattctgatactacgcgtgttgttttttacaacaggtatgtttttgtttcagaaatatgtattgcttttctcatattttttgcaaattgtattgtcaacatgggtcatttaaagtcctgtatgaaccataacctgctgtggtacctttgtacatgtttgattctgtattctttattccagtgtggcatatgtgcccctctgtatcttttgagaagtgcggaataggttgcttctaccacctgttcttaatgtaacagtaaaagttttcacatttttctcagaaaaaaaaaaaaaaa

SEQ ID NO: 1306 - DNA, 4281 bp, HOMO SAPIENS
gttacgccgctgatgtggagtagggccgagcgcggaacgcgaggggctgctggggtgtttgtcgcagcgggttttcctcggcggtttgcggagctgctaggatggagcaggttgcggagggagcaagggtgaccgcagtccctgtgtcagctgccgacagcactgaggagttggccgaagtcgaagaaggagttggagtagtgggcgaagataatgacgcagccgcgagaggagcggaggcctttggcgacagtgaggaggacggagaggatgtgttcgaggtggagaagatcctggacatgaagaccgaggggggtaaagttctttacaaagttcgctggaaaggctatacatcggatgatgatacctgggagcccgagattcacctggaggactgtaaagaagtgcttcttgaatttaggaagaaaattgcagagaacaaagccaaagcagtcaggaaggatattcagagactatccttaaataacgacatatttgaggcgaactctgatagcgatcagcaaagtgagacaaaagaagatacttccccaaagaagaaaaagaaaaaattgaggcagagagaagagaaaagcccagatgatctgaaaaagaaaaaagcaaaggccgggaagctaaaagacaagtccaaaccagacctggagagctccttggaaagtttagtttttgatttaaggacaaagaaaagaatttctgaagccaaagaagaactaaaggagtccaaaaagcccaaaaaagatgaagtaaaagaaacaaaagaattaaagaaagttaaaaagggtgaaataagagatttaaagacgaaaacaagagaagatcccaaagaaaatagaaaaacaaaaaaagaaaaatttgtcgaatcccaggtggaatctgaatcaagtgtacttaatgattctccctttccagaggatgacagtgaagggctacattccgacagcagagaagagaaacaaaacactaaaagtgcaagagagagagcagggcaggacatggggctggagcatggctttgagaagcccctagacagtgccatgagtgctgaggaggataccgatgtcagaggcaggaggaaaaagaagaccccgagaaaggctgaggacactagagagaacaggaagctagagaacaagaacgctttcttagagaagaaaactgtgcctaaaaagcagaggaatcaagacagaagcaaaagtgctgcagagttagagaagctgatgcctgtatctgcccaaacgccaaagggccggaggttgagcggggaagagagaggcctctggtccacggactcagccgaggaggacaaagaaaccaaaagaaatgaatccaaagaaaaatatcagaaaaggcatgattctgacaaggaagaaaaaggcagaaaagagccaaaaggattaaagacacttaaggaaatcagaaatgcatttgatttatttaaattaactccagaagaaaaaaatgatgtttctgagaataatcggaaaagggaagaaataccactggattttaaaaccatagacgatcacaaaaccaaggaaaacaaacagtcacttaaagaaaggagaaacaccagagacgaaacggatacttgggcatacattgctgcagaaggtgatcaggaggttttagacagcgtgtgccaagcagatgagaattcagatggcaggcagcagattctgagtttgggcatggacctgcagttggaatggatgaagttggaagatttccaaaagcaccttgatgggaaagatgagaattttgctgcaacagatgcaattccaagtaatgtgttaagggatgctgtgaaaaatggggattatattactgtaaaagttgcacttaattcaaatgaagaatataacctggaccaagaggattccagtggaatgacactggtgatgcttgccgccgccggagggcaggacgacctcctgcgactcctcatcacaaaaggcgcgaaagtgaacggtcggcagaagaacgggaccaccgccctcattcatgctgcagagaagaactttttaacaacagtggctattcttttggaagcaggagcttttgtaaatgtccagcaaagcaatggtgagactgcactgatgaaggcctgtaaaagaggaaattcagacatcgtacgactcgtaattgaatgtggagctgactgcaatattttgtcaaagcaccagaatagtgccctgcactttgcgaagcagtctaacaatgtgcttgtgtacgacttgctgaagaaccatttagagacactttcaagagtagcagaagagacaataaaggattactttgaagctcgccttgctctgctagaaccagtttttccaatcgcatgtcatcgactctgtgagggtccagatttttcaacagatttcaattacaaacccccacagaacataccagaaggctctggcatcctgctgtttatcttccatgcaaactttttgggtaaagaagttattgctcggctctgtggaccgtgtagtgtacaagctgtagttctgaatgataaatttcagcttcctgtttttctggacagtcattttgtttactcattcagccctgttgcaggtcccaataaactcttcataaggttgacagaagcaccctctgccaaggttaagttgctaataggtgcatacagagtgcagctgcagtgaccaaacagaagggactgggcggagttctcttcagaccgattcctatactctctttgacagcagtttggaattcttctagcacatctatgtaaagttttgtctgtaaacctcttgcagttaagcctgttgtctgttgtagtctgtaagatgcgacatagctgtgtctgtgccagtatgccggaatctcagtgcagtgtccagactgcgtatttcagtttttccacaatgtggatagtacatatgaggattatttaagaaaattaaagacttcactttcttttttctggagacggagtttcgctcttgttgcccaggctggagtgcaatggtgcgatctcggctcactgcaagctctgcctcctgggttcaagtgattctcctgcctcagcctcctgagtagctgggattacagacacccgccatggcacccagctaattttgtatttttagtagagatggggtttatccatgttggtcaggctggtcttgaactcctgacctcaggtgatccgcccgcctcggcctcccaaagtgcttggattacaggcatgagccaccgcacccagcaagagttattttcttaacttgaaattttctactagccctggtgaacttctgtgcttaaaaaaaaaaaaaaaaaaaggaaaaattcagctctaaaacatttgcttacagcaagggagccatgttatattcaagttacccaagcaccaaataaagtgtgggtttgctgcccttgaaagggttgggaggcctgatctttttctagtagacagttgccacacattccccaagcacaaaaggtggagatggcagtcactttgtaaatatgctgtagtcacttatcatcttttcaaagggtaacaagagaatctaagatgtagtaagaatgtaaaccagtacactatgagacctaaaagagagtattaaatgtgaacttttagcagagcgtggtggctcacacctataatcccagcgctttggaggctgaggttggaggattgcttaagtccaggagttcaagaccagcctgggtaacatggggtggaacaagcctgtagtcccagatactcaggaggctgaggtgaaaggattgcttgagccagggaggtcaaggctgcagtgagccgtgaaaggccactgcactccagcctgagtgacagaatgagaccttgtctcaaaaaaaaaaaaaagtttcttggaacctatacggtttttttttgttttttttttttgaaaagccagaccttgtgcccttgttttgaacaccgactgggaagatggggcttaggtaacagccaaacctggctgtcagctgtgtgggagccaccaccctctctgggaagagttcctgcttctgtatggcaagcataaatcaagctcagtctgggttatggagaagttgaaaattgttttgttcctcattagtttataattgtatgaaatacgattttaatgaaaacttttcagaattcacgtttgtgtagatatttcagagaaccatttttactttacatcctaaaactgccttttcctatggttttgtcaataaaacactatgatgttggtctgtttccttttataaaaaaaaaaaaaa

SEQ ID NO: 1307 - DNA, 511 bp, HOMO SAPIENS
ggcctcgtccttctcttaccgccatcttggctcctgtggaggcctgctgggaacgggacttctaaaaggaactatgtctggaaggctgtggtccaaggccatttttgctggctataagcggggtctccggaaccaaagggagcacacagctcttcttaaaattgaaggtgtttacgcccgagatgaaacagaattctatttgggcaagagatgcgcttatgtatataaagcaaagaacaacacagtcactcctggcggcaaaccaaacaaaaccagagtcatctggggaaaagtaactcgggcccatggaaacagtggcatggttcgtgccaaattccgaagcaatcttcctgctaaggccattggacacagaatccgagtgatgctgtacccctcaaggatttaaactaacgaaaaatcaataaataaatgtggatttgtgctcttgtatttttaagtggattaaaaaacttactaccttaaaaaaaaaaaaaaaaaaaaaaaaaaaaaa

SEQ ID NO: 1308 - DNA, 1951 bp, HOMO SAPIENS
gagcccggagcaggccgggctcaagaaagaggaaagttgaggacgccccacctcggagaggcggcgcccctgagtaggccaggagcctctcttgcaacttctgccaccgcgggccaccgcggccgcctgatcccgcagaggaaggtcgcggccgtggagcgatgacccgcggcggtccgggcgggcgcccggggctgccacagccgccgccgcttctgctgctgctgctgctgctgccgctgttgttagtcaccgcggagccgccgaaacctgcaggagtctactatgcaactgcatactggatgcctgctgaaaagacagtacaagtcaaaaatgtaatggacaagaatggggacgcctatggcttttacaataactctgtgaaaaccacaggctggggcatcctggagatcagagctggctatggctctcaaaccctgagcaatgagatcatcatgtttgtggctggctttttggagggttacctcactgccccacacatgaatgaccactacacaaacctctacccacagctgatcacgaaaccttccatcatggataaagtgcaggattttatggagaagcaagataagtggacccggaaaaatatcaaagaatacaagactgattcattttggagacatacaggctatgtgatggcacaaatagatggcctctatgtaggagcaaagaagagggctatattagaagggacaaagccaatgaccctgttccagattcagttcctgaatagtgttggagatctattggatctgattccctcactctctcccacaaaaaacggcagcctaaaggtttttaagagatgggacatgggacattgctccgctcttatcaaggttcttcctggatttgagaacatcctttttgctcactcaagctggtacacgtatgcagccatgctcaggatatataaacactgggacttcaacgtcatagataaagataccagcagtagtcgcctctctttcagcagttacccagggtttttggagtctctggatgatttttacattcttagcagtggattgatattgctgcagaccacaaacagtgtgtttaataaaaccctgctaaagcaggtaatacccgagactctcctgtcctggcaaagagtccgtgtggccaatatgatggcagatagtggcaagaggtgggcagacatcttttcaaaatacaactctggcacctataacaatcaatacatggttctggacctgaagaaagtaaagctgaaccacagtcttgacaaaggcactctgtacattgtggagcaaattcctacatatgtagaatattctgaacaaactgatgttctacggaaaggatattggccctcctacaatgttcctttccatgaaaaaatctacaactggagtggctatccactgttagttcagaagctgggcttggactactcttatgatttagctccacgagccaaaattttccggcgtgaccaagggaaagtgactgatacggcatccatgaaatatatcatgcgatacaacaattataagaaggatccttacagtagaggtgacccctgtaataccatctgctgccgtgaggacctgaactcacctaacccaagtcctggaggttgttatgacacaaaggtggcagatatctacctagcatctcagtacacatcctatgccataagtggtcccacagtacaaggtggcctccctgtttttcgctgggaccgtttcaacaaaactctacatcagggcatgccagaggtctacaactttgattttattaccatgaaaccaattttgaaacttgatataaaatgaaggagggagatgacggactagaagactgtaaataagataccaaaggcactattttagctatgtttttcccatcagaattatgcaataaaatatattaatttgtcactttaaaaaaaaaaaaaaaaaaa

SEQ ID NO: 1309 - DNA, 4652 bp, HOMO SAPIENS
gtggccgcgctcggcgctgccatgttgaggagccgccgctgccgttgccgccgccgccgccgccgctttgttgtcgcctcctccggctgaggaggctccccgagcggggggagtggggaggaggggggtcggccgccgcagccatggaggccaactggaccgcgttcctgttccaggcccatgaagcttcccatcaccaacagcaggcagcacagaacagcttgctgcccctcctgagctctgccgtggagccccctgatcagaaaccattgcttccaataccaataactcagaaacctcagggtgcaccagaaacattaaaggatgccattgggattaaaaaagaaaaacccaaaacttcatttgtgtgcacttactgcagtaaagctttcagggacagctatcacctgaggcgccacgaatcctgccacacagggatcaagttggtgtcccggccaaagaaaacccccaccacggtggttccccttatctctaccatcgctggggacagcagccgaacttcgttggtctcgaccattgcaggcatcttgtcaacagtcactacatcttcctcgggcaccaaccccagtagcagtgccagcaccacagctatgccagtgacccagtctgtcaagaaacccagtaagcctgtcaagaagaaccatgcttgtgagatgtgtgggaaggccttccgagatgtgtaccatctcaatcgacacaagctctcccattcagatgagaaaccctttgagtgtcctatttgtaatcagcgcttcaagaggaaggaccggatgacttaccatgtgaggtctcatgaaggaggcatcaccaaaccctatacttgcagtgtttgtgggaaaggcttctcaaggcctgaccacttaagctgtcatgtaaaacatgtccattcaacagaaagacccttcaaatgccaaacgtgcactgctgcctttgccaccaaagacagactgcggacacacatggtgcgccatgaaggcaaggtatcatgtaacatctgtgggaagctcctgagtgcagcatacatcaccagccacttaaagactcatgggcagagccaaagtatcaactgtaatacatgtaaacaaggcatcagtaaaacatgcatgagtgaagagaccagtaaccaaaagcagcagcagcagcagcagcagcagcagcagcagcagcaacaacaacaacaacaacatgtgacaagctggccagggaagcaagtagaaacactgagactgtgggaagaagctgttaaagcaaggaagaaagaagctgctaacctgtgccaaacctccacggctgctacgacacctgtgactctcactactccattcagtataacatcctctgtgtcgtctgggactatgtcaaacccagtcacagtggcagctgcaatgagcatgagaagtccagtaaatgtttcaagtgcagttaacataaccagcccaatgaacatagggcatcctgtaactataaccagtccattatccatgacctctcctttaacactcactaccccagtcaacctccccacccccgtcactgccccagtgaatatagcacaccctgtcaccatcacatctccaatgaatctacccacacctatgacattagccgcccctctcaatatagcaatgagacctgtagagagcatgcctttcttgccccaagctttgcctacatcaccgccttggtaaacagtattataaaatcaaaatatgggtaaaagtaaatatttaccagcaacttaacttttagttgattaaagcaaaaagtaaaccatgaaattgggagattttattacattagttaataagagtgtggtagcatttttctccaatttggctgggattattcaaagtagggtgtgtatgtaacttatcactggaccactttagtttaatcagaaattccttttagctgacaacattgcttaaacaggatagtagttggcaagatgaaatgccagaattaaaaccaatcataagtagaacccacttcaaaataaaaaaacagcattactatttctaatcccaaggaatcactttattgtaaacactagcagaactcttctccctatacaaggtggatggctgattttaacctgaaattttaaatccacagattgagagctagtgtagaattgtctgtgtttattgtttttatgagtaaatacatgcattgtcataataaaatgcatttcagagaatatgcattttacctttgggaatatgttaatttcaggcagcattccctatgggaaaggtgataccagctctgatatgcaaagcatatgataatttatcattctaacttcaacgtataatagggattgtgacctgatatttggagatgtaaatattgctcagcatattaatcccgatggaatatagcattgtagttgactttttaaaaaaaaaaaaaatttaaaaaaaatctacaaattgtgttttgctaagaaaagcctcaactgacagaggagaagtcaagtgtgtggacaggcaagctcctaataaacagagtccagtgggattcctatttaggagccaaggagtactttggaacagtacaaatatattgctttaaattggaagacgctggaggcactgggatgtgatatgcccctctctctcccaatcagagcctgttgatattacaacagggacagatgtgttagttgctcactagagtttatgtcttatattaaattgtatacagtttttattctaaccactaactaggtagtgtatgccccttcagaacatgcagagtgtatctttttttaaatttctccttccgtttcttaagtattgcgcagatttgttcaactttgtaaatatggacatcactttttttttctttgagaaaacacttgtatcagctttgtggtgttttcagggagacagctgtctgcattccctgtagaaacccagcaatgattatgcacgttgagacatgtgctttttatttcttagcaagatattttatctctgtacataaagtagaaaccaaaagctagggaaacagatactctttacaccatcatgccacgcattgtttttaaagcattgcgttaaaaaaaaaattaactaaaccaagatgctgtgattttttaagttgcaatatgtttttggtttttttcattttttaatcattgcagttaagagaaatggaaattagttgtgttaatcttgcagaatgtttgcaggactgactatcaaactggatgatttccatttataccctactgtgtcagttcaagcatcaaaataccttgcatctgagacagacttcctacatcagggacaggtatctgtgtgtcattatacaaaacagttctagggggttgaactacatagtaaaaaaataaaataaatagtacttagtgtaaaataattttataaatgatcttttgtactttaggacattaaattgtacaacttttgtatatataaaagcttaggaactttctgtttagcaggaaggcaacacattcctacacttttaatgtatatgtttgttataatgtccatgtaaacatgccctatgtttgtgccttttaattagtttgtctcaataaacaaaatgtagagaaaaatatgtagctatgactttgttacaactgttcttatccacagtacaaaaatggtttgtttttaatatgtagagcattatgtgtggactactggaaggactcgtgtagggaaagcccaagaatgaccttgctgaggcctggattgggaggcacagtggccacatttggaggaagttcacatttcctggcatgcagacccaaaactgggttctggctctgcctgctgggatctgttatctctggtgggctggcagtcataattcacaattcagacagcccaggcttcctccacagtggtccaaggagcagtcctcagtgggggcaggtgtgggccctacccctaagctagaatgtggttgtcagaaccctgaaagtattagttctaaaaaaaaaaagatatatactagaagtaattgttttatcaattcattgtataataaacaggagtgagacttcattgtatgacttcagttaaaatactattttgtatgcattctttattcacttaagaagcttgtctgcaataataaagccacgtcatgtcttcttttgggagggagagagtcgatggcaggagggggttttgggtgggccactgaaaaggggtaccgaataggttgtgtgatgaaattctgtgtcttggaactggaattgagtttcgatgttgatgaactgattcaaccaggtgttgaaggcacgacagccactgctctacgaaaaggcagagtacgtttttcccttctggttgtaacctggttgagagcttcccctttatcagattggcagctaaacagttgtattagataatccttaaatctgacatccagcctgttacgctctagggctcgctgcttggcctgcgtttgctttttattgtgtatccgttcccctcctacggtgtgctcctgaatgaaggtttctatgtaagcagatgatgattttacctgtcaataccagcactgtattactaacatgcaaaatactgcagatttattttgaaaattaaagttaactggtcacaaatgtaaaaaaaaaaaaaaaaaaa

SEQ ID NO: 1310 - DNA, 2756 bp, HOMO SAPIENS; identical to SEQ ID NO: 1289

SEQ ID NO: 1311 - DNA, 1017 bp, HOMO SAPIENS
cccttggccagcgagatgctttgacacagccccttaagatgttttaagggctatcccataaagccgggaaggcacaacgggtggagctggcggccgccgggggcaggcacttttgagctaaggaggaagcgggggagggaaggagggcgggaaggacgcgccacctacttcctgaatcccctgcaaaccccagaggagctcggcctgcgctgcgccacgatgtccggggagtcagccaggagcttggggaagggaagcgcgcccccggggccggtcccggagggctcgatccgcatctacagcatgaggttctgcccgtttgctgagaggacgcgtctagtcctgaaggccaagggaatcaggcatgaagtcatcaatatcaacctgaaaaataagcctgagtggttctttaagaaaaatccctttggtctggtgccagttctggaaaacagtcagggtcagctgatctacgagtctgccatcacctgtgagtacctggatgaagcatacccagggaagaagctgttgccggatgacccctatgagaaagcttgccagaagatgatcttagagttgttttctaaggtgccatccttggtaggaagctttattagaagccaaaataaagaagactatgctggcctaaaagaagaatttcgtaaagaatttaccaagctagaggaggttctgactaataagaagacgaccttctttggtggcaattctatctctatgattgattacctcatctggccctggtttgaacggctggaagcaatgaagttaaatgagtgtgtagaccacactccaaaactgaaactgtggatggcagccatgaaggaagatcccacagtctcagccctgcttactagtgagaaagactggcaaggtttcctagagctctacttacagaacagccctgaggcctgtgactatgggctctgaagggggcaggagtcagcaataaagctatgtctgatattttccttcactaatatgaataaaaaaaaaaaaaaa

SEQ ID NO: 1312 - DNA, 2380 bp, HOMO SAPIENS
aggccccgccccgcagcccagccggaagggccggcggacgctcgctaggtcggctcgctggccggggctccgcggctcccgtggttgccatggcggcggttgtcgcggcgacgaggtggtggcagctgttgctggtgctcagcgccgcggggatgggggcctcgggcgccccgcagccccccaacatcctgctcctgctcatggacgacatgggatggggtgacctcggggtgtatggagagccctccagagagaccccgaatttggaccggatggctgcagaagggctgcttttcccaaacttctattctgccaaccctctgtgctcgccatcgagggcggcactgctcacaggacggctacccatccgcaatggcttctacaccaccaacgcccatgccagaaacgcctacacaccgcaggagattgtgggcggcatcccagactcggagcagctcctgccggagcttctgaagaaggccggctacgtcagcaagattgtcggcaagtggcatctgggtcacaggccccagttccaccccctgaagcacggatttgatgagtggtttggatcccccaactgccactttggaccttatgacaacaaggccaggcccaacatccctgtgtacagggactgggagatggttggcagatattatgaagaatttcctattaatctgaagacgggggaagccaacctcacccagatctacctgcaggaagccctggacttcattaagagacaggcacggcaccacccctttttcctctactgggctgtcgacgccacgcacgcacccgtctatgcctccaaacccttcttgggcaccagtcagcgagggcggtatggagacgccgtccgggagattgatgacagcattgggaagatactggagctcctccaagacctgcacgtcgcggacaacaccttcgtcttcttcacgtcggacaacggcgctgccctcatttccgcccccgaacaaggtggcagcaacggcccctttctgtgtgggaagcagaccacgtttgaaggagggatgagggagcctgccctcgcatggtggccagggcacgtcactgcaggccaggtgagccaccagctgggcagcatcatggacctcttcaccaccagcctggcccttgcgggcctgacgccgcccagcgacagggccattgatggcctcaacctcctccccaccctcctgcagggccggctgatggacaggcctatcttctattaccgtggcgacacgctgatggcggccaccctcgggcagcacaaggctcacttctggacctggaccaactcctgggagaacttcagacagggcattgatttctgccctgggcagaacgtttcaggggtcacaactcacaatctggaagaccacacgaagctgcccctgatcttccacctgggacgggacccaggggagaggttccccctcagctttgccagcgccgagtaccaggaggccctcagcaggatcacctcggtcgtccagcagcaccaggaggccttggtccccgcgcagccccagctcaacgtgtgcaactgggcggtcatgaactgggcacctccgggctgtgaaaagttagggaagtgtctgacacctccagaatccattcccaagaagtgcctctggtcccactagcacctgcgcagactcaggccaggcctagaatctccggttggccctgcaagtgcctggaggaaggatggctctggcctcggtcctcccccaaccctgcccaagccagacagacagcacctgcagacgcagggggactgcacaattccacctgcccaggacctgaccctggcgtgtgcttggccctcctcctcgcccacggcgcctcagatttcaggaccctcctcctcgcccacggcgcctcagacctcaggaccctgccgtctcacgcctttgtgaaccccaaatatctgagaccagtctcagtttattttgccaaggttaaggatgcacctgtgacagcctcaggaggtcctgacaacaggtgcctgaggtggctggggatacagtttgcctttatacatcttagggagacacaagatcagtatgtgtatggcgtacattggttcagtcagccttccactgaatacacgattgagtctggcccagtgaatccgcatttttatgtaaacagtaagggaacggggcaatcatataagcgtttgtctcaggggagccccagagggatgacttccagttccgtctgtcctttgtccacaaggaatttccctggacgctaattatgagggaggcgtgtagcttcttatcattgtaactatgttatttagaaataaaacgggaggcaggtttgcctaattcccagcttgaaaaaaaaaaaaaaaaaa

SEQ ID NO: 1313 - DNA, 6084 bp, HOMO SAPIENS
gccccaacagcgcgcacgcggctaccgagctggaggaggcggcgggcgcgagacccggaatgcgcagggcccccgcctcgccccccccagcccgggccgcggcccccgccttccccgcagtcgtcccgcactcggtgcccgccccccgaggccggcggctgctcccactcggggccgttgctgcttgtgccgtgagcgccgcccagccattgtccccgtcgctccgtcagccgcgccggaccgcgcaccaggaggcgagagcgcgcatggggagcctctgttgatgccgccgccgcgccgccctccgaggctgcgtcccgggaagcccggctccccgagcgctccggcctggcccggtgccccggacctgagtgcgtccccatggaggcgcccgggctggcccaggcggccgcggcggagagcgactcccgcaaggtggcggaggagacccccgacggggcgcccgcgctctgccccagccctgaggcgctgtcgccggagccgcctgtgtacagcctgcaggactttgacacgctggccaccgtgggcactgggacgttcgggcgggtgcacctggtgaaggagaagacagccaagcatttcttcgccctcaaggtgatgagcattcccgacgtcatccgcctaaagcaggagcaacacgtacacaatgagaagtctgtcctgaaggaagtcagccacccgttcctcatcaggctgttctggacgtggcatgacgagcgcttcctctacatgctcatggagtacgtgccgggcggcgagctcttcagctacctgcgcaaccgggggcgcttctccagcaccacggggctcttctactctgcagagatcatctgtgccatcgagtacctgcactccaaagagatcgtctacagggacttgaagccagagaacatcctgctggatagggatggccacattaagctcacggactttgggttcgccaagaagctggtagacaggacttggaccctctgtggaacacccgagtacctagcccccgaagtcattcagagcaagggccacggaagggccgtggactggtgggccctcggcatcctgatattcgagatgctttcggggtttcctccgttttttgatgacaacccgtttggcatttatcagaaaattcttgcaggcaaaatagatttccccagacatttggatttccatgtaaaagacctcattaagaaactgctcgtggttgacagaacaaggcgattaggaaacatgaagaacggggcgaatgatgtgaagcatcatcggtggttccgctccgtggactgggaagctgttccgcagagaaaactgaagcctcccatcgtgcccaagatagctggtgacggcgacacttccaacttcgaaacttaccctgagaatgactgggacacagccgcgcccgtgccgcagaaggatttagaaatcttcaagaatttctgaggacaggagctcacatctggaagaaacaggaagattggaatctgcctggaacaaagaactgcacctaagcagaccagaagcaaaatgtcttcttcacggcataaggacatctccacttttctctgtacctgtgtgtatagaaatagattagagcacagttgaaattcatggaactggcattatttaagcaactggaattccacactgtaggaaggttttgaaaattgtttggttgtagattttatcttatcctttagtgttgtgttcctactgtgatgtcttggtttttgtcatagacttaagtttataagtttgaactggacttgttcgattataaccacaaattgtgtgtgtgtgtgtgtgtgtgtgtgtgtgtgtgtgtgtgtgtgtatgcctgtgtgtatatatagaagtcattatggcagatgcacagaaattgtgcagtgatgtaaatgttcatactttacagagcctataatttttatttttcaatttgttttttcaaaaatctcttctcggggacaacatctgaagggtatgttgcatgcattaaaaaaaatcatctcacatgcattttatagttttggggaagaaaatatcatggggaggtctaccttcagtatctttagtgcttcttacctggtaacttgagactttaaaagaagaaacaaagaggggaagatatgggagcgaatttattccaagaatctacaatgacattgaagttgttggaggaatgtactgtatttaaaaaaaccttctgtgacacattcaaaaatttcatctgagctggatgcagtggcttgttcctatagtcccagcactttgggaggctgaggtgggtggattgcttgagcccaggagttggagaccagtctgggaaacgtggtgagacctcatctctacaaaatacaaaaaaattagccgggcatggtggcacgtgagtgtagtctcagctactcaggaggctgagatgagaggatcacttgagcctggggaggtccaggccgcagtgatccgagatcacaccactgcattccagcctgggtgacagagtgagaccctgtccaaaaaaaaaaaaaaaaaaaaagaaggcaatggctttgtgcttttgaagatggattgaagagaacgtccaccttaaggctttaaaagacagtgaagctgggtgcggtggtgcactcctgtaaccctgggactttgggaagctgaggcaggaagattgagcctaggagttcgagaccgacctgggcagcatagcgagaccccatctctatataaaaaaaaagatgttaaaacagtgaaattacagaaacagaacatagccaccctttttcatcagtgaccttttcttcacgtggaggtcaactcagtaggtgagaataattagtaggttcagcagaataaactctttacaattaataactcagtggaaaatgatgttcagatggtgaaatgtggaaatgttttagacaactctattttcagcctgtgcttctcactcaccatcctgttgggattaacagttgagggccatcgctgcctaaacatttagcgtgcggtttcccatcagttttaccgtgaatgtgaaaaggtgaaactggtgctgacttcggcagcaggtatactaaaattggaatgacacagaggagattagcatggccccctgcgcgaggaagatctgcagattcatgcagcattccatatttttttaagaaaaggttacactgtgcaccgacatgtggagctagaaggaaaagcttttaagtctcatgtttgctgactataaaaataaatcatagtaataatattgaacattctactttaaaaattattaataaaaccataaatgaaacacttgagcacactttaaaaagtacataaatccatgagtccatatgcctatttttaggttgtctgttttattatccaggatttcatactcagatgagaattagcatcaggaaagcctgaaatgccttaattgtgaactgatatgcaggaaaatgaaatatgcaagcacattggtgaccttgttctttacagacgtcgtgatcagcctccagccatacagaacaaatgagaaattagaagcgattccaagaacgtgtgatggtgtgaaacccactttggaccatcacacacatttcagcatttgaagtgacacaagctacctggtaactgcccatggcggggtcatagtttaaatggcccaatgtcatgtagaggttaatttaatcaaaatgagctataaacatggagcaatcactgtataattttaaaatagtttacctggccaggcatggtggctcacgcctgtaatcccagcactttgggaggccgaggcaggtggatcacctgaggtcaggagttcgagaccagcctggccaacatggcaaaacccccatctctactaaaatacaaaaattaggtgtggtggcgggcacctgtaatcctggctactcgggaggctgaggcaggagaatcgcttgaacccgggaggcagaggctgcagtaagccgagatcgtgccactgcactccagcctgggccacagagcaagactccgtctcaaaacataaaaataaaaaaaatacaaatagctgacccgggtgggcattccaaaatgtccgcatggacgatcacgaaacaatcacggtgcgaaatgtccgcatggatgatcacgaaacaatcacggtgcagaatgtccgtatggatgatcatgacaaacaatcactgcgcaaaatgtggaggaaaattcattaccataatcacaacatttgtatcagaaaaacattacaaatttactttgcttcatgtaattttacgagttggcaatattttcttaaattggaatactctaagagaataggacatggatatgttacaagaagaagtgtattggggcaagtcttgtttttctgaagggaaatgccaccggcctgctttcataggcattgataaagccaggaaggaaataaagtcacaaccaaatagtatacactgtctctactgaattcttctaattccttcgcaacagaagtctaaatcctgcttagcctaaacatatctatagccagcgatgggcaaattatatttgctgtcagcatgatagaataagaagcagaaaccccccagcagtggggtaagattgcgcgcttcatcccctcaaaatgcagttcagccccactccctctccatgcccatcaaacaactgcacaatcacttgttactgaatttcccattcagcgttttgtttctttctgtccatacttaaagaccaaatcatttgtttgctttgaagaaaaagcaaaaacaagaacaaaaacaccaaatcatttgaaatcactgtccattaaaaaaaatcaccagtggaactaaacagttgagtggtttgggatgtgttcgccatttctgtgtttgacctacatggcctctaattctttggaccattgtaactgtgaaactatggcttaatactgttaaagaccccaaggctccactctgtagccaggtgcacctcaggctgcacaaataccccaccagaatgtcacaatcattcattgctccagctactgagtgaacagggtgcaagacagcactggcttgggttgtatttttgcagccagttaactttgcatcaggtctacacagtccttgcagcctttgatttctccagttgtagagatttgaaatggggtgcccgggttcctctcgtttttccttcaatctacctagcatgcattttacacacattggaggagtcgtatgcactgtttttctgttgctgatggaggcaagcaggccttctaattagtctaacttaaacggatgggattcacttaacaaaagcaagaagaaaagcacacgaacaggtgtcttaatgcatttggatagtttctttgcggggtgtgtgtgtgtgtgtgtgtgtgtgtgtgtgtgtgtgtgtgtgtgtgtcttggtgaaggtgaggggctgtattttcaccaagccttttcataatcaagtttgctttgcaaaccttatggccttgcaccccgcagaacagtcccttcctaatagcagggatgctctgtcatggttttctgtaaattatcgtgtgttgggaagttctgttgaggcttagtttgatcttccatggtggacacgtctgttctgtatgtaaaaggcattacaattgtgttttagcagatgagacttgaagcctttccacagtccttgtgctctgagatggctgttgagctctgctcaactgtcgtagctgaattctttctttgcgctgaacactgggcagcctcaccatgttgccaacgtgcttctggggcccctgtcactgccgccggatgccgcgcacacaggcagagtgccttggcaggtttgtgcaccccttggcgagccagaactgggaaccccgcggggtgaccccttctcatggggggtcggggaggggagtgcctatttttaatcctgtctgtttgttgcacaatggaaatcactgtgatttgtacatatgccctaggaaaattttactgctgtctaatttatgtaataatactgttgattccaggtttgtttaataaaactttgtatcttttcagaagtctgagtttcatctgcttctgtctcc

SEQ ID NO: 1314 - DNA, 2406 bp, HOMO SAPIENS
ggcagcgacgcggtgaggagacggcccacggcgcccgcgggctggggcggtcgcttcttccttctccgtggcctacgagggtccccagcctgggtaaagatggccccatggcccccgaagggcctagtcccagctgtgctctggggcctcagcctcttcctcaacctcccaggacctatctggctccagccctctccacctccccagtcttctcccccgcctcagccccatccgtgtcatacctgccggggactggttgacagctttaacaagggcctggagagaaccatccgggacaactttggaggtggaaacactgcctgggaggaagagaatttgtccaaatacaaagacagtgagacccgcctggtagaggtgctggagggtgtgtgcagcaagtcagacttcgagtgccaccgcctgctggagctgagtgaggagctggtggagagctggtggtttcacaagcagcaggaggccccggacctcttccagtggctgtgctcagattccctgaagctctgctgccccgcaggcaccttcgggccctcctgccttccctgtcctgggggaacagagaggccctgcggtggctacgggcagtgtgaaggagaagggacacgagggggcagcgggcactgtgactgccaagccggctacgggggtgaggcctgtggccagtgtggccttggctactttgaggcagaacgcaacgccagccatctggtatgttcggcttgttttggcccctgtgcccgatgctcaggacctgaggaatcaaactgtttgcaatgcaagaagggctgggccctgcatcacctcaagtgtgtagacattgatgagtgtggcacagagggagccaactgtggagctgaccaattctgcgtgaacactgagggctcctatgagtgccgagactgtgccaaggcctgcctaggctgcatgggggcagggccaggtcgctgtaagaagtgtagccctggctatcagcaggtgggctccaagtgtctcgatgtggatgagtgtgagacagaggtgtgtccgggagagaacaagcagtgtgaaaacaccgagggcggttatcgctgcatctgtgccgagggctacaagcagatggaaggcatctgtgtgaaggagcagatcccaggtgcattccccatcttaactgatttaacccctgaaacaacccgacgctggaagttgggttctcatccccactctacatatgtaaaaatgaagatgcagagagatgaagctactttcccagggctatatggcaagcaagtcgcaaagctgggatcccaatccagacagtctgaccgtggaacgagactcatacacagtcagcaggcttcttctcagagatgacagaagacgagttggtggtgctgcagcagatgttctttggcatcatcatctgtgcactggccacgctggctgctaagggcgacttggtgttcaccgccatcttcattggggctgtggcggccatgactggctactggttgtcagagcgcagtgaccgtgtgctggagggcttcatcaagggcagataatcgcggccaccacctgtaggacctcctcccacccacgctgcccccagagcttgggctgccctcctgctggacactcaggacagcttggtttatttttgagagtggggtaagcacccctacctgccttacagagcagcccaggtacccaggcccgggcagacaaggcccctggggtaaaaagtagccctgaaggtggataccatgagctcttcacctggcggggactggcaggcttcacaatgtgtgaatttcaaaagtttttccttaatggtggctgctagagctttggcccctgcttaggattaggtggtcctcacaggggtggggccatcacagctccctcctgccagctgcatgctgccagttcctgttctgtgttcaccacatccccacaccccattgccacttatttattcatctcaggaaataaagaaaggtcttggaaagttaaaaggcatcagtcttactacctgtcccaccacccccaccttagggaaatgtcctagaatcctgggaaattgagggcttctttgatggtgagtggagaaaagatagaggagaaggttgcccctgaagtgctgttaggagaaggaggatagaggaatcagccttaggagggttccatgccagctgtcatttggcaaaggaccctggacagatgacttttgcctctgaacttcactcttctctttcctcaaatgggcttcataatgctttccactcaggcttaacatgagaattaaatgaggtgacaaatgtgaagacctggacagtacacaacagatattcaataaaagtgtggtcgccattatgaccagagcctccaagcctcaaaaaaaaaaaaaaaaaa

SEQ ID NO: 1315 - DNA, 1532 bp, HOMO SAPIENS
agcgcagcgggggcgggaaggttgtagtgccgcgagttgagctcctcttgcctaagtggtcgcgccccctttaagagcagcgattgtaaggagaggcggtcccggtgtcctcgggtcccaggtgattgtgaagtgctgaccaattgccactggacatacttgaaacaaaataggaaaatggcagcaaactcttcaggacaaggttttcaaaacaaaaatagagttgcaatcttggcagaactggacaaagagaaaagaaaactacttatgcagaaccagtcttcaacaaatcatcctggagctagcattgcactctcgagaccctctcttaataaggacttccgggatcacgctgagcagcagcatattgcagcccaacagaaggcagctttgcagcatgctcatgcacattcatctggatacttcatcactcaagactctgcatttgggaaccttattcttcctgttttacctcgccttgacccagaatgaagaaaacatttgcgatggaaaagtgactttgtaatatcaaatgccaaagctactatcattcagtgctacatgaactgtgactttaagaattttggtgaactttgatattttttgtttgtctgaaagaaaggaatgtgtaagtgaaagctgaaagaagaataaccaggatgatgagagctgtggaagctgtatcgtccaaggaattgattatgtaccgtgactgtaacttttttgtaatgctgtttaactctcaatcagactgtgaactggatggtcacgaagtcattccccaactcctagcaagtttgactgaatatatcatgtccacagtagattttcaagaatcatttatagtacttaactttaaagaaacaaggctgcttttaaaaaatgaactaataggcttaaatcaattgcatccatatttgctgtttataggattgctatcagtataccttttgcgtttatagtcaacatgtatcatcctgaaatattctttctggacttataactacttccccctttttcactttaaaacaaacctcaagaataaattactaaccagtcttaaccatcttttataaacatatgctcttataaatgttgtgactagatgcaattaaaaataatagggaatgtggtaggtttttaatttgtacatcctcttatttagtgttaccacataaatgatgagtttgtgtggttctgttttccatttttgttctaactgaaaactttttggctgggcacggtgcctcatgcctgtaatcccagcactttgggaggccaaggcgggcagatcacttgagatcaggagtttgagaccagcctggccaacatggtgaaaccctgtctctactaaaagtataaaaaattagccatgtgtggtggcacacgcctgtaatcccagctactcaggaggctgaggcaggagaatcgcttgaacctgggaggcaggggttgcagtgagctgagacggtgtcactgcactccagcctgggtgacagtgagtctttgtctcaaagaaaaaaaaaaaaaaa

SEQ ID NO: 1316 - DNA, 554 bp, HOMO SAPIENS
ctctttccgccatctttccgcgccggtgagtagcactctctgagagctccaatttcatccgtctgccatcggcgccatcctgcaatctaagccacaatggtgcgcatgaatgtcctggcagatgctctcaagagtatcaacaatgccgaaaagagaggcaaacgccaggtgcttattaggccgtgctccaaagtcatcgtccggtttctcactgtgatgatgaagcatggttacattggcgaatttgaaatcattgatgaccacagagctgggaaaattgttgtgaacctcacaggcaggctaaacaagtgtggggtgatcagccccagatttgacgtgcaactcaaagacctggaaaaatggcagaataatctgcttccatcccgccagtttggtttcattgtactgacaacctcagctggcatcatggaccatgaagaagcaagacgaaaacacacaggagggaaaatcctgggattctttttctagggatgtaatacatatatttacaaataaaatgcctcatggactctggtgcttccaaaaaaaaaaaa

SEQ ID NO: 1317 - DNA, 4576 bp, HOMO SAPIENS
cgcgcggggttggtgaggttccgctgagggcggccggggctctgggagcgtggtaacgtggctgcaaccttagcgacatcaggaagaacagggtcgaggatcgagtcacagcaaactgtacaatggcagttgagtgggttttgaaaaacgtctgaattgtagtgtctacatctaccttctgccttctctctaccctttgaaaaaaaataaatggcatgtttgagaagagagctctattaaaagaggaatattgcaaatggcttcagattctatgagtagtaaacaagctaggaatcacattacaaaggggaaaaggcaacaacagcaccagcaaataaagaacagatcctcaattagtgatggtgatggagaagattcctttatttttgaagcaaatgaagcttggaaagattttcatggttctcttcttcgattttatgaaaatggagaactctgtgatgtcacactcaaggttggctcaaagctaatctcttgtcacaagctggtattggcttgtgttattccctactttagagccatgtttctttctgaaatggctgaagccaagcaaacgctgattgagattagagattttgatggtgatgcaatagaagacttggtaaagtttgtctattcttcacggctcactttgactgttgacaatgtccagcctctcttatatgcagcctgtattctgcaggttgaactggtggctagagcttgttgtgaatacatgaagttacattttcatccctccaattgcctggcagtaagagcctttgcagaaagtcacaatcgaatagacttaatggacatggcggatcagtatgcctgtgaccattttactgaagtagtggagtgtgaagactttgtaagtgtatcaccgcagcacctccataagcttttgtcctccagtgatctaaatattgaaaatgaaaagcaggtctataatgctgccatcaagtggcttcttgccaatcctcagcatcattccaaatggttggatgaaacacttgcacaggttcgcctgccattgttgccggttgattttcttatgggtgttgtggcaaaagaacagattgtcaagcaaaatctaaaatgtagagatttactggatgaagcaagaaattaccaccttcacttgagtagcagagcagtacctgactttgaatactccattcggactaccccaaggaagcatactgctggtgtgctgttttgtgtaggtggtcgaggtggatctggtgacccctttcgcagtattgaatgctattctatcaacaaaaacagttggttctttggaccagaaatgaatagtcgaaggcgacatgtgggtgtaatctctgtggaaggtaaagtgtatgcagtaggtggacatgatggaaatgaacatttagggagtatggagatgtttgatcctctcactaataaatggatgatgaaggcatcaatgaacacaaagaggcgaggaattgccttggcttccttaggaggcccaatttatgcaattggagggttagatgacaatacttgcttcaatgatgtggagagatatgacatagaatctgatcagtggagtacagtggcaccaatgaatactccccgtggaggagttggctctgttgctctagtaaaccatgtttatgcagtaggtggcaatgatggaatggcttctttatctagcgtggagagatatgatccacatctggataagtggatagaagttaaagaaatgggtcagcgaagagcaggcaatggagttagcaagcttcatggttgcttatacgtagttggtggttttgatgataattctcctctgagttcagttgagcggtatgacccccgaagcaacaagtgggattatgtggcagcacttactactcccagaggtggagtgggaatcgcaacagtgatgggcaaaatctttgcagttggtggtcataatggcaatgcatacttaaatacagtagaagcgtttgatccagtgctgaataggtgggagcttgttggatctgtgtctcactgcagagctggagcaggagtagctgtgtgttcctgtttaactagccaaattcgagatgtaggtcatggatccaataatgtggttgactgtatgtgatttgagttctggccaccaacaatttagtcatatctgataggtacaaaagaaaaccaagattttgatatgaccacctttcaacactttttactgcaactagagtcttatttaaatgttaactgttgtattgtgactaagtacaacttttggaatgatacctgaagaattattagtaatagagttaaatttgatacttcctgcttttgcaaataatggagtagggaagaagatagtcgaacttaaaatcatacctaccctgaaaaatgcttaaagtagtgccaaaaatcttgaaatctctctctctctctctatttggatgaatcaaaatgtaatttgttgagttttgccttttcttttgcctaaagatgttaacgtcaggcagtgggtttttcctagaggagagattagtacctattcattaacacaaggatacataagagacttgccccttttgaagatcatttctacttggtgctgatgaatttatgcctagctttttttttctaggtggtgatttttcaatttcttttatatttacggaagtagaaaaaatgttctgtctttttgaatgccacttagctgcattttcagaagcttataggctataagaagcctttaatttcagtttgaattgctaggacaccaaaagacctagctgggctaactccatccaaatgattttacagttttattttttcatcttttgcaaaaagtatttgttacataatcaaaaggtgaaccagaggaaatattgaacaaggttttagatctgatgttattctggtgcccaattgagagaccttgagaaagaatgatgcagattacatgactctaatgtgggcagtctgaaaatatctttaactgtcttctttgatcatttgattttggatccaagatttatcatctctctattttgctatttgccaccatcctggtttttctgactgtacagaatcaatctgcatttatttattatcagaaatgaatgcatttttacaaaaacctttttgtagactgtagtttattgattagttcaagcccatcacgaactaattaaacatattgttggtaaaaacagagattgaaattactgtttttatcatatttaaatccctctggtgtatttattgaaatttaattaaaaatatttctacatattgatttgaagccaggatattgatggacctacagatttaacagctcttcaaagttttaactagcattataaaatggcctattcattatatgtatatttttttataaatatttatcaagaacatgaaaatattttattttgtatttgcagtgcagtttggcacctctcttccaggccttcctaagtttttgttagttgtgtcttcgaatttattgtagttcaccgctggtcagtaatctggttcataaggaagctggggcagtgaaaaacacttcgttgatccatccagccctaaagttcattgactaatagctcatgcatcttattaaatgggattctggacttctacaatagtgtggaaagccacatcacaaaaaaagccacatcacaaaaaaaagccagtgcctattgagtatatcaaaccaaaaaagaaaaaaaaaagttttaagaggggtcaggctggcagataaaagtctcttatgaagcagatataaatccagtaagctatttttttctacctatgggcaagttcataagtcattgctggatctgaaccagtgttcttttgtgtaagtacaaccatatttcagtcagtccagaggcagttaaccctgtagcacttactagactggtgacaactggctggatgtggagaataagtgtcaaaacctggcttcaatgtctatttcttatgtctaatggagttcttatattacagtgtttgtttagctatggttactaatatgtttgttatatttattttcggggagaggatcttgttattgtttcctgagattatttaaaatgttttttctttgatgtatttctgtctttcttatatgtaaggagttataagggttattatattttcatttctggtttttactatacaatggttatctaacatactaagttggtaccctacctacccgtaaaatatgaaatactcagaagtaaagtgtgtgggcaatcagaagcatagccttgaaggacctgacagcagtatgaaaagataaataggccaggcatggtggctcacgcctgtgatcccagcactttgggaggccgaggtgggtggaccacctgagatcaggtgttcaagaccagcctgaccaacatggtgaaaccctgtctctactaaaagtacaaaaattagccaggcgtggtggcgcatacctgtaattccagctactcaggaggctgaggcaggagaattgcttgaacccaggaggtggaggttgcaatgagccgaggttgagccatcgcactccagcggtgaaacaagagtgaaactccatctc

SEQ ID NO: 1318 - DNA, 4241 bp, HOMO SAPIENS
ggtcgcaggcagcgcggtcggcggcggctatttcccgccattgtgcgaagtgaaggctaggggcccgtacgcgcccgcctgactgtcgccagcagctcctcggcggccccaccgcagccgccgctccctgaggcgcgggaggcccgcgccccgcggctcgctgtgcgtgggagggcgcgagcgaacgcgggcgaggagcggccgagccgctgaagaggagctgggcgccggccgcccggccgcgctcggcccgcggatcgcctccgcccggtcttcgccggccccggcccctggcgagatgccgtgtggggaggattggctcagccacccgctgggaatcgtgcagggattcttcgcccaaaatggagttaatcctgactgggagaagaaagtaattgagtattttaaggaaaagctgaaggaaaataatgctcctaagtgggtaccatcactgaacgaagttccccttcattatttgaaacctaatagttttgtgaaatttcgttgcatgattcaggatatgtttgaccctgagttttacatgggagtttatgaaacggttaaccaaaacacaaaagcacatgttcttcattttggaaaatatagagatgtagcagagtgtgggcctcaacaagaacttgatttaaactctccacgaaataccactttggaaagacagactttctattgtgttccggtgcctggggaatctacgtgggtaaaagaagcctatgttaatgcaaaccaagctcgagtcagtccctcaacatcctacactcctagtcgccacaagaggagttatgaagatgatgacgatatggacctacagcccaataagcagaaagaccaacatgcaggtgccagacaagcagggagtgttggtggtcttcaatggtgtggagagccaaaacgtttagaaactgaagcttctactgggcaacagctgaactctctgaacttgtcttctccttttgatttgaattttccattgccaggagagaagggccctgcatgccttgtgaaggtttatgaagattgggattgtttcaaagtaaatgacattcttgagctatatggcatactgtctgtggatcctgtgctgagtatactgaataatgatgaaagggatgcctctgcactgctggatccgatggagtgcacagacacagcagaggagcagagagtacacagtcctcctgcttcattagtgccgagaattcatgtgatcttagcccagaagttgcaacacatcaacccattattgcctgcctgccttaacaaagaggagagcaaaacctgtaagtttgtttcaagtttcatgtccgaattgtctccagtcagagcagaacttcttgggttccttactcatgcccttctgggggatagtttggctgctgaataccttatattacatctcatctccacagtatatacaagaagagatgtccttccactaggaaaatttacagttaacttgagtggttgcccacggaatagtaccttcacagaacacttgtatcgaattattcaacatcttgttccagcatcttttcgtctgcagatgactatagagaacatgaaccatttgaaattcattccccacaaagactacacagccaatcgcttggtcagtgggctcctccagctgcccagcaatacttcccttgtaatcgatgagactctcctggaacaggggcagctggataccccaggtgttcataatgtgacagccctgagcaacctcataacgtggcagaaggtggattatgacttcagctaccatcagatggaattcccctgcaatattaacgttttcattacttcggaggggaggtcactcctcccggcagactgccagattcacttacagccccagctaattccaccaaacatggaggagtacatgaacagccttctctcagcggtgctgccttccgtgctgaacaaattccgcatttatctaactcttttgagattcttggaatatagcatatctgatgaaataaccaaggcagttgaagatgactttgtggaaatgcggaagaacgaccctcagagcatcactgctgatgatcttcaccagctgctcgtggtggctcggtgtctgtctctcagtgctggtcagacaacgctgtcaagagaacgatggctgagagcaaagcagctagagtctttaagaagaacgaggcttcagcagcaaaaatgtgtgaatggaaatgaactttaaagatgtaatacctatgaagagtaatgggcaaactgtagccacataattgtaaaattcagatattcatttataccacattgttttataggtaatttctatcacaaaccagtgacatttcctgaaatcaagcctggtaacacctgatgtttatatgatattcagtaaggacttttaccttactgatttcatggagcttttgaagtttgttttataataattatataaattagtaatgatgtaaaaaaagtatttgatattaaaagtttaatattgataatgttgctgattgtaccatttccttagcttcagctgagtcataggccagactgttgaaatgctgaaatgaagaaggttgttgcagtttcaaagtcagaggaatcgtgcttcggatttcttatgttttctagttctctgtttttccagttcacagtgggttggggtgcattcagtagtccatctttggggaacggaggcgtacttgccattgattcacatgactacatgaaattctgtactgtcatttcccagatgtttggccacagaaactttttcccacttaacatttgttaacagcctgcaaaactaaacttgtacatggcagtggttcccagacttttgtattttatggaccggtagtaatatttccaaaaatctggggtactataaggttgccaatttaccttgccaagtaatccgaataaatcactgtattatcaccatttttttcataaaaggaaaggacaatctatctctgaataagaggagtcctttaaacggaatgaatgtggcttttgggggcaaaagaaaccaagacactacattgtctttattttctcctatcccagtgcatttgagaaccatgcataagggaatgctgtgctacaaagctgtgcccaaatatgaaaacaaaataggaaacttaaaaagcaataccccctttagaaagtttttattttcttaaatgtcattgagttgctttgattctattggatttttggcattttttatgggatcatcagttggttccaagtatgttagatcagctaacatctgctactccagtaacagcctcgtacaactgcaggtaggttttctccagaccaattagttttaatagagcaaactaacaacagactgtagtagcatggttatggcaaccagaatcttcagaaaggttaggacattactttttaagctgtcagtggtatcaaataacttacctagttggaggcagataaaggatcccttacgttttttcctataaggcctaaattgaaattgttaaccaaggaaacagggtcagccttgaaaaatcaaggaattcattgtacctaataactgaagtaaaaataactagttgttcaacttttcctaaactcaaatctatttttataaacaaatgtaaataatgtttatattagagttgaactggttttcatttttataactggtagactagaccttccttaaacttttagaaataaaatgaaggcttcactggatttgtgaggataaaatacattttctttaattgtcctagagcaaagtacattagtcaccatgtgttttttgtgccaatgtaaattgtaatttaccaaagaaaaatacatacattgcttggtcttgcagaaaagttcccttgaaagaacctttccaataaataaaacgtcccaaattagcagtaccttgggctgtttttcatgagtaagaagattcaccatcccatgtgatctgtgtggaaaaagaccatgtcctcttggtggaagacatgagagagctgaactgaagtggaggaggtggtgcaagagggaccttcctgctcaaggcccgcccaggcagcggaatggagtgcagtgcttggctgcagaaaccctttgtccctcacctatatatacacggacagtcaagtttgttgctctaacgtaaggcacagcgttaatcctgtatggccaggaaactgagtagactcctgtgtaaccctgtttggaactttgccttcttaaaatgatttttc

SEQ ID NO: 1319 - DNA, 12936 bp, HOMO SAPIENS
gaggaggagctggagggggcgcggcttcctctcggtcgctccctggcgccgggcctctttctctgcctggcccagggctggcggccggcgggggtcgcggcggcggcagtgggggcgctggcgggccgcgggtggcgggggccgggccgcggctccgggtgttaggagacaagatggcggcggctctcagaaggccggtctcctcctctccgccgtcctccgccccgccgctcgccgcctcctcctctcgggtctcctcctcctcgtttgctgcctcctcctcctcctgcagcagcaccagcgaccgccgaagcgccggctcgctcacccggagctccggaggtggatagacggggcagctgcaggctccggcgaccgaggccgagctggggccggggcggggacggcggcggcggcggcggcgacggcggcggcgccgggtggggatggggtcgcagacgctgcagatcctccgacagggggtgtgggccgcgctcagcgggggctggtactacgacccgcaccaggccaccttcgtgaacgcgctgcacctctacctgtggctctttctgctgggcctgcccttcaccctctacatggcccttccttctaccatgattatagtagcagtttattgtcctgtgatagctgctgttttcattgttctgaagatggtcaactatcgactacacagagcacttgatgctggagaagttgtagataggactgcaaatgagttcacggatcagcgaaccaaagctgaacaaggcaactgttcaaccaggagaaaagacagcaatggaccgagtgatcctggtggagggattgaaatgtctgagttcatccgagaggccacacccccagttggttgcagttccagaaattcttatgccggtctagatccaagcaaccagattggatctggttcctcgcgtcttggaacagcagcaactattaaaggagatacagacactgctaagacttctgatgatatcagtttaagtctgggccaaagttctagtctttgtaaggaaggaagtgaagaacaagatttggcagctgatcggaagctctttcgtcttgtctccaatgactccttcatctctattcagccttccttatcctcttgtggacaggacttgccaagggacttcagtgacaaagtgaacctgccaagtcataaccaccaccaccatgttgatcagtctctgtccagcgcctgtgacacagaagtagcttctcttgtacctttacactcacactcttatagaaaagaccaccggccgcgaggtgtaccacggacttctagctctgctgtggcttttccagacacttcactgaatgattttcccctttatcagcaaagacgtggattagatccagttagtgagttagaatcttccaagcctctttctggatccaaagaatccttggtggaaaattctggtttatctggggaatttcagcttgctggtgacttgaaaatcaatacttctcagccacccacaaaaagtgggaagagcaaacctttgaaagcagagaaaagcatggacagcttgaggagcctgagcacacggagtagtgggtcaacagaaagctactgcagtggaacggaccgggacactaacagtactgtcagcagctataaaagtgagcagaccagctcaactcacatagagagcatcctgtcagagcatgaggagtctcctaaagcaggaacaaaaagtgggaggaagaaagagtgctgtgcaggcccagaggagaagaatagctgtgccagtgacaaaaggactagcagtgaaaagattgctatggaagcgagtaccaacagtggggttcacgaggccaaggaccccaccccctctgatgagatgcacaaccagagaggtctcagcacctctgcatctgaagaagccaataaaaatccccatgcaaatgaatttacttcccaaggggacagaccacctgggaacactgcagaaaacaaagaagagaagagtgataagtcagctgtttctgtggattccaaagtgcgtaaagatgttggtggaaagcaaaaggaaggggatgttcgacctaaatcttctagcgtaatccatcggacagcttctgcccacaagtcaggcaggagacgcacaggaaaaaaacgggctagcagttttgattcaagccggcatagggactatgtttgctttcgaggtgtttctggtaccaagccacacagtgctatattttgtcatgacgaagactctagtgatcagagtgacttgagtagagcatcaagtgttcagtctgctcaccagttcagcagtgatagctcttctagcaccacttctcattcctgtcagtctcctgagggcagatacagtgctctaaagaccaaacacactcataaagaaaggggcacagactctgaacacacacacaaagctcatttggttcctgaaggaaccagcaaaaagcgtgcaacacgacggacttctagcacaaatagtgccaagactcgtgcccgagtgttgagcctggacagtggcacagtagcatgtttgaatgactcaaacaggttaatggcacctgaaagtataaagcccttaaccacttcaaaatcagatcttgaggccaaagagggagaggtgctagatgagctatctttattaggacgggcttcccagttagagacagtcactcgatctaggaatagcttgccaaaccaggttgcatttcctgaaggggaagagcaagatgcagtcagtggagcagcacaagccagcgaggaggcagtgtcatttcgccgtgaacgcagcacatttaggcgccaggcagtacggcgccggcacaatgcagggagtaaccctacccctcctacattgctcatcggatcacccctaagccttcaagatggtcagcaaggccagcagtccacagcccaggtcaaagtccagtcccgccccccttcccaggctgcagtgctcagtgctagtgcctccttgctggtgagaaatgggagtgtccacttagaagcatcacatgacaatgcatctgctgtaggcggtagcagtttgcacgatgaacttggtaagttctcttctacgctgtatgagactggtggctgtgatatgtcacttgtgaattttgaaccagcagcaagaagagcatccaatatctgtgacacagattctcatgtatccagttctacctcagttcgattttatccacatgatgtgctctctctcccacagattcgattgaatagactattgaccattgatacagatttgttggagcaacaggacattgatctaagccctgacttggcagctacttacggcccaacagaagaagctgcccaaaaggttaaacactattatcgcttttggatcctaccccagctgtggattggcattaactttgacagactcacacttttggccctgtttgatagaaatcgtgagatcctggaaaatgtgttagctgtcatcctggctattctcgtggcctttttgggatctattcttctcatacaaggattcttcagagatatctgggtcttccagttctgcctcgtcatagccagctgtcaatactcactgcttaagagtgttcaaccagattcttcttctcccagacatggtcataatcgtatcattgcctacagtagaccagtttatttctgcatatgttgcggtcttatttggctcttggattatggtagcagaaacctgactgcaaccaagttcaaattatatggaataactttcaccaatccactggtgtttatatcagccagggatttagttatagtgtttacactctgtttcccaatagtgtttttcattggtctcctgcctcaggtgaatacatttgtaatgtacctttgtgaacaattggatattcatatttttggtggtaatgccactacaagcctgcttgcagcactttacagttttatctgtagcattgttgcagtagccttattgtatggattatgttatggggctttaaaggattcttgggatggccagcatattccagtacttttctccattttttgtggtttattagtggcagtgtcttaccatctcagccgacaaagcagtgatccatctgtacttttctctttagtgcaatccaagatttttccaaaaacggaagagaaaaatccagaagaccctctatctgaagtaaaagatccactgcctgaaaaacttagaaattctgttagtgagcgattacagtctgacctggtagtatgcattgtaattggtgtgctgtattttgctattcatgtaagcacagtcttcacagtattgcagcctgccctcaagtatgtgttgtatacattggttggctttgtgggttttgtaacccattatgtgctgcctcaagttagaaaacagctaccatggcactgtttctctcatcctctgctaaagacactagagtataatcagtatgaagttcgaaatgcagccactatgatgtggtttgagaaacttcatgtgtggcttctttttgtggagaagaatataatctatccattgattgttctcaatgaactgagcagcagtgcagagacaattgctagtccaaagaaactgaatacagaattaggtgctttaatgatcactgttgctggtttgaagttgctacgatcctcttttagcagccctacatatcagtatgttacagtcatctttactgtgctgtttttcaaatttgactatgaagctttttcagagaccatgctgttggatctcttctttatgtccatactcttcaacaagctttgggaactactttataaattgcagtttgtgtatacctatattgccccatggcagatcacatggggttctgctttccatgcttttgctcagccttttgcagtgcctcattcagccatgctgtttattcaggctgctgtctcggccttcttctctactccactgaacccctttctgggaagtgcaatattcatcacttcatatgtccgacctgtgaaattctgggagagagactataacacaaaacgagtggatcattcaaataccagattggcttcccagcttgatagaaatccaggatcagatgacaacaatctgaattccatcttttatgagcatttaactagatccctacagcacagcctctgtggtgatttgctactaggacggtggggaaactacagtacaggggactgtttcatccttgcctctgactatctcaatgcattagtacaccttatagagataggcaatggtctggtcacttttcagctgcggggacttgaattcagaggtacctactgtcaacaacgggaagtggaggccattactgaaggtgtagaggaagatgaaggattttgctgttgtgaacctggccatattcctcacatgctttcatttaatgctgcatttagccagcgatggctagcttgggaagtgatagtcacaaagtacattctggagggttatagcatcactgataacagtgctgcttctatgcttcaagtctttgatcttcggaaagtactcaccacttactatgtcaagggtatcatttattatgttacgacctcgtctaagctagaggagtggctagctaatgagacaatgcaggaaggacttcgtctgtgtgctgatcgcaattatgtcgatgtggacccgacctttaatccaaacattgatgaagactatgaccaccgactggcaggcatatctagggagagtttctgtgtgatttacctcaactggatagagtactgctcttcccgaagagcaaagcctgtggatgtggacaaagattcatccctagtgactctctgttatggactctgtgttctgggacggagagctttggggactgcatcccatcatatgtccagtaatttagagtcattcctctatggattgcatgccctatttaaaggagatttccgtatttcttcaattcgagatgaatggatctttgctgacatggaattgctaagaaaagtagtagtccctgggatccgtatgtccattaaacttcatcaggatcattttacttctccagatgaatatgatgaccctactgtgctctatgaagccatagtatctcatgagaagaacctcgtaatagcccatgaaggggaccctgcatggcggagtgcagtacttgccaactctccctccttgcttgctctgcggcatgtcatggatgatggcaccaatgaatataaaatcatcatgctcaacagacgctacctgagcttcagggtcattaaagtgaataaggaatgtgtccgaggtctttgggcagggcaacagcaggagcttgtttttctacgtaaccgtaacccagagagaggtagcatccaaaatgcaaagcaagccctgagaaacatgataaactcatcttgtgatcaacctattggctacccaatctttgtctcacccctgacaacttcttactctgacagccacgaacagcttaaagacattcttgggggtcctatcagcttgggaaatatcaggaacttcatagtgtcaacctggcacaggcttaggaaaggttgcggagctggatgtaacagtggtggcaatattgaagattctgatactggaggtgggacttcctgcactggtaacaatgcaacaactgccaacaatccccacagcaacgtgacccagggaagcattggaaatcctgggcagggatcaggaactggactccacccacctgtcacatcttatcctccaacactaggcactagccacagctctcactctgtgcagtcgggcctggtcagacagtctcctgcccgggcctcagtagccagccagtcttcctactgctatagcagccggcattcatccctccggatgtccaccactgggtttgtgccttgtcggcgctcttctactagtcagatatcgcttcgaaacttgccatcatccatccaatcccgactgtcgatggtgaaccaaatggaaccctcaggtcagagcggcctggcctgtgtgcagcacggcctgccttcctccagcagctccagccaaagcatcccagcctgcaaacatcacactctcgtgggctttcttgcgacagagggaggtcagagcagtgccactgatgcacagccaggcaacaccttaagtcctgccaacaattcacactccagaaaggcagaagtgatttacagagtccaaattgtggatcccagtcaaattctggaagggatcaacctgtctaaaaggaaagagctacagtggcctgatgaaggaatccggttaaaagctgggagaaatagctggaaagactggagtccgcaggagggcatggaaggccatgtgattcaccgatgggtgccttgcagcagagatccaggtaccagatcccacatcgacaaggcagtgcttctggtccagattgatgataaatatgtgactgtaattgaaactggggtactagaacttggggctgaagtgtgagccagtgtttattataaagacatttctttttccctctcaattccaaggcattggaaaaagagaggaacaagcagaagatgcctgcaggtatcactttgatcctatgtgggagcgactgaaaatagaatgagcttggttaagcacctctcctttgcccttcaccctgactcctgtcactgtctccatccccaaataaagctgaaatatttttttaagttagctgccgagaaaacattttgcatgaaggataaagttctgttaaaatacatccttaaaaaaagtttttcctatgcattgcctatgctttaaatcaacaaactcttcatttctaaactatgatctcatatttttctaatttctttgccaaaaataattgccatgttttgtcatagaacatgaaattcatttaccttgatttttaagaacagaccagtgtagaaatgttccttttgacttatagcagtataaaagtttaatgtacagtgaaagagactatgaacagacatagatttatcttattccttgagcgctaaaaactttaataaaaaaaactgcactaattttttacagcaatgcactaaagtctgagatttctcagaacatttatttatatataaaaataaaataccattatttaaattgcctttgggattagccccttccctttccttataaacacaggtagcaggaactgtgctgctcatttttctgttagtagtgtgtacttcatgccaggacattgggtattttctttaaagtgaatatagaatctcaagatatacgtagcttcatcattgacatttcccagagccaatagtcagcggatcggtcttgtgaacaccactgccagctcctgtgtctacatctcagaggagcccatgtgctctgcttctctccaccagagcaagctctgctgggcgtgcttctgggaagaaaacaattttctttaagaagaagatgaatgtccaggaatttaaagaaaggatcgattgccttttatttatgagtttctagctcttgaagttattcacatgcagttcagttagtcaagtaaaattttttttcaaataaaagtatccaagtggtgcagttattattatatccctctttaataattttgctttttatttttcccctcttctttttctgttacttgaattttatttcctgtaatttatagtgtgtagctgtaaattgaaatatttataactgtgaaattgacttaattcatatgttgtctcataactttattttttttaaatgcatattcagggaaatatattactcatatttacaattgggcgatataggaacttcaatttagatttaatttgcaactcttagcattttttaaatccttgataaaattttcccttttggtgtgaaactccaaagaaaattgtacatctcctctgagcatttaggagcagccatctttctaccccttgtgaataaatcattgaaagaaacaggtaaaattaattttaatgatacattttgtttcacccagtatagtcaaagtattactatttcatcatatgtcactagccatatttcaagtactcaatagctacatgtacctagtggctactgtattagacagtacagatttaaagtatcttttgttgaggtgacagaagagagaagctgtttttcctaccaattctgatgtagatctcacattatagcataacattacagtagaaggaatgaaaactaagaaagtaaatagtgaacatacagaacttactgcatttccactttaaaacctatttattttccctttttctaattttaaacttttgtggtcattcagaacctaatgtgccttgtgttgacatttccatagacttcacactttacaaaatttactgtttaaaaatacttgtcaaatgatttactgaacctttatacaaaagtaccctttctaaattgaccatttaaaaatgtatttttgtgataccgtcattatgttctgcatttgcctcattttggcagatctacagtatgccattaaagtttagtgttgtttttggttttggagggtttttttctgaaactgaatttataatctatttctctgtatacgtatatttttaaaatcttctgaaaggaactatgttccctgctgcttcttccctttctgaagtgaatatgatcttttcatggtcattgcctagataaaagtagagccttttcaatcttagatggaagataattcattttcccacacagaaaaaaaatctgacctttacatgatttaatctgaagggctagaattttttaatttctagcccctcctccaaaaaaattttaaacacatcacatactctgaaaagtcagatttcaaatgcaagactagactttatatggaacatatatgttgggttttgattttgggtagcaattgacatatatttttctcaaaacaagttgaattttgttaacatatataattctttagtgaatttataaattaggaaccctgagaagaagccctgttgtttttcttaagagtctaaaactgacaatcttttaaaaatcataatacttttctagtaattgcatcagggaattggtgataattgaagaaagatccatttcttaagaataatttgatctaaattattatatggaaataaacatacttgtgttaactaaattgatcataaattcttgttcctgcctcacccctcaccccccagagaatagtgagtgactcgtttagattctctgctttttttcagttatgtacaagacttcagcatacattaatgtctttagtttataaatttgccaatgctttaatttccataatttgaaagttaaaagatgtaactaaaatactagcttttttattcatttccttttggtggagttgtatgattgaaaactttgctttttcttgtttaattcttccgccaccccctcttttgagagaaaggtaatcgtggaatgagttataaattattgcctttttttcctttatttctttcattcagtggcaaaaaacattttataactcctaagtttttggttaatcttccaacttataccttggtgtgaactctctttttacaccattttcaacactggataaaactttaatgttgactttttgctaaagaactttaatttttccaagaatctagattaacataagatgttgatatttaaggaacttggaagagtaagtggtgaggctgtatgtatattttttaagagattaccttttaggaaattagtgaacaaacttaaccagtgttctgccttctttgactttgttactggaggatgataatctatttctattagattcgaagtattttggaaaatatttcaagtatatctgaactacttataattcttaaaacagaagtagtcagacaatatttgtatcctaagtgagatatggaaaattactctgtatactaaatgtcaggcaatgaaaatgtaagtttttgtgtagaaaacccattaagaagatgtgtttttctttctgaattagtttatttttccatcacataccaaaatataaaaatcagcctcacatttttcagcaagtttagcttatagccttgataaattcctctgtgcttctgagcagcatccttctgcctctgcttagcagctctgcatttggtggattgctgttgtgagtcattcatccagcactgggccttttaagctgaagattcacccagtgtctaaagttgtccttttcttatagctagctttcaagcatctttcctcctaaataaatatgtgacttgagaaaaaggtaataatgattttgtcagaattctttgaatttatatttactagctacttaaccataaactgctgtccagattgttaatttcatttatatttattttaattaatttgtcatgaatatggacaaagccttttctggggtgtgtgtgtgtgtgtatgtttgttttttaagtcgtcattattcattcgtattctttttctgtgtaatgtaatcatataaagttactttggacagagacccagttaattttctcttttgataggatacatggtttagataaggtataaagtgtccctttttattctagaggcttttcctttaattcagagattagtggagataataacgtcagtcaaggctaatgtggtacatggaacttgctaatggaggttggacattctgtttcagtcttacatggatattgtttcattggtgttgaggaagaaaaaaattagatactaccatgcattgggacagcataattctaatattacattgaatatggctttttaaaaataagtattaaaaagccaatcgttttctccatttatctatcttttttgtttgtttttaatttggttgattgatatgcacccaggccgtcttatttttacttgttaaatgtctgtctaggaagaactgtgattggaaaggaattaattattatacaaataaatctggtaggatatgagtggagtaagtttgcttgaaacagaagtatattttctactttgaatcacctcaccagagtcatctgtcaagaattatgtataacaatttatctttattgcctacatacaacatactttttctgaattaagataacttctatttgtgagttgaacttcattatctgccattttgtggaatcaaccttacattctttggtggaactagagctgattgtcaccacaaggttatatgacaactctgttctaagacttatacctattatatagggttataccttttttcttatgcctcagctctgtacctgacaatttatgattcagtggagccaagctagaaggaacaaaggtcatctaacactgtgatggggatgaattcctgagttttacctgcacaatgaggtggtgccccggaattcacaacagagtagtgatagagcataagatggctgctccagatgactcttgggtttagtgtacttgtgattgaacaagattttttatctatgaagcttgattctacaaccaaaataatagaaatgggggggggggggggaatcatgtctgcttatgctttttaaaagcttatagtttaagtaaaagtaaaatgtaaaaactgattaaacctatacaagtctggcaatgagctctgcatgaggaaatggaaggaggaatattgaaaatgattctaggaaagtgaacgtaagaaaggaaaatgggttttccttttctgatcatgggctctggaaagtattcatggcctttaccagcattcagtataaaccagagataaggacatatgtacttacgtgtgtctgtgagtgtgtgtgtgtctgagtgttattctgaacagcttgtaaatattgtagttgtttaaaatggaaaataaaagctgagttcttttggcaaatatattgcatcaaaaatacagtattgacagtggataaaacactgaggaaataaattttttttcattttgcaaaaaaaaaaaaaaaaa

SEQ ID NO: 1320 - DNA, 2635 bp, HOMO SAPIENS
cgttaggccccggggattgtggcgtgacccggcagcggcttcctccgttcgggcatcgctgtgcctcgggttcgcgccccgagtgagcagtcctggcccggagcgtcggtcctggtaatctgtaggaaaagcgctgcggcccagggggtaaagagagatcagcctctgtggactcggtgcttctcctggcaagtaaaccccaaggaggactgaccagttcttgaatttctataccatggcccttcgatcagtgatgttcagtgatgtatccatagacttctctccagaagagtgggaatacctggacttggaacaaaaggacttgtacagagatgtcatgttggagaactacagcaacttggtctcactgggatgcttcatttctaaaccagatgtgatttcctcattggagcaaggaaaagagccttggaaagttgtgaggaaaggaagaagacaatatccagatttggagaccaagtatgagaccaagaagttatctttagaaaatgacatttatgaaataaatttatcccagtggaagataatggaaagaattgaaaaccatggccttaagggtctcattttaaaaaatgattgggaatccacaggaaaaattgaaggacaggagagacctcaagaaggatacttcagtagtgtgaaaatgccatctgaaaaggtgtcctcttaccagaaacgcacatctgttactccacatcagagacttcattttgttgataaaccctatgaatgtaaggaatgtgggaaggcgttcagagtgcgccaacagcttacttttcatcacagaattcatactggtgaaaaaccgtatgaatgtaaggaatgtgggatggccttcagacagactgcacaccttactcgacatcagagacttcattctggtgaaaaactctatgaatgtaaggaatgtggggaagctttcatatgtggtgcagatcttagagtacatcagaaaatgcatattggtgagaagccctatgaatgtaaagaatgtgggaaggcttttagggtacgaggacaacttactctgcatcagaggattcatactggtgagaaaccctatgtgtgtaaagagtgtggaaaagcctttagacagtacgcacacctgactcggcatcagaagcttaatagtgctgacaggctctatgaatgcaaagaatgtgggaaggcctttttgtgtggctctggtcttagagtacatcacaaacttcatactggtgagaaaccctatgaatgtaaggaatgcgggaaggcctttagagtgcgacaacaactaacactccatcagagaattcatactggtgagaaaccctatgaatgtaaggaatgtggaaagacctttagccgtggttatcatcttattctccatcacagaattcatactggtgaaaaaccttacgaatgtaaggaatgctggaaagcctttagtcgctactcacaacttatttcacatcagagtattcatattggtgttaagccctatgactgtaaggaatgcgggaaggccttcagactactttcacaactcacacagcatcagagtattcatattggtgagaaaccttataaatgtaaggaatgtggcaaggcctttagattgcgccaaaaacttactctacatcagagcattcatactggcgaaaaaccctttgagtgtaaggaatgtaggaaggcctttagacttaattcatcccttattcaacatctgagaattcattctggtgagaaaccctatgaatgtaaggaatgtaagaaggcctttaggcaacattcacaccttactcatcatctgaaaattcataatgtaaaaatctaagaaagtcttttcaacttctgtgttatagaacattctatgaatgtagtaattaatctattttgctccatacatgcaactgcgttggcattagaggttttataccattaaaagagtgtgacaatgtattgtagtccatcatcactcaaacctgaaacttcagcatatttgttctaaaaactaatcctgttataagaatgaaaaagacatttaccgtcatccctatcccatcactttgtgtcatactggacaagacgcttaactgctctgtgctataattttttaatttatgacatggtcatataagagtgcagcagtttgacacactttcaatcaagaggtggaatctacatccctctgttgtatacaggaatctacatccctctgtgactgcttcgcccagtagaatatggtagacgtactgctgtgctggtttcttgactcagactttactggtagggttacttcatctcatgaaatgacagaactgtcttgttacaaagtctggctactttgctgaagagaccacatgaagaggccctgaaactacgtagagagggagaggcacctgctgaaccctgtcttcttgacatccaccaagataccagacatttgagtgaaattttggatccaccagaccagccaccagctaaatgccagtgagcgacttggtaacctgaactgatgccatgtagaatggaagaattgaccagctgagcccctggcccaaatttctgacccacaaaaacatgagatataataaaatggttgttgttttaagccacgaaaaaaaaaaaaaaaaaa

SEQ ID NO: 1321 - DNA, 518 bp, HOMO SAPIENS
  misc_feature (95)..(95): n is a, c, g, or t
  misc_feature (101)..(101): n is a, c, g, or t
  misc_feature (106)..(109): n is a, c, g, or t
  misc_feature (111)..(112): n is a, c, g, or t
  misc_feature (120)..(120): n is a, c, g, or t
  misc_feature (122)..(122): n is a, c, g, or t
  misc_feature (124)..(126): n is a, c, g, or t
  misc_feature (128)..(128): n is a, c, g, or t
  misc_feature (130)..(130): n is a, c, g, or t
  misc_feature (138)..(139): n is a, c, g, or t
  misc_feature (316)..(316): n is a, c, g, or t
  misc_feature (366)..(366): n is a, c, g, or t
tactaaacttccttctattcttagaataaaccctatataatcagctatttatttaaataacatggtctctgcaatttctcctggtttccattttntctcantaatnnnnanncatttttntntnnnananaaaaatgnntgttcattagtgagacaaaactataattttgtttttttcttctttctctcttccttcctttttaaaatttgtattctccagttttgctaataatgttatacaattttacaagaaaaaagtgagtaggagagctgtttttctatagtaacagattctgtgaaataggtatcatgccangtgaggtggcacgtccctgtagtcccagctactcaggaggtgaagcaganggaccacttgagcccaggaattggagactgtagtgtgctgccatcatgcctgtgtatagcttctgcgctacagcctaggcaacgtagcgagaaccatctcagaaaaaaaaaaaaaaaaaaagagataatctattcctcataatttccttaaa

SEQ ID NO: 1322 - DNA, 331 bp, HOMO SAPIENS
  misc_feature (299)..(305): n is a, c, g, or t
acctgtattcagttttcacaatctctctaacatagtcaaatccacaacctcatactaaagaatgtttttggaaagcacttgatgtccctctctgggctgacagtctactgactgtctaaatgagactcagaaatctgaaagcttggttttcattagctccaaactatcagttcctaaaaaggcttagaggacatggaagacaaaagtggctatcctttgctaggaattatcagaataagtacctaaattaatctctccaggattttttgttttctcttcagcatatgcccaaggtatgnnnnnnntgagcagcctgaagctattctgaatg

SEQ ID NO: 1323 - DNA, 907 bp, HOMO SAPIENS
cttttcttaagggaaaaatcactctgtgttcttttaaaatccctcaggttttatgttttattgctaccagagtctgcctccctgaggttcttgtatagactagttatttccctctgtaaagaagctgttctattcgttctcgcctggtttggaacaaactgaacacttccaaaggaggcagtccttgcagccttgtctccttccactcccctcctccccacagtcctggctggagcagcgagtctgtcgatcccaggccagagacaaggcagacaaaggttcatttgtaaagaagctccttccagcacctcctctcttctccttttgcccaaactcacccagtgagtgtgagcatttaagaagcatcctctgccaagaccaaaaggaaagaagaaaaagggccaaaagccaaaatgaaactgatggtacttgttttcaccattgggctaactttgctgctaggagttcaagccatgcctgcaaatcgcctctcttgctacagaaagatactaaaagatcacaactgtcacaaccttccggaaggagtagctgacctgacacagattgatgtcaatgtccaggatcatttctgggatgggaagggatgtgagatgatctgttactgcaacttcagcgaattgctctgctgcccaaaagacgttttctttggaccaaagatctctttcgtgattccttgcaacaatcaatgagaatcttcatgtattctggagaacaccattcctgatttcccacaaactgcactacatcagtataactgcatttctagtttctatatagtgcaatagagcatagattctataaattcttacttgtctaagacaagtaaatctgtgttaaacaagtagtaataaaagttaattcaatctaatttttctctgtggaaaaa

SEQ ID NO: 1324 - DNA, 411 bp, HOMO SAPIENS
  misc_feature (103)..(104): n is a, c, g, or t
  misc_feature (153)..(153): n is a, c, g, or t
ttccttgaaatgctcttctgaaaatgataaatgctaaaactgattacaatgctattgaaagtggatgagcaagttgatctgctgagatgtgaaaacaaattcnnttttaatttttaatctaaaatattagaaagaattttgtttcctatactntgctatatttagtaaatatacactaatataagaattttgctttactaaaacagtagaaccctcagttagccaggcagtcatcatctgtcacataaaaggtgtcctgaggaggaatgggagtgcctcccctggggaagaggctgatggtggctctggctctcagtcagtcgctttccttatcttggtatttactgtcatttatctgggcttagctaaacagatttatagagaattaactctcacaaaatgggaacataa

SEQ ID NO: 1325 - DNA, 5261 bp, HOMO SAPIENS
cgagggccagcttggtggagcttagcacagcttgctcggcgctgcgagcgggcgggggtggacactgggcttctgtgtgccagtcgcagccgttggctggcgggcacccaatcccagggcatgccgccggagcctggccaggacgcacggtgaaagacgagtttggtggcaggcttgaccccccggctgccagcagaagccggcgtcgggagcccaggcgggcaggccgctggggtcggggctgcacgtacgagagccgggacgcccgggttcagagcgaaggaggaggcatggcttcggtgttcatgtgtggcgtggaggacctgctgttcagcggcagccgcttcgtatggaacttgaccgtgtccacgctgcggagatggtacacggagaggctgcgggcttgccaccaggtgctgcggacgtggtgcgggctgcaggacgtgtaccagatgacagaaggcaggcactgccaggtgcacctcctggatgataggagactggagctgctggttcagcccaaacttctagcaagagagttgctggacctagtggcttcacatttcaacctgaaagaaaaggagtattttggaataacattcatagatgacacaggtcagcagaactggctgcagttagatcaccgagttcttgaccacgatttgcccaagaaaccaggcccaaccattttgcactttgctgtgaggttttacattgagagcatatcgtttttaaaggataaaaccaccgtggagctgtttttcctgaatgcaaaggcctgtgtgcacaaggggcaaatcgaagtagagagcgaaaccatcttcaagttagcagcgtttattttacaggaagccaagggagattataccagtgatgaaaatgccaggaaagatttaaagacattaccagcctttccaaccaaaactcttcaggagcatccatcccttgcctactgtgaggacagggtaattgagcattatttgaaaatcaaaggtctcactcgaggtcaagctgtggttcagtatatgaaaatagtagaagctctaccgacttacggtgtccattattatgcagtaaaggataagcaaggacttccttggtggcttggaataagctataagggaattggccaatatgatatacaagacaaggtgaagcctcggaagttattccaatggaaacagctggagaacttatatttccgtgagaaaaaatttgctgttgaagttcatgatccacgaaggatttcagtttcaagaagaacctttgggcaaagtggcttgtttgtgcaaacatggtatgctaactcttctctcatcaagtccatttgggtaatggcaattagtcagcatcagttttacttggaccggaagcaaagcaaagcaaaaattccttcagccaggagtttagatgagattgcaatggatttgacagagacaggaacacaaagggcctccaagctggtgacactggaggcgaaaagtcagttcatcatggcaagtaatggcagtttaatctcctcaggttctcaagactcagaagttagtgaagagcaaaagagagaaaaaatccttgaactaaagaagaaggagaaactattacaagaaaaacttctgaaaaaagttgaggagcttaagaagatctgtctgcgggaggctgagctcacaggcaaaatgccaaaggagtatcccctgaacataggcgagaagcctcctcaggtcagaagacgtgtgggtactgcgttcaaattagatgacaacttgctgccgagtgaagaagatcctgctttgcaagaactggagagtaattttctaatacaacaaaagctggtggaagctgcaaagaaacttgccaatgagccagacctttgtaaaactgtgaagaaaaagcgaaagcaagattacacagatgcgatgaaaaagcttcaggagattgaaaatgcaataaacgaataccgaattaggtgtggaaagaaacccagccagaaagcaacagtgttaccagaagacataatcccctcagagagtagctctttgtctgacaccaccacctatgatgatcccagtgatgccttcacttttcctgggcagcgatcaagttcagtacctcattctccaagaattcttccccccaagtctcttggtattgagcgaatccatttcagaaagtcgtccatcaatgaacagtttgtggataccaggcagtccagagaaatgctgtccacacacagcagcccttacaaaactctggagaggcggccccagggaggacgaagcatgcccaccacgccagttcttacccgaaacgcctacagcagcagccacttggaacccgaatcttcatctcagcactgccgccagcggagtggaagcctggagtcccagtcccacctgctctccgagatggacagcgataagccatttttctccctctccaaatcccaaagaagcagcagcacagaaatcctcgatgacgggtcttcttatacaagccaatcaagcacagagtattactgtgtgacaccagttaccggcccctattacaccacccagaccctggacactcgcaccaggggtcggaggaggtcaaagaaacagaatgtttctacttcaaattcaggaagcatgcccaacctagcacaaaaggatagtttgaggaatggtgtttactcaaagagtcaggagccaccgtcttccagttactacattgccgggtacacaccctatgcagagtgtgacttttattacagtggtggttatgtctatgagaatgacaccgagggacagtatagtgtcaacccttcctaccggtcctcagcccactatggatatgagcgccagagggactacagcagatcctttcacgaagatgaggtcgaccgggtaccccataacccatatgcaactctccggctgccaaggaaggctgctgcaaaatcggagcacatcaccaaaaacatccacaaggccttagttgccgagcacttgcgtggctggtaccagcgggcctctgggcagaaggatcagggacacagcccgcagaccagctttgactcagacaggggatcacagagatgcctggggtttgcggggctgcaagtaccttgttctccaagcagtcgtgcatcctcgtactcttcagtgtcttctacaaatgcttctgggaactggaggacccagttaaccatagggctgtcggattacgagactccagcacattcttcttacaccagctgctatggcaatgtctataatcctttaccctctccaagcagacaatacacagaaatcagtcaactggatggtacagatggaaaccagctggaagacaacctggagagtagtgagcagagactcttttggcatgaagattcaaagcctggaacattagtctgaactgcagttggacctcctgaccaagcactgcgttctcacactagtgtgccttgcaaattgtatttgtcttccgagaggatgttcgttttagaaacctaaagacatcaaaggttgaagagaagacttagttgccctggaagtgaatcagtgaatcacacaccaagccccacaaagcccctaaaggaggatttggcctttcaaactctaggcactaacgtaactgtagggtctgcccacatgttgaagtattgccaagagaggactcagtgtgaagccttcatcaatagcaagcactttttaagggagtaaaagttgttaaaggcaaacctcaaaaacatgaaagggcattcaggatgtcccatggcaataagaacaggggaaatctcagagcacaattcagcaggatgagagaaggggaaccagaagctccggagtcattgctcacttcagagtttgaattcgtgagctgacaaagagtaacatgctctttctacacagacatggacaatttagacagtattggaaaattacttgaagctggattttcatgaagttctgaatgagtgtaaatgttttttaggatactataaagagtgatgtttttcataagcaccataaaatgggttctggaaaaactgattaccttagcatcctgtaatataacttatggtagcagattggggaaaatgaagcagcccactgaataattgacaaagtctgcttggagaacattctaaggtacaatatcatggagctcctttttcctttctccactaattgcgtgatgagctattgttctggctgttaattctccaactcggctgtcatttgaagtggcagacttaatatggaaagtttttataattatgagtttgaaaaagcattttaagatgatacagaaagtatccaaaacaacagaaaaaaaaagccacgtcattttagatgaattgcgtgccttaaaatggtgaacgttagaaaattaaacaagtctggattccacaagtagttccaagtcaccaagtgacaaaaacaaggttaacattaaaaaagaaaaacaacaacaacgacaaaaagctccaagctgcagtggatttaattatgaggctaaaactacctcatactttccttggaagaactaattagctatggtttattgtagggttttgtttgtttgttttttaaagcaaatgatttccatattccagattgatcttttttgtcatctttgcttcaaaattacataaaaggtgctcctttcccccttcttttatacaagtttcttgttcatattgtgaatagaaaagtttctgaacaacttttttggaacattttctatctatattccaaagcatgtaatatatacataaaaacgatttgttaaactggtccttagtcatttgtataattagaaatgaagtttgggaaaaaattttggaaaaaagacaagcaaaaaaaaataacttattccttttttgcatatttgtatagccttctagaatcagaaataacctttttgcatattcttttattgttctgacttttcaagacctattatttttttacataggtcaataaacaaaaggtgtgctactgaaaatgtttacgttttcttccatttatgtcaggggttcatgtgaagcaggtcgcagtgctctacttcaagtaatcatattgggcaaggcttcggatttttatttatagtattaccgtattttattaattccgggatgtacatttttaaatatttacattaaaaacatggttcatctttttattgatggcatattctacttgaattggcagttttttcttaatagtacattaaaaataatgctgtgtcttacaataaagttgccttagaattga

SEQ ID NO: 1326 - DNA, 3966 bp, HOMO SAPIENS
gcgccccgcgcccgggccccggcgatggtgacacatgcggcggcggcgcgccggcggcaggaccatggttgagcgcgccagcaagttcgtgctggtggtggcgggctcggtgtgcttcatgctcatcttgtaccagtacgcgggcccaggactgagcctgggcgcgcccggcggccgcgcgccgcccgacgacctggacctgttccccacacccgacccccactacgagaagaagtactacttcccggtccgcgagctggagcgctcgctgcgcttcgacatgaagggcgacgacgtgatcgtcttcctgcacatccagaagacgggcggcaccaccttcggccgccacctcgtgcagaacgtacgcctcgaggtgccgtgcgactgccggcccggccagaagaagtgcacctgctaccggcccaaccgccgcgagacttggctcttctcccgcttctccaccggctggagctgcgggctgcacgccgactggaccgagctcaccaactgcgtgcccggcgtgctggaccgccgcgactccgccgcgctgcgcacgcccaggaagttctactacatcaccctgctacgagaccccgtgtcccgctacctgagcgagtggcggcatgtgcagaggggtgccacgtggaagacgtcgttgcatatgtgtgatgggcgcacgcccacgcctgaggagctgccgccctgctacgagggcacggactggtcgggctgcacgctacaggagttcatggactgcccgtacaacctggccaacaaccgccaggtgcgcatgctggccgacctgagcctggtgggctgctacaacctgtccttcatccccgagggcaagcgggcccagctgctgctcgagagcgccaagaagaacctgcggggcatggccttcttcggcctgaccgagttccagcgcaagacgcagtacctgttcgagcggacgttcaacctcaagttcatccggcccttcatgcagtacaatagcacgcgggcgggcggcgtggaggtggatgaagacaccatccggcgcatcgaggagctcaacgacctggacatgcagctgtacgactacgccaaggacctcttccagcagcgctaccagtacaagcggcagctggagcgcagggagcagcgcctgaggagccgcgaggagcgtctgctgcaccgggccaaggaggcactgccgcgggaggatgccgacgagccgggccgcgtgcccaccgaggactacatgagccacatcattgagaagtggtagtggcggtggtggccacggggaggcctcttggggggtgtgggggataaaacaggacagacgacaggtccacccaagactgtcaagggatgagcatcccaaacctgctccacagaggtagctgcgtcctgaaaaaaaacagagcagggatgtagtggggctgggcagggatgggggcttgagaaatcaacaggtgcagcccagtgggtcagaggaaagcgtgctcgaaggatgccatggtcagggcagggcctccagagcaggtgttgtgcctggagctgctctcctggcctccttggatttatcgcaaaaactgaaggtttgcgcaagagacgaggacagcggaaagtggacctgccaggccgggagtgtgtccctcaccaactatgcacacagcactcgctcttagctcctctgtccgggctactaggagtgagaccagcttctggcaactgccccagctccaggccatcccatagcccctcctcttctggctgcccccaatgccccgaggcctggggagcccccagctcacccatctgtagctccctcaaagtcagggcccaccccatctgaggcagagaagactcgagtccagcccccaggaagcctgctcccctctctggcccatggtcctgcttcatgctttgggtcaggaggccaaagctgatgttcaggccccacccactccctacagtcctcagaccaaggaggggtttgggtagtaggcccgagctgcattgccggccttcctcgggccaactggcagcccaggagtggggaggctttggccagggatgctgccacttgtgcgtgagtccgcggctggcccttggaggtgaccatccaggcaggcctggctcagactggaagggctggggaccgagggctcccctgcctctgttctcctttctgacccactgggatttgctagcaggctgccccagccccatcaccgaaacacatactcaagagctcaaataccactgctcccaccagcgtacggattaagttcatcaggcttccatcggctggagcatgggaccatagcccctgcccaggagccgtaccctcggaccacagtggctctgtatggccaggaactgggactcgagctttcagattctcaactagccttggcaaaacagctgtaggtggcctccctgacaacagacactcagccctccccaccctggctctccttgcatttccccatgctccccaccccctggcaaaaggctggccatgctctgttcccagcagccgcgcaggtttccccactggctgcaatggccctaccaaaagccatgttgcatatccgttgtaagcacgtgccctgtgccctgtccccattccttatgccctaggaggccaagctggtgtctctaggagggcccacacaggcaccctggatcccccagagagtagattggtgtgctcaggccgcaggctgactcagaggtagggcagtgggctctgcaggccacctggctggggttggtgggggtcctctctcctgccccagcttccactcagccaccacagttgccacaccatggggtggagacgtgggtcaccacgggcttgggagcaagcgccttctgcagcacaggaagccgaagctggggtcaggtgaggtcgctacccctggaggtctggcataagggccccaccctcaggtctcctacactggccccattttactttggggtccaaggacaggatggtcaacagggcagggtggacagcgtgccagcgccgcgcagggccacctccctgggtggatgcatcacactaaggaagtgagtgccaaggggatttagtggtgtggttctttcaaagggaggtcagggtcaatgggaatctgctcggacactcaacatgggggtgggtgcactccttggaggaggaggaacacgttcaggggattgtgaggtcttgcacaagccacgtggggcaccttggcttcccggcaggaggtggacacccagccagaggcctggctcaaggtgacctcaccttcaccatgggcttcctgggtgcgcgggcctgagcgcaggttgttttgtacatattggaatatgtgttaacttatgccccgcatcccaactcacacggaagcacgggtcttgtctcagtctcttcgctgcatttggaaagcagtctcctctcgggccagcgccgggctgaggtgtccagaggcggcggcagctggcagtgccctcagcccccaagtgtccagcctggcacttcccattcaggccacctgctttgggtcaacagttcctttgccagcagcatctcctaaattgtaaggactctgtccaccggggccctcccagggctgtgaggacggaaacaggcagggagtggagctaacagcttagtcaccaggacccccagacctgcaaacgtcccctcctggaaggggaagccaggaacagcagaactgcccacaaaacaaggctgtgaacttttcgggaactggaactgtttaacttgaacccaggattgtttaaagctttatttatttatagcttcttcttaaaaaaaagtgttgaagaaattttttggttattcatacaaaaaaatgagttgatgatggaaaagcaagtcataatcatctaattgtttttgtctaggtcgagaatgaatgttagctgatgaaataaaccctgacaaggaaaaaaaaaaaaaaa

SEQ ID NO: 1327 - DNA, 2790 bp, HOMO SAPIENS
atgtgcgagagttactccaggtcgttgttgagggtctcggtggcgcagatctgccaggcgctgggctgggactcggtgcagctcagcgcctgccacctcctcacggacgtgctgcagcgctatctgcagcagctgggccggggctgccatcggtactctgagctctatggccgaacagacccaattttggatgatgttggtgaagctttccagctgatgggggttagtctacatgaactagaagactatattcacaacattgagcctgtcaccttcccacaccaaattccgtcatttcctgttagcaagaacaatgtacttcagtttcctcaacctggaagtaaagatgcagaggaaagaaaagaatacattcctgattacctgccacccattgtgtcttctcaagaagaagaagaagaagagcaggtgcccactgatggaggcacatcagcagaagccatgcaggttcccttggaagaagatgatgaattggaggaggaagaaattattaatgatgagaatttcctgggcaagagaccactggatagtcctgaagctgaagaactgccagccatgaagcggcctcggctattaagcactaaaggggacacgctagatgttgtgttattggaagctcgagagccactcagctcaataaatactcaaaagatcccaccaatgctttctccagtccatgtacaggacagtacagacttggcacctccctcacccgagccgccaatgttggctccagttgcaaaatcacaaatgccaactgcaaaaccattagaaacaaagtcatttacacctaaaacaaagactaaaactagctctccaggacagaagactaaatcacctaaaaccgcccagtcaccagcaatggtcggaagtcctattcgatcaccaaaaactgtatccaaagaaaagaaatcacctggacgttccaagagccccaagagtcccaagagccccaaggtcacgactcacattccccaaacacctgtgagacctgaaacgcccaacaggactccttcagctacactcagtgaaaaaatcagtaaagagactatccaggtaaaacaaatacagacaccccctgatgctgggaaactgaacagtgagaatcagccgaaaaaggctgtggtagcagataaaacgattgaggcctctatcgatgctgtgattgcacgagcctgtgctgagcgagagccagatcctttcgaattttcttctggatcggaatctgaaggagacatttttactagccctaagagaatttcaggcccggagtgtactactcccaaagcttccacttccgcgaacaatttcacaaagtcaggatccactcctctgcctctttccggtggaacctcaagttccgataactcatggacaatggatgcctccattgatgaggttgtacgtaaagcaaaactgggaacaccttcaaatatgccccccaactttccttatatctcttctccgtcagtgtctcctcccactcccgaacctctccacaaggtgtatgaggagaaaaccaagctgccttcctccgtggaggtaaagaagaagttgaaaaaggaactaaagactaaaatgaaaaagaaagaaaagcagagagatagggagagggaaaaagacaagaacaaggacaaaagtaaggagaaggataaagtgaaagagaaagagaaagacaaggaaactggcagggaaacaaagtatccctggaaggaatttcttaaagaggaagaggcagatccctacaagtttaaaatcaaagaatttgaagatgttgatcccaaagtgaaattgaaagatggacttgtgaggaaggagaaagagaagcataaagataagaagaaagatagagagaaaggcaagaaagataaagataagagagagaaagaaaaagtgaaagataaaggcagagaagataagatgaaagccccagcacccccactggtgttgcccccaaaagagttggccctgcccttgttcagccctgccacagcctccagggtcccagccatgctgccatctttgttgccagtgcttccggaaaaactgtttgaggagaaagagaaggtgaaggagaaagaaaagaaaaaggacaaaaaggagaagaagaaaaagaaggaaaaagagaaggagaagaaggagaaggaaagagagaaagagaagagagagcgagagaagagagaaaaagagaaggagaaacacaagcatgaaaaaataaaagtggaaccagtcgctctggccccgagtccagttatccccagattaactctccgagtcggtgctggccaagacaagattgtcatcagcaaggtggtccctgcccccgaggccaagccggcgccctcgcagaacaggccgaagaccccaccgccggcccccgcgcccgcccccggccccatgctcgtcagccctgcgcccgtgccgctgccgctgctcgcccaggccgccgcgggccctgccctgctgccctccccgggtcccgccgcctccggggccagtgccaaagcccccgtgcgcagcgtggtgactgagacggtcagcacctacgtgatccgagatgagtggggcaatcagatctggatctgccctgggtgtaacaagcctgacgatgggagtcccatgattgggtgtgacgactgcgatgactggtaccactggccctgtgttggaatcatgactgcacccccagaagagatgcagtggttctgccccaagtgtgcgaacaagaagaaggacaaaaagcacaagaagaggaagcatcgagcccactga

SEQ ID NO: 1328 - DNA, 3229 bp, HOMO SAPIENS
atttttactgccagctttcaagttggaagagggaaattacgtttaaaggtcagcagatgacagatggattttcacaatttggaaataaaaacatgagtgaagggttcggaaggcaagtctctggtccattacacacttccagaaaaacttagtacccagagactcacattactgggagtgctatctactcacaagtgttgcactccattgagaaaaaaaaaaaaaccaggaagttgctgttctactgaggactgaccaagaagccatgaaataccttactgtgggagacttagaagattgcctactgaataaggtggacttgaggcgccagcagatttcccaggctgtggaggaggtgcagaaagtcgttcatcatttgaccacaaacatcagcaaccaagacattagatttcaagctgtgccttactctgacacgtacaatgaaaatattaaggttttggctcccagtcagttcctcgtcacagtcccaataaaaggcctggccgggtacagggaggccagggagcagcactggcggtactacacactgcagggcaccaggctgccctgcccgttgcgggaccctgagggtctgcagcagtggctggaggtggaacagtttatgaagagcctgtggcagtggcatgagacagatgtgaacatcgacggagacattgtgcctgccaaggtcctcctagtgttccggaagctggtggaaaatgcagttagaacctgtcacctctcaggtaaggtcagcctgctaggaaaccgctctgcagtttgggttgctgtggaaacatctgcatatcaggtggaactggagctggtccccgcagtggagatccccaccacctggtccaagaaagcccggtggcctcgatgtctgcagcgctggccttcccaagagagagtggagtgcatcaagtcgtttggatttaacttgttggcctgttcaaattatcactggcagctgagcttcctccgtgctgagcaggtgttactggaacagctggatgaagatgggggctgccgtaggaagtgttttcaggtcatgaggcacctgaaggaggacatctggtgcccagggaacaggccggttatcacgtcccaccatctgcagactgtgctcttttggacctgcgagaaatatccccactttaaagactggcaggtcttcagcaaagcatttctgcgcctggtgaggaaactgcacaagtgcgtgagccagcacttcctgaaacactatttcgtccggaacagcaacctctttcagtgcaccaacccgactgaactggacactgtggcccaaaagctggccaccttcctgaagaacccccagatcggcccgccctgatggttgccccggcctgggaggctcttggacattttattctggcttaacattgttctttggatggttcctcagtcaggtgccaggatcctgcctaggagaaaggccacgaatggcagcggaaattacatcaaaccagaaacacttcagcagggggaaaactgtgccccaggatgtctggcccaggcctccctggagcccagcaagcatttctgccctagctaattctcctggagacagctctcatcaggcttccccaggcacagatttggaactggtgacagttctgaacttagtttcccttgttcaggctgtgatcgtctcacagtgaagatggagacagaacccctggaagtctggacatgagcctgctggccaatactgtgcccagcccactgatcatgggcacattctcctgccatttgtaaaatgggaatgttaacgtgcctacctctgagcagggctgtgtgcctatgaaactgtgctggcgccttttcaaggggaaggcattggatcaacacaaagtgttcctggttggttgagtagctggtgtttgcatcctggatcggtacccacagcactgacgcaaaattgcacctgatgagttagtgagcctgtgcttccttgctgccctccagcttccttagcatgtgggtcagtggctcctgatgttctgtctgcttcgctggtattctctaagcagggaggggaatggttttgatgataagtgtaagtcaaagatgaaagtacaactcttggcctgatcccaaccatagccctctctttgcttcccatgccatgggccatggatggaacttccttatatatttatgtaaataacctagtactatgatctgcatggagtgaccttaggtgtctgtcactgctcagtgtgttcctttgctcacttcattcactcactcactcattgacaaataatgctcattaggcaccgggaacacagcaaagagcaaagtggatgaggacctccccctggggatgccacctaatggtggagacaagaaatgaacgacagataaacacgcacagttattacagatggaagcaagtgcttcaaaggaaataaacagaatgttgaagtagagtccacagaaaggtccccgaaggatgaaaatgcaaatagctgaaggggaaggaaaagtgaccaaaggcaggcatggtggggctggcatgagtcagagcacctggccttgtaaagccaggaaggaatcagtattttattctaagatcaaaggtgtgacatttggcctctccagaagcagaagagtatcacgatctgactgcattttaaacaattgttctggtaactgcatgaagaaggtctggggactcacacaggagctgggcactgagtgctcttgagccacccatttggaatttcacagaggcccacaaggcaacatattctgtgtggcacaaccgatcaggaattctaggagttctcggtgagatcaatggtttttttctggcgtttatgtaatgcttctcaactcaaggggctcctttattacttttgaatgtttttgcccaaatgtctataccaaagataaatttctaaagcatgaactactgattttgttttcatgaaaattcacatttgaaaatgaaaatgattacttttcaaaagtactgtaaacggcaggaaagatccaaaattgacaccctaacatcacaattaaaagaactagaaaagcaagagcaaacacattcaaaagctagcagaaggcaagaaataactaaaatcagagcagaactgaaggaaatagagacacaaaaaacccttcaaaaaattaatagatccaggagctggttttttgaaaggatcaacaaaattgatagactgctagcaagactaat

SEQ ID NO: 1329 - DNA, 2361 bp, HOMO SAPIENS
gacaccactggccgcgaagcgcagggggggcgcgcgcgctgccgcccgttcccagcacttgtgcagactcctccggggaagagcggcctccgcggtcatctccaacggaattctgcctttgaagtgtcggggcacggcgcgtcgagggtcctggcggccaggcggggcgtgtgcaagggtcgcgtcccccccccgggcccccggcccgtggctcttggtagagcccagtgcttcatttcccgtgcgcggcccgggcggccctccctttcatcagtcttcccgcgtccgccgattcctcctccttggtcgccgcgtccttggctggcgtgaggccaaagcaaaatgaggagcgggaaggcctcctgcaccctggagaccgtgtgggaagacaagcacaagtatgaggaggccgagcggcgcttctacgaacacgaggccacacaggcggccgcctccgcccagcagctgccagccgaggggccagccatgaatgggcccggccaggacgaccctgaggacgctgatgaggcggaagcccctgacggcggcagcaggcgtgatcccaggaagagccaggacagcaggaagcccctgcagaaaaagaggaagcgctcccccaagagcgggctcggccccgcggacctggccctcctgggcctctcggccgaacgcgtgtggctggacaagtcacttttcgaccaggcagagagctcctaccgccagaagctggcagatgtggctgcccaggcagcctggcctcctgccttggccccttggggtctctgcacccatggaaaccaggtggcctgccaccacgtgacctgggggatctgggtcaacaagtcctccttcgaccaggctgagcgggccttcgtggagtggtctcaggccctgttgctggcccccgacggcagccgcaggcaggggactcccaacacaggccagcaggtggccgtccccgacctggcccaccagcccagcccaccggtcaatggccagcccccgctgggcagcctgcaggcactggttcgggaggtgtggctggagaagccccggtatgatgcagccgagaggggcttctacgaggccctgtttgacggccatcccccagggaaggtgcgcctgcaagagcgagccggcctggccgagggtgcccggcggggccgcagagaccggcggggccgcaacatcttagggaacaagcgggccgggctgcgacgggccgatggggaggccccctctgccttgccctactgttacttcctgcagaaggatgcagaggccccctggctcagcaagcctgcctacgacagcgccgagtgccgccaccacgctgccgaggccctgcgggtggcctggtgcctcgaagctgcctccctgtctcaccgacccggtcctcggtctggcctgtccgtgtccagcctgagacccaacagaaaaatggctacaaacttcctagcacatgagaagatctggttcgacaagttcaaatatgacgacgcagaaaggagattctacgagcagatgaacgggcctgtggcaggtgcctcccgccaggagaacggcgccagcgtgatcctccgtgacattgcgagagccagagagaacatccagaaatccctggctggaagctcaggccccggggcctccagcggcaccagcggagaccacggtgagctcgtcgtccggattgccagtctggaagtggagaaccagagtctgcgtggcgtggtacaggagctgcagcaggccatctccaagctggaggcccggctgaacgtgctggagaagagctcgcctggccaccgggccacggccccacagacccagcacgtatctcccatgcgccaagtggagcccccagccaagaagccagccacaccagcagaggatgacgaggatgatgacattgacctgtttggcagtgacaatgaggaggaggacaaggaggcggcacagctgcgggaggagcggctacggcagtacgcggagaagaaggccaagaagcctgcactggtggccaagtcctccatcctgctggatgtcaagccttgggatgatgagacggacatggcccagctggaggcctgtgtgcgctctatccagctggacgggctggtctggggggcttccaagctggtgcccgtgggctacggtatccggaagctacagattcagtgtgtggtggaggacgacaaggtggggacagacttgctggaggaggagatcaccaagtttgaggagcacgtgcagagtgtcgatatcgcagctttcaacaagatctgaagcctgagtgtgtgtacgtgcgcgcgtgcgtgaggccctgccacgattaaagactgagaccggcaaaaaaaaaaa

SEQ ID NO: 1330 - DNA, 6038 bp, HOMO SAPIENS; identical to SEQ ID NO: 720

SEQ ID NO: 1331 - DNA, 9725 bp, HOMO SAPIENS; identical to SEQ ID NO: 631

SEQ ID NO: 1332 - DNA, 507 bp, HOMO SAPIENS
tacagagggccgacttcttctatatatgggtcctgcagggtaactgtggaactttaatgtctgtggatttttgtatccatgggcagccctgaaatcaatccccctgttccaagagacagttgtacttaacaaccaatcaaaggtaaacaagttttttgatgcagatcagaagtctgtgttataatatttttctaattccctcctttttcagcctcatttttcactgagagaagcatttaaacttcattatgcaatactgtctggaatatcaaaacactgataaaacttacagatttttccaggatagcacgagctggaaaatcaatttctaaaacatctttcaaattttgtaacacactattttctggatccctgaaagcatggggaaaaaaattatgctgtgaactttgtaaaatcaccaaaaagtaaaaattatattgccaaggtacctaccacaaatgtatgttcctgctcagcttaattcccaggggttttaccacttcagat

SEQ ID NO: 1333 - DNA, 9917 bp, HOMO SAPIENS; identical to SEQ ID NO: 272

SEQ ID NO: 1334 - DNA, 3208 bp, HOMO SAPIENS
agatattcatgaaccgttgcttcttccagcctcgccttctcgctccctctgcctttctggcgctgttctccctccctccctctggcttctgctctttcttactccttctctcagctgcttaactacagctcccactggaacttgcacaatcaaaaacaactctcctctctcaagccgcctccaggagcgcatcacctggagaagagcgactcgctccccgcgccggccgcggaagagcagccaggtagctgggggcggggaggcgtacccttctcccgctcggtaagagccacagcatctccccggagattggccgtatcccaccgtccggcccccagggtcctgcagcggtgatgcatatgtttcggagcaatgatggaaggagaaaagccgctgtcggtggcaactgaaagtggggagaggttgctgcagtagctggtgctgcagaatgcgcgagtgaagaactgagccccgctagattctccatcccgctcagtcttcattaactgtctgcaggaggtaaaccggggaaacagatatgcactaaccaggcgggtgccaacctggatctataactgtgaattccccacggtggaaaatggtaaacaaagacatgaatggattcccagtcaagaaatgctcagccttccaattttttaagaagcgggtacgaaggtggatcaagagcccaatggtcagtgtggacaagcatcagagtcccagcctgaagtacaccggctcctccatggtgcacatccctccaggggagccagacttcgagtcttccttgtgtcaaacatgcctgggtgaacatgctttccaaagaggggttctccctcaggagaacgagtcatgttcatgggaaactcaatctgggtgtgaagtgagagagccatgtaatcatgccaacatcctgaccaagcccgatccaagaaccttctggactaatgatgatccagctttcatgaagcagaggaggatgggtctgaacgactttattcagaagattgccaataactcctatgcatgcaaacaccctgaagttcagtccatcttgaagatctcccaacctcaggagcctgagcttatgaatgccaacccttctcctccaccaagtccttctcagcaaatcaaccttggcccgtcgtccaatcctcatgctaaaccatctgactttcacttcttgaaagtgatcggaaagggcagttttggaaaggttcttctagcaagacacaaggcagaagaagtgttctatgcagtcaaagttttacagaagaaagcaatcctgaaaaagaaagaggagaagcatattatgtcggagcggaatgttctgttgaagaatgtgaagcaccctttcctggtgggccttcacttctctttccagactgctgacaaattgtactttgtcctagactacattaatggtggagagttgttctaccatctccagagggaacgctgcttcctggaaccacgggctcgtttctatgctgctgaaatagccagtgccttgggctacctgcattcactgaacatcgtttatagagacttaaaaccagagaatattttgctagattcacagggacacattgtccttactgacttcggactctgcaaggagaacattgaacacaacagcacaacatccaccttctgtggcacgccggagtatctcgcacctgaggtgcttcataagcagccttatgacaggactgtggactggtggtgcctgggagctgtcttgtatgagatgctgtatggcctgccgcctttttatagccgaaacacagctgaaatgtacgacaacattctgaacaagcctctccagctgaaaccaaatattacaaattccgcaagacacctcctggagggcctcctgcagaaggacaggacaaagcggctcggggccaaggatgacttcatggagattaagagtcatgtcttcttctccttaattaactgggatgatctcattaataagaagattactcccccttttaacccaaatgtgagtgggcccaacgacctacggcactttgaccccgagtttaccgaagagcctgtccccaactccattggcaagtcccctgacagcgtcctcgtcacagccagcgtcaaggaagctgccgaggctttcctaggcttttcctatgcgcctcccacggactctttcctctgaaccctgttagggcttggttttaaaggattttatgtgtgtttccgaatgttttagttagccttttggtggagccgccagctgacaggacatcttacaagagaatttgcacatctctggaagcttagcaatcttattgcacactgttcgctggaagctttttgaagagcacattctcctcagtgagctcatgaggttttcatttttattcttccttccaacgtggtgctatctctgaaacgagcgttagagtgccgccttagacggaggcaggagtttcgttagaaagcggacgctgttctaaaaaaggtctcctgcagatctgtctgggctgtgatgacgaatattatgaaatgtgccttttctgaagagattgtgttagctccaaagcttttcctatcgcagtgtttcagttctttattttcccttgtggatatgctgtgtgaaccgtcgtgtgagtgtggtatgcctgatcacagatggattttgttataagcatcaatgtgacacttgcaggacactacaacgtgggacattgtttgtttcttccatatttggaagataaatttatgtgtagacttttttgtaagatacggttaataactaaaatttattgaaatggtcttgcaatgactcgtattcagatgcttaaagaaagcattgctgctacaaatatttctatttttagaaagggtttttatggaccaatgccccagttgtcagtcagagccgttggtgtttttcattgtttaaaatgtcacctgtaaaatgggcattatttatgtttttttttttgcattcctgataattgtatgtattgtataaagaacgtctgtacattgggttataacactagtatatttaaacttacaggcttatttgtaatgtaaaccaccattttaatgtactgtaattaacatggttataatacgtacaatccttccctcatcccatcacacaactttttttgtgtgtgataaactgattttggtttgcaataaaaccttgaaaaatatttacatataaaaaaaa

SEQ ID NO: 1335 - DNA, 15025 bp, HOMO SAPIENS
cggcggcagtggcggcaccgcctcctcctcacattcccggggtggcggggttagatgagcggccccagtagcggcgagggcggcgcgggggggaggaggagaagaaggaggaggagaaggaggtcgctgtctttgtagtctccctgctgcgggagccagaggccgccgccggagccgtcgtcgttggaaaagggctgtgtgtgcgcgcgcgtgtctgcccgcccggcccgcggggacgaggcggcggcggcggcggcggcggcgaggatgatgatgtgcgcagcgactgcctcccccgccgccgcctcctcggggctcggcggggacggattctacccagccgccaccttctcttcctccccggcgccgggggcgctgttcatgccggttcccgacggctccgtggctgctgcggggctggggctggggctacccgccgcggactcccggggtcactaccagctgctgctgtcaggccgggccctggccgaccgctaccggaggatttataccgctgcgctcaatgacagggaccaggggggcggcagcgctggacacccagcctccaggaataagaaaattttaaataagaagaaattgaaaagaaaacagaagagcaaatcaaaagtgaagacaagaagcaagtctgaaaacttagagaatacagtaatcataccagatatcaaactacatagcaatccttctgctttcaatatttactgtaatgtacgccattgcgttctggaatggcagaaaaaggaaatatcattggcagccgcatctaagaactctgtgcagagtggagaatcagatagtgatgaagaagaggaatccaaagagccccctatcaagcttccaaagattattgaggttggcctttgtgaagtttttgaattgatcaaagagacacgattttctcatccatccctgtgtctcaggagtctccaagccctgctcaacgtgctgcagggccagcagccagaaggcctccagtctgagccacctgaggtcctagagtctctcttccagcttcttttggaaatcaccgttcgaagtactgggatgaatgacagcacaggacagtccttaacagcactttcctgtgcttgcctctttagtctggtggcttcttggggagaaacaggaaggacacttcaggccatctctgctatcctcaccaacaatggaagccatgcttgccaaactattcaggtgccaacaattctaaattcgctacagagaagtgtacaagcagttttggtgggaaaaattcaaattcaggactggtttagtaatggcattaagaaagcagctttaatgcacaagtggccattaaaagaaatatctgttgatgaagatgaccaatgtctacttcagaatgatggattttttctttatctattatgcaaggatggattatataaaataggctctggatacagtggaacagttaggggccatatatacaattctacatcccgtattagaaacagaaaagaaaaaaagtcttggttagggtatgctcagggttatttattatatagagatgtgaataaccacagcatgacagccataaggataagccctgaaacactggagcaagatggtactgtgatgttaccagattgccacactgaaggtcaaaatattttattcactgatggagaatatattaatcagatagctgcttcaagagatgatggctttgttgtcagaatatttgccacaagcactgaacctgttctacagcaagaattgcaacttaaactggctagaaaatgcttacatgcctgtggtatctcactattcgatctggaaaaggacttgcatattataagtacaggatttgatgaggagtcagcaattcttggtgcaggacgagagtttgcgctaatgaaaacagcaaatggaaagatatattacactggcaaataccagagtcttggaatcaaacaaggtggtccttcagcaggaaaatgggttgagctaccaattacaaaatctccaaagatagtacacttctcagttggacacgatggctctcacgcccttttagttgcagaagatgggagcatattctttacaggatctgctagtaaaggagaagatggagaatcaactaagagcagacggcaatccaaaccttataaacctaaaaagataattaagatggaaggaaagattgtggtatatacagcctgcaataatggaagtagttctgttatttctaaagatggagaactctacatgtttggaaaagatgccatttactctgatagttcaagtttggtaactgatttgaagggccattttgtaactcaggtagctatgggcaaagctcacacttgtgttttaatgaagaatggagaggtgtggacatttggtgtaaataataaaggacagtgtggacgagatactggtgccatgaaccaaggtgggaaagggtttggagttgaaaatatggcaacagcaatggatgaagacctggaagaagaactagatgaaaaagatgagaagtctatgatgtgccctccaggcatgcacaaatggaagctggagcagtgcatggtttgcactgtctgtggagactgtacaggttatggagccagctgtgtcagtagtggacggccagacagagtccccggagggatctgtggttgtggttccggagaatctggttgtgctgtgtgtggatgttgcaaggcctgtgcaagagagttagatggtcaagaggcaagacaaagaggaattcttgatgcagtgaaagaaatgatacctttagatcttcttttagctgtcccagtgcccggggttaacattgaagaacaccttcagttacgacaagaagaaaaacggcaacgtgtaatcagaaggcacagattagaggaaggaagaggcccccttgtatttgctggtcctatttttatgaaccatcgagaacaggctctagccagactcagatcccatccagcacagctaaagcataaacgggacaagcacaaagatggaagtggagaaagaggcgaaaaggatgcaagcaaaatcacaacataccctccaggctctgtgcgatttgactgtgagctccgggcagtccaagtcagctgtggatttcaccattcagtggttttaatggaaaatggagatgtctatacatttggttatgggcagcatgggcagctaggacatggagatgtcaactccaggggatgtcccactcttgttcaagcattgccaggccctagcacacaagtcactgcaggcagcaaccatacggcagtacttttaatggatggacaggtcttcacatttggaagtttttctaaaggacaactgggcagaccaattttggatgtgccatattggaatgcaaagccagctcccatgcctaacattggatcaaaatatggaagaaaagctacttggataggtgcaagtggggaccaaacttttttacgaattgatgaagcacttattaattctcatgtacttgctacatcagaaatttttgccagtaaacacataataggcttggtacctgcttctatatcagaacctcctccatttaaatgccttctgataaataaagtggatgggagttgtaaaacttttaatgactcagaacaagaggatctgcaaggatttggtgtgtgtcttgatcctgtatatgatgtaatttggaggtttcgaccaaatactagagagctgtggtgttacaatgcggtggttgctgatgccaggcttccctctgcagcagacatgcagtccagatgtagtatcctaagtcctgaacttgccttaccaacaggatcaagggccctcactacccgatctcatgcagctttgcacattttaggttgtcttgataccttggcagctatgcaggacttaaaaatgggtgttgcaagtacagaggaagagactcaagcagtaatgaaggtttattctaaagaagattatagtgtggtaaacaggtttgaaagtcatggaggaggctggggttattctgcccattcagtagaagctatacgtttcagtgccgacactgatattttacttggtggtcttggtctgtttggaggtagaggagaatatactgctaaaattaagctgtttgaattgggtcctgatggaggagatcatgaaactgatggtgaccttcttgcagagactgatgtattggcttatgactgtgctgctagagaaaaatatgcaatgatgtttgatgagcctgttctcctgcaagctgggtggtggtatgtggcatgggcccgagtgtcaggacccagcagtgactgtggatctcatggacaggcatctattaccacagatgatggggttgttttccagttcaagagttcaaagaaatcaaataatggtacagatgttaatgcgggtcagatacctcagttattatacagacttccaaccagtgatggcagtgcttcaaaaggcaaacagcaaaccagtgaacctgtacacattttaaagaggtcttttgcaagaactgtctcagtggaatgttttgagtcattgttgagtattcttcactggagctggaccaccttagtcttaggagttgaagaacttagaggattaaaaggattccagttcacagctacactcctagatttagagagactgcgctttgtgggtacctgttgtctgaggttattgcgtgtctatacctgtgaaatttacccagtgtcagctacaggaaaagcagttgtagaagaaactagcaaattagcagagtgtattggaaaaaccagaactttgttaagaaaaattttatcagaaggagttgatcactgcatggtgaaattggataatgatcctcaaggatatctcagtcaacccttgagtcttctagaagctgtccttcaggaatgtcataatactttcactgcctgctttcattctttctacccaactcctgccttacagtgggcttgcctttgtgatctgctgaattgtttggatcaggatatccaagaagcaaacttcaagacatcaagtagccgactccttgcagctgttatgtcagctctgtgtcacacgtctgttaagctgacttccatcttcccgattgcgtatgatggagaagtattactacgatcaattgttaaacaagttagtacagagaacgactcaacactagttcatcgttttccccttttggtggcacatatggaaaaactcagccagagtgaagagaatatctcagggatgacaagcttccgtgaagttctggagaaaatgctggtcattgttgtgctaccagtcaggaacagcctgaggagagaaaatgaactcttctcctcccacctcgtctctaacacctgtggattactggccagcattgtcagtgaactgacagcgtcagccctgggatctgaggttgatggacttaattctcttcactctgtaaaagctagtgctaaccgatttacaaaaacaagtcagggcagaagttggaacactgggaacgggtcccctgatgcaatctgtttttcagtagacaaacctggaatagttgtggttggtttctctgtctatggaggaggtggaattcatgaatatgaattagaggtgttggttgatgatagtgaacatgcaggagattcaactcattcccacagatggacatctctggaattagtgaaaggaacgtacacaacggatgactcacccagtgatatagctgagatcagacttgacaaagtggttcctttaaaggaaaatgttaaatatgctgtgcgcttgaggaactatggaagccgtacagccaatggagatggaggaatgaccacagttcagtgccctgatggtgtgacattcacattcagcacgtgcagcttgagcagtaacggcacaaaccaaaccagaggacagatcccacagatactctactataggagtgaatttgatggagatttacaatcccaacttctgagtaaagccaatgaagaagataaaaactgtagcagagcattgtctgttgtaagcactgtcgttcgagcctctaaggacctcctgcacagagctcttgctgtggatgctgatgacattccagaactgctgagttcttccagtctgttttccatgctgctcccccttattatagcctacataggaccagtagctgctgctattcccaaggtggctgtagaagtctttggccttgtccaacaattgcttccgtcagttgccattttgaatcagaagtatgcaccgcctgccttcaaccctaatcagtcgacagatagcaccacaggaaaccagcctgaacagggcctctctgcttgtacaacctccagtcactatgctgtcatagagagtgagcacccgtataaacctgcctgtgtgatgcattacaaggtgacattcccagaatgtgtgaggtggatgacaatcgaatttgaccctcagtgtggtactgcacagtcagaagatgtccttcgtttgttgattcctgtcagaactgttcagaattcaggatatggaccaaaattgacatctgttcatgaaaatcttaattcatggatagaattaaagaaattttcaggatcctctgggtggcctactatggttttggtgttgccaggaaatgaggcccttttttcattggagactgcatcagattatgtgaaagatgacaaagcttctttctatggttttaagtgttttgcaattggatatgaatttagccctggacctgatgagggagtcatccaattggaaaaagaattagccaatcttggtggggtttgtgcagcagctctgatgaagaaggacctagcacttcctattggtaatgaattagaagaagaccttgaaattcttgaggaggctgcattgcaggtgtgcaaaacccattctggaattcttggaaagggtctagctctttctcattcaccaactatattagaagcacttgagggaaatttaccactccaaatccaaagcaatgaacagtcttttctggatgattttattgcctgtgtcccaggatcaagtggtggaaggcttgcaaggtggcttcagccagattcatatgcggatcctcagaaaacatctttgatcctgaataaggatgatattcgttgtggttggcctaccaccataactgttcaaacaaaagaccagtatggggatgtggtacatgttcccaatatgaaggtggaagtgaaagctgtccctgtttctcagaaaaaaatgtctttacaacaagatcaagcaaagaaacctcaaaggattcctggcagtcctgcagtaacagctgcatcttctaatactgacatgacttatggagggctggcatcaccaaagctagatgtttcatatgaaccaatgatagtgaaggaagctcgatatattgccataacaatgatgaaggtttatgaaaattattcatttgaagaactacgttttgcatcaccaactcctaagagacccagtgagaatatgctgatccgtgtcaataatgatgggacttattgtgcaaattggactccaggggctattggactctacactcttcatgttaccattgatggcattgaaatcgatgctggtctggaagtaaaagtaaaagacccaccaaaagggatgataccaccaggaactcagttggtcaaaccaaagtctgaacctcagcctaataaggttcgaaaatttgtggccaaggacagtgcggggcttcgcatccgtagccacccttcccttcagagtgagcagataggcatagtgaaagtcaatggaactatcacttttattgatgagatccataatgatgatggtgtgtggctgaggctgaatgatgagacaataaagaagtatgtccctaacatgaatggttacactgaagcctggtgcctctcttttaatcaacatcttggcaagagtcttctggtccctgttgacgaatctaaaactaatactgatgactttttcaaagacataaactcctgctgcccacaggaagcaacaatgcaagaacaagatatgccattcttgcgaggagggccaggcatgtacaaggtagtgaagacgggaccttcaggtcacaacatcagaagctgccctaaccttagaggtatcccaattggaatgttagttctgggaaacaaagtcaaagcagtgggagaggtaaccaattctgaagggacatgggtgcaactggatcagaacagcatggtagagttctgtgagagtgatgaaggagaggcatggtccttagctagagacagaggcggaaaccagtacctccgacatgaagatgaacaagctcttctggatcagaattctcaaactcctcctccaagccctttctcagtgcaagcttttaataaaggggcaagttgcagtgcccaaggatttgattatggactcggaaatagcaaaggtgatcgaggaaacatctcaacatcttctaaaccagcctctacatcaggaaaatcagagctgtcctctaaacacagcagatcgcttaaacctgatggacgtatgagccggactactgctgatcagaagaagccaaggggcacagaaagtttatctgctagtgaatccctcatcttaaaatctgatgctgcaaagttgaggtcagattcccacagtaggtcattatcccccaaccataacaccttgcagacattgaaatctgatgggaggatgccttctagctccagagctgaatccccaggaccaggttctcggttgtcatctcctaagccaaagactctcccagccaataggtctagcccatcgggtgctagttctccacgctcctcctcaccacatgataaaaatctacctcaaaaaagtactgctcctgttaagacaaagcttgatcctcctcgggaacgttctaaatcagactcttacacacttgatccagataccctccgcaagaagaaaatgcccctcacagaacctttgagaggacggtcaacgtcaccaaaaccaaaatcagtaccaaaggattctacagattcccctggatctgaaaatagagctccctctccccatgtggtacaggaaaacctccacagtgaggtggtcgaagtctgcacctcaagtactttaaaaacaaatagtctaacagacagcacctgcgatgacagcagtgaatttaagagtgtggatgaaggttcaaataaagttcattttagcattggaaaagcaccactgaaagatgaacaggaaatgagagcatctcccaaaataagtcgaaaatgtgctaatagacacaccaggcccaaaaaagaaaaatcgagttttcttttcaaaggagatggatccaagcctttagagccagccaagcaagccatgtctccttctgtggccgaatgtgccagagctgtgtttgcttccttcctctggcatgaaggcatagtacatgatgcaatggcttgttcttctttcctaaagtttcatcctgaactttccaaagaacatgctcctataaggagtagtttaaatagccaacaacctacagaggaaaaagaaaccaagttaaaaaatagacattcattagaaatatcatctgcactgaatatgtttaatattgcaccccatggaccagatatatctaagatgggtagcatcaacaaaaacaaggtattgtctatgcttaaggaaccacctctgcatgaaaaatgtgaggatgggaaaaccgagaccacttttgaaatgtccatgcataacacaatgaagtctaagtctcctcttcccttaactttacaacatttagtggctttttgggaagacatctctttggctactatcaaagctgcttcccagaatatgatttttccaagtcctggttcctgtgcagttcttaaaaagaaagagtgtgagaaagagaataagaagtccaaaaaggaaaaaaagaaaaaagaaaaggcagaagttaggcccaggggtaatttgtttggagagatggcccagctggcagtaggaggaccagagaaagataccatctgtgaactgtgtggggagtcacatccatacccggtgacctatcacatgagacaagctcacccaggttgtggccgatatgctggtggacaaggttacaatagcattgggcatttttgtggaggatgggctggtaactgtggtgatggtggcataggaggaagcacttggtatctggtatgtgatcgctgtagagaaaaatacctccgcgaaaaacaggctgctgcaagggagaaggtcaaacaatctaggagaaaaccaatgcaagtcaagacccctcgtgccttgcccaccatggaagctcaccaggtgattaaagccaatgcactcttcctgctgtccctgagcagtgcagcagaaccgagcattctgtgttaccatcctgcaaagccattccaatctcagttgcccagtgtaaaagaaggcatttctgaggatcttcctgtgaaaatgccttgtctctacctgcagacattagctaggcatcatcatgaaaattttgtgggctatcaagatgacaatctattccaggatgaaatgagatatctacgttcaacatctgtacctgccccgtatatatcagtaactcctgatgcaagtcctaatgtatttgaagagccagagagcaatatgaagtctatgccaccaagtttagaaaccagtcccataactgatactgatcttgcaaagagaactgtcttccaaagatcatactcagttgttgcttccgaatatgataaacaacactccattttacctgcacgagttaaagctattcctagaagaagagttaacagtggagacactgaagttggttcttcccttttgagacatccgtctcctgagctttctcggctaatctcagcccacagctctctttctaaaggagaacgaaatttccagtggccagttttagcttttgttatacaacatcatgatctagaaggtcttgaaatagcaatgaaacaggccctaaggaaatctgcttgtcgagtttttgctatggaggctttcaactggcttctgtgtaatgtcatccaaaccacttctctccatgatattctgtggcattttgtggcatcactgactcctgcaccagtggaaccagaggaagaagaggatgaagaaaataaaacaagcaaagaaaattcagaacaagagaaagatacaagagtatgtgaacatccactctcagacatagtgattgccggggaagctgctcatcctttaccacacacctttcaccgcttgctgcagaccatctcagaccttatgatgtctctccccagcggcagttcattacagcaaatggccctgaggtgctggagtctcaaattcaagcaatctgatcaccagttccttcatcagagcaacgtctttcatcacattaacaatattttgtcaaagtcagatgatggcgatagtgaagagagttttagcatcagtatacagtctggctttgaagctatgagtcaggaattatgcatagtaatgtgcttaaaggacttaaccagcattgttgacataaaaacttcaagccgacctgccatgattggcagtttgacagacggctccacagaaaccttttgggaatcaggagatgaagataaaaacaaaactaagaacatcaccatcaactgtgtaaaaggaatcaatgcccgctatgtgtctgttcacgtggacaattcccgagatcttgggaataaagttacctcaatgaccttcttaactggcaaagcagtagaagatttgtgcagaataaagcaggttgatctggattccaggcacattggctgggtaacaagtgaacttccaggaggggataatcacatcataaaaattgaattaaaaggcccagaaaatacactgagagttcgacaagtcaaagtcctgggctggaaagatggtgaaagcacaaaaatagctggccagatttcagccagtgtggcccagcagaggaactgtgaagctgagactctgcgagtattcagactgattacgtctcaagtatttggaaagctcatctctggagatgctgaacctacaccagaacaagaggaaaaagcactattgtcatcacctgaaggagaagaaaaagtatacaatgcaacatcagatgctgacctgaaagaacatatggttggaatcatattcagcaggagtaagctgactaacttacaaaaacaggtgtgtgctcatattgtccaagctattcgcatggaagctaccagagtccgtgaagaatgggaacatgctatatcaagcaaagaaaatgccaattctcagccaaatgatgaagatgcctcctctgatgcctactgctttgagctgctctctatggttttagcactgagtggctctaacgttggccggcaatatctggctcaacagctaaccctgcttcaggatctcttctcgctgcttcacacagcctctcctagagtccagagacaggtaacctctttactaagaagagttttgcctgaagtaacccctagtcgtctggccagcatcataggagtgaaatccctccccccagcagatatcagtgatatcattcactcaacagagaaaggagactggaataagctgggtatcttggacatgtttctaggatgcattgccaaagcactcactgtacagctaaaagccaaaggaaccaccatcactggaacagctggtaccactgtgggcaaaggagttacaacagttactcttccgatgattttcaattccagttatctccgacgaggtgaaagtcattggtggatgaagggctcaacccctacccagatctcagagatcatcattaaacttatcaaggatatggcagcaggtcatctgtcagaagcttggtcccgagtgacaaaaaatgctattgcagaaaccatcattgccttgaccaagatggaagaagaatttaggtctccagtgagatgtattgcaacaactagactctggcttgctctcgcatccctatgtgttcttgatcaggaccacgtagatcgtctctcctcggggagatggatgggaaaggatggacaacaaaaacaaatgcctatgtgtgataaccatgatgatggtgaaactgcagcaatcattttatgcaatgtctgtggaaatttatgtacagactgtgacagattccttcaccttcatcgaagaaccaaaactcatcaaagacaggtcttcaaagaagaagaagaagctataaaggttgaccttcatgaaggttgtggtagaaccaaattgttctggttgatggcactggcagattctaaaacaatgaaggcaatggtggaattccgagaacacacaggcaaacccaccacgagtagctcagaagcatgtcgcttctgtggttccaggagtggaacagagttatctgctgttggcagtgtttgttctgatgcagattgccaggaatacgctaagatagcctgtagtaagacgcatccttgtggccatccatgcgggggtgttaaaaacgaagagcactgtctgccctgtctacacggctgtgacaaaagtgccacaagcctgaagcaagacgccgatgacatgtgcatgatatgtttcaccgaagcgctctcggcagcaccagccattcagctggattgtagtcacatattccacttacagtgctgtcggcgagtattagaaaatcgatggcttggcccaaggataacatttggatttatatcttgtcccatttgcaagaacaaaattaatcacatagtactaaaagacctacttgatccaataaaagaactctatgaggatgtcagaagaaaagccttaatgagattggaatatgaaggtctgcataagagtgaagctatcacaactcctggtgtgaggttttataatgacccagctggctatgcaatgaatagatatgcatattatgtgtgctacaaatgcagaaaggcatattttggtggtgaagctcgctgcgatgctgaggctggacggggagatgattatgatcccagagagctcatttgtggtgcctgttctgatgtttccagggctcagatgtgtcccaaacatggcacagactttttggaatataaatgtcgctactgctgttcagtggctgtttttttctgttttggaacaacacatttttgtaatgcttgtcatgatgattttcaaagaatgactagcattcctaaggaagaactaccacactgtcctgcaggtcccaaaggcaagcagttagaaggaactgaatgtccactccatgttgttcatccacccactggggaagagtttgctctgggatgtggagtgtgcagaaatgcccacactttttagaacacgcagatcctttgtctacagagagaaaaattgccttcatcccccaagaggatgcggtgaagtttaaactctgctcaggataaggacgggaccatttttacatccatgaaaatgaaccattcacagtgcaagaaggataccaaataccatgtacataattcttgctatgaaaagtttccccattattttggtttatcttcttttgaacaaatgacatcaaacttgtgaggtgtttgcatgtggccattaccgtcattggcctgtgaagcattggacatttatagataattgatataaaagaatcgccatgcccatggactaagaacgatgctggctttcaagcaaaaaagaaaaataatcattgtttattgtatactgcctttttgtaatcctgtacaattgcatcacgggtggggataaaaagaggaatattctggtttatttcctagactgttatttaaaaaaaaaaaaaacattgtgttaggacagcatataaatgtaataagtatcacactgtatataaacatatcaatgtttgtcctgtataagaattactaaattacaaatgcaatttcatttaaacttctaggttaagtttgagcctgaaattttaatgaagtgcaatactgagtgtgcctcattatcttgcagctgtaaacatattggaatgtacatgtcaataaaaccactgtacatttttatacagtgataaagtcta

SEQ ID NO: 1336 - DNA, 2428 bp, HOMO SAPIENS
gggagcgcggcgcggccgccgcgtgcgcgagccggggttgcagcccagccgggactttccagccggcggcagccgcggcggccgccggctcttccccgccccccgtcatggggcagcccggggagcagaacgctgcggaccgcggcggaggacgcgcccggcgcccctgagccggccgagcggcgacggaccgcgagaactcctctttcctaaaatggagtcgagtaaaaagatggactctcctggcgcgctgcagactaacccgccgctaaagctgcacactgaccgcagtgctgggacgccagtttttgtccctgaacaaggaggttacaaggaaaagtttgtgaagaccgtggaggacaagtacaagtgtgagaagtgccacctggtgctgtgcagcccgaagcagaccgagtgtgggcaccgcttctgcgagagctgcatggcggccctgctgagctcttcaagtccaaaatgtacagcgtgtcaagagagcatcgttaaagataaggtgtttaaggataattgctgcaagagagaaattctggctcttcagatctattgtcggaatgaaagcagaggttgtgcagagcagttaatgctgggacatctgctggtgcatttaaaaaatgattgccattttgaagaacttccatgtgtgcgtcctgactgcaaagaaaaggtcttgaggaaagacctgcgagaccacgtggagaaggcgtgtaaataccgggaagccacatgcagccactgcaagagtcaggttccgatgatcgcgctgcagaaacacgaagacaccgactgtccctgcgtggtggtgtcctgccctcacaagtgcagcgtccagactctcctgaggagcgagttgagtgcacacttgtcagagtgtgtcaatgcccccagcacctgtagttttaagcgctatggctgcgtttttcaggggacaaaccagcagatcaaggcccacgaggccagctccgccgtgcagcacgtcaacctgctgaaggagtggagcaactcgctcgaaaagaaggtttccttgttgcagaatgaaagtgtagaaaaaaacaagagcatacaaagtttgcacaatcagatatgtagctttgaaattgaaattgagagacaaaaggaaatgcttcgaaataatgaatccaaaatccttcatttacagcgagtgatagacagccaagcagagaaactgaaggagcttgacaaggagatccggcccttccggcagaactgggaggaagcagacagcatgaagagcagcgtggagtccctccagaaccgcgtgaccgagctggagagcgtggacaagagcgcggggcaagtggctcggaacacaggcctgctggagtcccagctgagccggcatgaccagatgctgagtgtgcacgacatccgcctagccgacatggacctgcgcttccaggtcctggagaccgccagctacaatggagtgctcatctggaagattcgcgactacaagcggcggaagcaggaggccgtcatggggaagaccctgtccctttacagccagcctttctacactggttactttggctataagatgtgtgccagggtctacctgaacggggacgggatggggaaggggacgcacttgtcgctgttttttgtcatcatgcgtggagaatatgatgccctgcttccttggccgtttaagcagaaagtgacactcatgctgatggatcaggggtcctctcgacgtcatttgggagatgcattcaagcccgaccccaacagcagcagcttcaagaagcccactggagagatgaatatcgcctctggctgcccagtctttgtggcccaaactgttctagaaaatgggacatatattaaagatgatacaatttttattaaagtcatagtggatacttcggatctgcccgatccctgataagtagctggggaggtggatttagcagaaggcaactcctctgggggatttgaaccggtctgtcttcactgaggtcctcgcgctcagaaaaggaccttgtgagacggaggaagcggcagaaggcggacgcgtgccggcgggaggagccacgcgtgagcacacctgacacgttttataatagactagccacacttcactctgaagaattatttatccttcaacaagataaatattgctgtcagagaaggttttcattttcatttttaaagatctagttaattaaggtggaaaacatatatgctaaacaaaagaaacatgatttttcttccttaaacttgaacaccaaaaaaacacacacacacacacacgtggggatagctggacatgtcagcatgttaagtaaaaggagaatttatgaaatagtaatgcaattctgatatcttctttctaaaattcaagagtgcaattttgtttcaaatacagtatattgtctatttttaaggcctc

SEQ ID NO: 1337 - DNA, 2894 bp, HOMO SAPIENS
tctggagctccagctgccccccgccaccactggccgctcgcactaccagcctgtctcgcacgctaaggtcacgaccgctgcaagcaggctttgctgcagattgggatcaacatgatggcactgcctggaggtcgccacctggactccgtcaccctgccgggtcagcggctacacctgatgcaggtggactcagtccagcgctggatggaagatctgaagctcatgaccgagtgcgagtgcatgtgtgtcctgcaggccaagcccatcagcctggaagaggatgcacagggtgacctcatcctggcaggtggccctggccctggagaccccctgcagctgctgctcaaacggggttgggtcattagcacagagctgcgcaggatcgggcagaagctggcccaggaccgctgggcacgggtgcacagcatgagcgtgcgtctgacctgccatgcccgctccatggtcagcgagtacagtgctgtcagcaggaactccttgaaggaaatgggcgagattgagaagctgctaatggagaaatgctcggagctctcggcagtcacagagaggtgccttcaggttgagaatgagcatgtcctgaagtcaatgaaggcctgcgtgagtgagaccctgagcatgctgggccagcactttggccagctgctggagctggccctgacacgggaggttcaggcactggtgagaaaaattgatgcctcagacaatatctacaccacagagtccaccacagggaacctgttcagcctgacccaggagggggctcccttgtgccgcatcatagccaaggagggtggggtcgtagcactcttcaaggtttgccggcaggacagtttccggtgcttgtacccccaggcgctccgcacgctggcctccatctgctgcgtggaagagggtgtccaccagctggagaaggtggatggcgttctgtgcttggccgacatcctgaccgacaacagccactcagaggccacacgggctgaggctgcggctgtggtggcccaggtcacctccccacacctgcccgtcacccagcacctcagtagcttcctggagagcatggaggagatcgtgacagccctcgtcaaactgtgccaagaggcctcatcaggggaagtcttcctactggcctctgcggcccttgccaacatcacgttctttgacacaatggcctgcgagatgctcctgcagttgaatgccatccgtgttctcctggaagcctgcagtgacaagcagagagtggacacgccttacactcgggaccagattgtgaccatcttggcaaacatgtctgtcctagaacagtgtgcctctgacatcattcaggaaaatggggtccagcttatcatgggcatgctgtctgaaaaaccaaggtctgggactcctgctgaagtggcagcctgtgagcgagtccagcagaaagctgcagtgaccctggctcgtctcagccgagacccagatgtggcacgggaggccgtgcggctcagctgcatgtcccgtctcatcgagctctgcagatccccatcagagaggaacagcagtgacgccgtgcttgtggcctgcctggctgctctgcgtagattggctggggtctgccctgaaggcctccaggactctgactttcagcagttggtccagcctcggctggtggactccttcttactctgcagcaacatggaggagagttttgtgtagtgagtgtgggcgaagaaatacatttggctgttctcacaccccctctgactatgcaccagtgaacacatctgagtacataccagctctcctcatcttcttatttatacttaacttatttttgtgtgaaataaatggaggacaaaatcttagagcaacatcatcaaacagtctttggtccttgagaatcttctttgtgttttattttttgatttctgtagcttttcagttgcagatgttgaaattcgtaatgacaaatatgacaaattgtcatgggtgattccacttcatcttattttttctactctcactatacaatcttgcctcattttttaaaactttggaaccagaggatttcaactgcctagcaagttttttttttaagttggatttgctcttcccaaaaatctaaaatgaatttaataattgggtagaatatattggaaagaagtttctttttctttaataaatggaatcatataaaatgtatcccggattttcttattaaattgtattttaaactaggttcttgcttcccaggtttcattccccaaaaacttttccaaccattaaaagtacacacagaattgtcttgttttcataggtgtataaataggttaagttctgagtgacttagtgagaaaccaaagtgactttcaaaaatacacccaaaggcaccagaaaccctgcttcctttggcttctttgcttttgtgtaacctcctgttcacctcctggtgaatagaatcctcagatgaggcttattgaatgattgattcctcctcaaaagtatacttgaaagcagtggtgtgctgaagccagctcatgcccactcacaagggacaactgtgagaatttcttcctaactctgcactcagtgaccttgcgttggtagccatgagctacttcatgagccctcatgttgaaattggccatagtgggagtatttacaccacagaaattcacagatgctataaagcacagctttcgctttttttttttttagagagagctggtttaccaatttcactgcttgaaagtatcacaaaaatctggggatccttttgaaaatataaatgccatcatattgtgatataatttatacaatataatataattgtgtaaaatcatgattataataatgtttcaataaacatttcttaaattcccaaaaaaaaaaaaaaaaaa

SEQ ID NO: 1338 - DNA, 4968 bp, HOMO SAPIENS
gcggccgccgtggccctcacagtcggcgtttcgccgcctgcccgcggtgcccgcgcacgccggccgccatcgccttcgcgcctggctggcgggggcgctgtcctcccaggccgtccgcgccgctccctggagctcggcggagcgcggcagccagggccggcggaggcgcgaggagccgggcgccaccgccgccgccgccgccgccgccgcgggggccatgaccgtggagcagaacgtgctgcagcagagcgcggcgcagaagcaccagcagacgtttttgaatcaactgagagaaattacggggattaatgacacccagatactacagcaagccttgaaggatagtaatggaaacttggaattagcagtggctttccttactgcgaagaatgctaagacccctcagcaggaggagacaacttactaccaaacagcacttcctggcaatgatagatacatcagtgtgggaagccaagcagatacaaatgtgattgatctcactggagatgataaagatgatcttcagagagcaattgccttgagtttggccgaatcaaacagggcattcagggagactggaataactgatgaggaacaagccattagcagagttcttgaagccagcatagcagagaataaagcatgtttgaagaggacacctacagaagtttggagggattctcgaaacccttatgatagaaaaagacaggacaaagctcccgttgggctaaagaatgttggcaatacttgttggtttagtgctgttattcagtcattatttaatcttttggaatttagaagattagttctgaattacaagcctccatcaaatgctcaagatttaccccgaaaccaaaaggaacatcggaatttgccttttatgcgtgagctgaggtatctatttgcacttcttgttggtaccaaaaggaagtatgttgatccatcaagagcagttgaaattcttaaggatgctttcaaatcaaatgactcacagcagcaagatgtgagtgagtttacacacaaattattagattggttagaagatgccttccaaatgaaagctgaagaggagacggatgaagagaagccaaagaaccccatggtagagttgttctatggcagattcctggctgtgggagtacttgaaggtaaaaaatttgaaaacactgaaatgtttggtcagtacccacttcaggtcaatgggttcaaagatctgcatgagtgcctagaagctgcaatgattgaaggagaaattgagtctttacattcagagaattcaggaaaatcaggccaagagcattggtttactgaattaccacctgtgttaacatttgaattgtcaagatttgaatttaatcaggcattgggaagaccagaaaaaattcacaacaaattagaatttccccaagttttatatttggacagatacatgcacagaaacagagaaataacaagaattaagagggaagagatcaagagactgaaagattacctcacggtattacaacaaaggctagaaagatatttaagctatggttccggtcccaaacgattccccttggtagatgttcttcagtatgcattggaatttgcctcaagtaaacctgtttgcacttctcctgttgacgatattgacgctagttccccacctagtggttccataccatcacagacattaccaagcacaacagaacaacagggagccctatcttcagaactgccaagcacatcaccttcatcagttgctgccatttcatcgagatcagtaatacacaaaccatttactcagtcccggatacctccagatttgcccatgcatccggcaccaaggcacataacggaggaagaactttctgtgctggaaagttgtttacatcgctggaggacagaaatagaaaatgacaccagagatttgcaggaaagcatatccagaatccatcgaacaattgaattaatgtactctgacaaatctatgatacaagttccttatcgattacatgccgttttagttcacgaaggccaagctaatgctgggcactactgggcatatatttttgatcatcgtgaaagcagatggatgaagtacaatgatattgctgtgacaaaatcatcatgggaagagctagtgagggactcttttggtggttatagaaatgccagtgcatactgtttaatgtacataaatgataaggcacagttcctaatacaagaggagtttaataaagaaactgggcagccccttgttggtatagaaacattaccaccggatttgagagattttgttgaggaagacaaccaacgatttgaaaaagaactagaagaatgggatgcacaacttgcccagaaagctttgcaggaaaagcttttagcgtctcagaaattgagagagtcagagacttctgtgacaacagcacaagcagcaggagacccagaatatctagagcagccatcaagaagtgatttctcaaagcacttgaaagaagaaactattcaaataattaccaaggcatcacatgagcatgaagataaaagtcctgaaacagttttgcagtcggcaattaagttggaatatgcaaggttggttaagttggcccaagaagacaccccaccagaaaccgattatcgtttacatcatgtagtggtctactttatccagaaccaggcaccaaagaaaattattgagaaaacattactagaacaatttggagatagaaatttgagttttgatgaaaggtgtcacaacataatgaaagttgctcaagccaaactggaaatgataaaacctgaagaagtaaacttggaggaatatgaggagtggcatcaggattataggaaattcagggaaacaactatgtatctcataattgggctagaaaattttcaaagagaaagttatatagattccttgctgttcctcatctgtgcttatcagaataacaaagaactcttgtctaaaggcttatacagaggacatgatgaagaattgatatcacattatagaagagaatgtttgctaaaattaaatgagcaagccgcagaactcttcgaatctggagaggatcgagaagtaaacaatggtttgattatcatgaatgagtttattgtcccatttttgccattattactggtggatgaaatggaagaaaaggatatactagctgtagaagatatgagaaatcgatggtgttcctaccttggtcaagaaatggaaccacacctccaagaaaagctgacagattttttgccaaaactgcttgattgttctatggagattaaaagtttccatgagccaccgaagttaccttcatattccacgcatgaactctgtgagcgatttgcccgaatcatgttgtccctcagtcgaactcctgctgatggaagataaactgcacactttccctgaacacactgtataaactctttttagttcttaacccttgccttcctgtcacagggtttgcttgttgctgctatagtttttaacttttttttattttaataactgcaaaagacaaaatgactatacagactttagtcagactgcagacaataaagctgaaaatcgcatggcgctcagacattttaaccggaactgatgtataatcacaaatctaattgattttattatggcaaaactatgcttttgccaccttcctgttgcagtattactttgcttttatcttttctttctcaacagctttccattcagtctggatccttccatgactacagccatttaagtgttcagcactgtgtacgatacataatatttggtagcttgtaaatgaaataaagaataaagttttatttatggctacctatgtgtttgtaagcaggtatattgtatattagtgtattagtaatactagataaatgaattttgtctggggattaagattggatagttaatagattaatacaatcttttaattctgctctaatgctagcaaattggaaaatgtttaagtctttgacacttaaatttatctatatttttaacaaagttcttgaacttagtatggcaccggaacctgttttgaattcagtcaggtttttactcaagtaagtggttgattttttttaagtcaaactacactgaaacttttatccttttcttagattaatcttactttttaaatgtatttacaatatacagcaaggtgattatttcaagagaatcccaaagtacttgaataagggctattgtaaaatttaaaagaaatatttatatatacacatatatacacatacacacatgtatatatatattcttcataatggaggacaatgttttgcaatatataaatcattctatttttgtaaattgtatatcactttaattgaaaatgttctctactaattaatactgtgaaacaaaattgatgttgtttaactagaagttatgagtatcttaactgcctttattccttttcaaaaaggaaaaagctgtagaacattttgtagatgaaactactgtttaagattaatgaattaatattgtgaatgaaaatcaaaatccatactttaaaggtaatcatgttactaacaacctatttttgaattcataaaaatttctttataaatgatgttttgtgaacatagtaaaatagaccattatactatgtgtatgtttgatacagcgtcgccaaaactagtgttctttattagtgcctctcacaaaagatcctggatggaggagtaagatgaaatattatgctattatatgatgctgtttgtaaaggtattaatgtactagtaaggtgttaatgacaaggaattagtactattcctgttgtaaagttagattttgcatattgtatctatcaaaatatgtttgggtttagattttaagttgtctactgagcagatttctgcattggttttccagtcctgttaaaagtttagaaacttcatatgtgtcatcacagcttttgtaaagaaagtatccttaatattttatgacattct

SEQ ID NO: 1339 - DNA, 2962 bp, HOMO SAPIENS
aaggagggaggcggtggtagcggcggcggctgctgaggaggaggagggggagcggagggaggtgtttctgtcagttccggctgtttgttcgggaagtggatccgccgctgccggagcagcccgaagggagctgcggatcgcgaggccagtaccgaccccgcccgcccgcgcgcaccgcccccgcccgccatggcccgggactacgaccacctcttcaagctgctcatcatcggcgacagcggtgtgggcaagagcagtttactgttgcgttttgcagacaacactttctcaggcagctacatcaccacgatcggagtggatttcaagatccggaccgtggagatcaacggggagaaggtgaagctgcagatctgggacacagcggggcaggagcgcttccgcaccatcacctccacgtattatcgggggacccacggggtcattgtggtttacgacgtcaccagtgccgagtcctttgtcaacgtcaagcggtggcttcacgaaatcaaccagaactgtgatgatgtgtgccgaatattagtgggtaataagaatgacgaccctgagcggaaggtggtggagacggaagatgcctacaaattcgccgggcagatgggcatccagttgttcgagaccagcgccaaggagaatgtcaacgtggaagagatgttcaactgcatcacggagctggtcctccgagcaaagaaagacaacctggcaaaacagcagcagcaacaacagaacgatgtggtgaagctcacgaagaacagtaaacgaaagaaacgctgctgctaatggcacccagtccactgcagagactgcactgcggtccctcccccagcccgaggcccacggaggttcctcgggggacagtctcagtttcgtgccgttatttaaagaattctctccatgtttttgtatcgggaggtgccatcggcacttcctcccccgccctcctcgagtgccaagaaggtgttggaccagcccgcccttccctactggtgccccctcctccccggccaaggcgcctggacctggcgaggacgctgcccgccgagcggactgattcgcagagtctgtacatagtgtatattgctctacccggccgcacaccacgtcctgctctggcttttgccttcttgatgccagcctgctgcaacagaccctccccgcgcccctccccagcccatcttactgcaagcagcgtcctgaggagacagcggcacgttctagctgcgtctgcggccagcccgtgccagtggagtgggctccgcgttgctcattctctccgacaggttgtcagcctctgtccccgctgcacagggtcttgccccttctccggggcctgtgccagctcccttccctccccgttgtcctgtccccacagccattctgggagctggggaacctggtctcaaggcaggccctgcagttccacagaggtggcaggtcttgccctttggccaacagatttcttgtcctgccttctagatgcctctgagctccaaacccagggcagccatggcttctcatttacaccaacaggtttcagttccaacagaaaggtcggggtaggttcgtgcagagatggggctggcaggggggctatgggaggattattttaacagatcaagaaaatgaagccaaatcaagtgaattaaattcctcacaattattttctttccctgaggtttgattggcacagcagcaaaagttgaggccaccccacttgtgtccactgtttttagaaaaaaatgaatggcttcctgccattgtggggctggactcttgggctttcttggtgggagcggagaaggggcctcccacccttgtccgagttgcctcccactggaggtcaggagtctacactgcagcctcgggcactgtggggagtgcatgcctggggcctctgggtggggaccatggacaggccctggtcactgtcctaacctttgtcaggacaaaggtagcaagaggatttcctggcgggtgggaaggaatggctggggcggccagttttgacacgccccagtgccctggagaacaaccagggtcatctgcacttgatgactgctccccgacccccagcccggacacctcattcccctcccactacagggatcaagtgacctgggaagaaccgagtttaacaccaggatgtgtttccttagatttcctttcctaggcgatttccagggagagccctgattggacaatcacatcacagatcacactgcagtttccatgttagcactgtggatgggtttttaatcaataaaaactgggggtttcttctcaccgactctccacttgcccaaactgccaaaagctggtgattctgggacaggccttcactttggagccacgggatggggtgggggagccccatgggcctgggaaggagggtgctgtggagggggctgcagggctgaccagcaggcagcctcatctggtcgggggcgggggcggcaggagcagaagcggggtctccgtccttgggactgtcctggttggccacgggccctgaggatgcacggtgcctggggctcctgtgccggtgggcggggggcatgctggcctctgagcgatcaggcgaggccagcgagggtgtgcttgcaaattcaagcaataagaggggggttcctgggggcttccagcccaggctagaagcccccatggcttctggcagctggacatcagccccaggtattggggtgattttggtcatgacagtgtgcctgtcccactgttacacgcatgaatgggggttatggggtgggggtggggactcagggctggaccgacgtcctagtggacctgatgtgaaattcctgtcaaacaaacaccacttttcaatggtttgctaggagtatttctgtattgaaagtttctaattatgctttttaaaaaaatactaaaaataaaggttcaagctgccaaattttaaaaaaaaaaaaaaaaa

SEQ ID NO: 1340 - DNA, 5756 bp, HOMO SAPIENS
gttttactaaagtgaatttttttttgtttgcttcgttcgtctttggctctttttttttccttcccaatttcggatttatttcaaggcgaatctggctttgggggaagaggaagaaaagtcggattacaagatcaaccaccaccaacaacaataaaaaccaccaggatatttttttgcaaatttctgacggctttaaattcatgaagcaattgtccccttttgcaatcagcatttggatctcagaatgagcaaggaaagacccaagaggaatatcattcagaagaaatacgatgacagtgatgggattccgtggtcagaagaacgggtggtacgtaaagtcctttatttgtctctgaaggagttcaagaattcccagaagaggcagcatgcggaaggcattgctgggagcctgaaaactgtgaatgggctccttggtaatgaccagtctaagggattaggaccagcatcagaacagtcagagaatgaaaaggacgatgcatcccaagtgtcctccactagcaacgatgttagttcttcagattttgaagaagggccgtcgaggaaaaggcccaggctgcaagcacaaaggaagtttgctcagtctcagccgaatagtcccagcacaactccagtaaagatagtggagccattgctaccccctccagctactcagatatcagacctctctaaaaggaagcctaagacagaagattttcttacctttctctgccttcgaggttctcctgcgctgcccaacagcatggtgtattttggaagctctcaggatgaggaggaagtcgaggaggaagatgatgagacagaagacgtcaaaacagccaccaacaatgcttcatcttcatgccagtcgacccccaggaaaggaaaaacccacaaacatgttcacaacgggcatgttttcaatggttccagcaggtcaacacgggagaaggaacctgttcaaaaacacaaaagcaaagaggccactcccgcaaaggagaagcacagcgatcaccgggctgacagccgccgggagcaggcttcagctaaccaccccgcagcggccccctccacgggttcctcggccaaggggcttgctgccacccatcaccacccccctctgcatcggtcggctcaggacttacggaaacaggtttctaaggtaaacggagtcactcgaatgtcatctctgggtgcaggtgtaaccagtgccaaaaagatgcgcgaggtcagaccttcaccatccaaaactgtgaagtacactgccacggtgacgaagggggctgtcacatacaccaaagccaagagagaactggtcaaggacaccaaacccaatcaccacaagcccagttccgctgtcaaccacacaatctcagggaaaactgaaagtagcaatgcaaaaacccgcaaacaggtgctatccctcgggggggcgtccaagtccactgggcccgccgtcaatggcctcaaggtcagtggcaggttgaacccaaagtcatgcactaaggaggtgggggggcggcagctgcgggagggcctgcagctgcgggaggggctgcggaactccaagaggagactggaagaggcacaccaggcggagaagccgcagtcgccccccaagaagatgaaaggggcggctggccccgccgaaggccctggcaagaaggccccggccgagagaggtctgctgaacggacacgtgaagaaggaagtgccggagcgcagtctggagaggaatcggccgaagcgggccacggccgggaagagcacgccaggcagacaagcacatggcaaggcggacagcgcctcctgtgaaaatcgttctacctcgcaaccggagtccgtgcacaagccgcaggactcgggcaaggccgagaagggcggcggcaaggccgggtgggcggccatggacgagatccccgtcctcaggccctccgccaaggagttccacgatccgctcatctacatcgagtcggtccgcgctcaggtggagaagttcgggatgtgcagggtgatcccccctccggactggcggcccgagtgcaagctcaacgatgagatgcggtttgtcacgcagattcagcacatccacaagctgggccggcgctggggccccaacgtgcagcggctggcctgcatcaagaagcacctcaaatctcagggcatcaccatggacgagctcccgctcatagggggctgtgagctcgacctggcctgctttttccggctgattaatgagatgggcggcatgcagcaagtgactgacctcaaaaaatggaacaaactagcagacatgctgcgcatccccagaactgcccaggaccggctggccaagctgcaggaggcctactgccagtacctactctcctacgactccctgtccccagaggagcaccggcggctggagaaggaggtgctgatggagaaggagatcctggagaagcgcaaggggccgctggaaggccacacagagaacgaccaccacaagttccaccctctgccccgcttcgagcccaagaatgggctcatccacggcgtggcccccaggaacggcttccgcagcaagctcaaggaggtgggccaggcccagttgaagactggccggcggcgactcttcgctcaggaaaaagaagtggtcaaggaagaggaggaggacaaaggcgtcctcaatgacttccacaagtgcatctataagggaaggtctgtttctctaacaactttttatcgaacagcgaggaatatcatgagcatgtgtttcagcaaggagcctgccccagccgaaatcgagcaagagtactggaggctagtggaagagaaggactgccacgtggcagtgcactgcggcaaggtggacaccaacactcacggcagtggattcccagtaggaaaatcagaacccttttcgaggcatggatggaacctcaccgtcctccccaataacacagggtccatcctgcgtcacctcggtgctgtgcctggagtgactattccctggctaaatattggcatggtcttttctacctcatgctggtctcgagaccaaaatcaccttccatacattgactacttacacactggtgctgactgcatttggtattgcattcctgctgaggaggagaacaagctggaagatgtggtccacaccctgctgcaagccaatggcaccccagggctgcagatgctggaaagcaacgtcatgatctccccggaggtgctgtgcaaagaggggatcaaggtgcacaggaccgtgcagcagagtggccagtttgtcgtctgcttcccgggatcctttgtgtccaaagtgtgctgtgggtacagcgtgtctgaaaccgtgcactttgctaccacccagtggacaagtatgggctttgagaccgccaaggaaatgaagcgtcgccatatagctaagccattctccatggagaagttactctaccagattgcacaagcagaagcaaaaaaagaaaacggtcccactctcagtaccatctcagccctcctggatgagctcagggatacagagctgcggcagcgcaggcagctgttcgaggctggcctccactcctccgcacgctatggcagccacgatggcagcagcacggtggcggacgggaagaaaaagcctcgaaagtggctgcagttggagacgtcagagaggaggtgtcagatctgccagcacctgtgctacctgtccatggtggtacaagagaacgaaaacgtcgtgttctgtctggagtgtgctctgcgccacgtggagaaacagaagtcctgccgagggctgaagttgatgtaccgctacgatgaggaacagattatcagtctggtcaatcagatctgcggcaaagtgtctggtaaaaacggcagcattgagaactgtctcagtaaacccacaccaaaaagaggtccccgcaagagagcgacagtggacgtgcccccctcccgtctgtcagcctccagttcatccaaaagtgcttcgagctcatcatgaagatgccaacgcccgtggtcgatttatatatatttttttgtaattattatattctagtttggagtacttgctgtaggattcaagctgtctttgcactagctctaaagaagattttcttctggttttagagaactaattttgttttagcattaaactgttgaacttttttttgtacttagaaaacctagatactgcagtcagattttggaaactgccgtatagtcactgttttaaaaaccccggaggggctgtattaatttgtattgccccatggctgacaaaagcctttttttttggttttgatttttttttttttgtaactgttggggggaaaaaggctttttaacccatttttgaagagggtgaagtttggagaacaaatttaaaaaccatcagtcatgtgagcagattttttagaagggataggagacacacgcgcacacacacacacacacgaaacttgaaatggctttgctttggctgtcgtcttctgccgtgtgccagatgagcttgtgatctgggaagccggggcacccccgttttgtttctctgggcggttgtggcagctgaaggcggacgttgtttcctaaccataggtggaacgaggagacgggagcgagtgggctctccaccagcacatcactatgcatctgttccaggaaagaagaaaagcgagcgaggaagacggaaaagactgcctgccttggaggggtcacatgagggagacctgtgcctgatttcattaggaaatccattctgttattttttggtgctgttggctactttatcaaaaaacccttcaatagcatccttaagatttaaaaaaaaaaaaaaaaaaaaggaaaaaaaagtgatggaagccgtaagtgcttctttgtcatcgacgtgcaatctttctaacattccatctccatctcaccgcttcttgtttgacaccttcacaagtcagcattaatctttcttttaaaacttgtttcatttatgatcatgtagagagccactaggaggcctgcagttatttttgaatgtgaaaatgcatttgcgttcatcttgtctattttttctcttcatgttgtaacaaaaaggaaaaaagaaaaaaaaatcccatcccttttgtacatatgcctgtaaattgttttaaatacttgagcctttttctcggtggggggtggggaggggggtgagaagacaagatgaagaaaagccttacatttcagtttcttcatcggttggattggatgcttacagggtttttcttgtaacatttataagtgctgcttacatcactgaacaacaacaaaaaaataataatggagtagctgttgcccttctccggttgtgtgtacagtatgtgtggaataaaaaagggaaactgttttcacaagctgttctttgtttcataattggattcatcaatcccgtagctacccatattgcactgagcttgccagtggtgactgccaggaacgtcctatgatccactttgttggttgttgttgcagaagactgaactgttttggaatatttaacaattacagaaacagtcaagtgttttccaatgtggttgtccggtttctatggccttgctgtgtactttccctctttttgacagtaaacttctgcctatggcttacagtttgacatttaatttattagcgctgctctgcacccctcccttgggagggagacttcatgtggtttattgcgagttttttgtttacttttcaggtttgtactacaaggtttaataataaaaacaaagttttttgga

SEQ ID NO: 1341 - DNA, 3844 bp, HOMO SAPIENS
gatctcggctcactgcaagccccgcctcccgggttcacgccattctcctgcctcagcctcccgagtagcccggactataggggcctgccaccatgtccagctaattttttgtatttttagtagagacgaggtttcaccgtgttagccaggatggtctcgatttcctgacttcatgatccacctgcctcggcctcccaaagtgctgggattacaggctttagctacggcgcccggccattcccctcccttttctgctaggctcactgaactattaacgagcaaaaagtaaacttcccttttctttgagttattatacatttggggtctatttgttagagcaatgcgcttgccctactatactctccctgggccttgtatgatgaaattggtaacagccacaaaaactgcatctgggacacagaaggtggtagaggggaaaataatctgactgacaaagattctgtttataggtgactttttaggattgtggagttaggcaaagctgggatcactcacacagcctgataggggattttcctacgtgggtgggctgacctggtggtcctggttacactgcccaccagccttctggtgtctctactaggagtaaggtgccttctctttctcctccaggaccccacacctccagaccctgctgagggagggccacccatttctagtcccagctcctactctaactatctgtgtgaccttaaacaaggcctttcccctctctggcctcagtatccgcctctgaataatggggctgggcctgccgaccttctggcccttttctgctctgtgagtttgtgaacttgtgatagggagacaggagtcctaggaaggaaatggaactggtgatagggagacaagagtcctaggaaggaaatggaacttgtgatagggagacaagagtcctaggaaatggaaggagagcacgtttcactctgtccagcagagggcagcagctacccacaaatcaacagctgagcaaggccagggctgtgtgggagctatgcacaggttctgcctccagaagccttcagtgcctgcctctgagccagagggttccaagcagaagaggtcccgcccccggagagggacctcagagaggtcctccaagcccctctcagctcttacttacggcatcccagatgccctattcctcttctgcagagagaaggtggttcagccactaaatggtgctgggacctcgcagtttggtgggaaggaggaagcttactcaagcaaggaatatgagacaggcaaaaacccacgcataagccaaaagcccctccaaagcgaggtgttgttccaggctgacaagtgtccagcagggtggacttcagactccctgttaggaactgaattgtgtcccccaaaaagagaaagtcaccccagggtatgacctaattcaggaaaggtcattgcagatgcatttaattaaatgaagatgagctcatgctggagtagggtggactctgaacccagtgggacaagcgtccttattaagaagagggaaatctggacacacacagagcagagaccgccgtgtgaagatggaggcagagatcggagagatgctgccacacgccacaaatgcctggggctcccagaaactacacggagcctcccccagcggcttcagcaggagcatggctcggccaacactttgatcttggtcttccagcctccagaacggtgagtcgttttcctaaaattcccttttccactggtgtgtggtgcaagatgaggcacattttccatggatggtgaacagagggaggagccttttgatcacaaccaggtcaccccacttctaagccactgtgcctccagccccacaagactaaggagagagagcgcagcgtggtggagagtgagctgtgctgggaccattgtttccgtaacctcgttttctgtgtccagctgacacaccttcaaagtggcatcaggtcctaaactgtagcttgcaatgtgcctgtttccagaaaccaaggtgaaagtgcttttagacagtgttcccatgcaagagtcccttcccagcttttttctggaaatgcatgtttctctgaactctgagtcccaagaaaaatcacttgagacaccaagaaaatgggggaagtgctaaaattgtgtgggaattcaagcttaacaataaacatcaagacatttttgataaaaatgaatccactgacatcggggaggagcaagagaacagcacgctgacactgggtcagaggctaagaccgacatttctgggaaccactcccggaagggcacagaggagacgctttcagcctctcatcagccagcctggcctgtagctgctgcacgttatgagtgtgttcctggcatgactgcttctaacagtgagttttctggcaaatcaaataaatactaataagtctgtatgcacattatactttatacaaatcctatgagtgatgttccagaaataacaagttttgaaggcaaaataagtccttaaattggcaactttgacacataattccatgtagtagttaatcttgctagaagatcccaatgttgttattctaatacaatctgataatgttcactggcattttccactgttggcatctttactatagcctacagttgtttgtttgtttatttgagatggagtcttgctctgttgcctaggctagagtgcagtggcgtgatcttggctcactgcaacctccccctcccaggttcaagcagttctcctgcctcggcctccctagaagctgggattacaggcacgtgctaccacgcccagctaatttttgtatttttggtagagacgtggtttcatcatattggccaggctggtcttgaactcctgacctcaggtgatcagcctgtctcggcctcccacacacagtgctggggttacaggtgtgagccacgattcctggctgcctacagttctttgtaaagcagacaaaatagtttcattttttaaagaaatgaacatatatgaggcaacctgtacctaacttaggagttcagaaattccctggactgcctatacattttggtttctcattcctaattcccaaagattaaaatctgtcaggaatttggaaacattgaatcacaggccaaaataggaccatgtctccattcattcattcattcaacaattatttattgagcgcatgctatttttcaggcactgtgccacatattgagaatagagtagtgagtaagacaaagtcatcactttagggagtttatattttagaggagagaaagacaaatgaaagtgtttaggctgggcatggtggctcacacctgtaatcccagcactttgggaggtcaaggcaggtggatcacctgagctcaggagttcaagaccagcctgggcaacaatcccatctctaacaaaaacataaaaaattaaccaggtgtggtagcacatgcctgtggtctcagcaacttgggaggctgaggtggaaggatctcttgagcctgggaggcagaggttgcagtgagctgaggttgtgacactggacttcaacctgagtgacagatcccatctcaaaaacaaccctgggccgggtgtggtggctcacacctgtaatcccagcactttgggaggccgaggcaggaagatcttgaggtcaggagattgagaccatcctggctaacatggtgaaaccccgtctctactaaaaatacaaaaaattagctgggcatggtggcggttgcctatagtcccaactactcgggaggctgaggctggagaattgcttgaacccgggaggcagaagtagcagtgagccgagattgcaccgctgcactccagcctgggcaacagagtgagactccatct

SEQ ID NO: 1342 - DNA, 2817 bp, HOMO SAPIENS
gtgcgccctcgggggccctagtaacctccctccttcccttgggcccgggccggggaggctttctcgggcgcaggaggttccgcaggcccaggccaggccaggggaggcagccgatccgtcgtcggggttgacagttaccatggcgccgcctctggccccgctccctccccgggacccaaacggggccggacccgagtggagggagccgggggctgtgagcttcgcggacgtggccgtgtacttctgccgggaggagtggggctgcttgcggccagcgcagagggccctgtaccgggacgtgatgcgggagacctacggccacctgagcgctctcggaatcggaggcaacaagccagctctcatctcctgggtggaggaggaggccgaactgtggggtccggctgcccaggatccggaggtggcgaaatgtcagacacaaacggacccagcagattccagaaacaagaaaaaggaaagacaaagggaagggacgggagccctggagaagcccgaccctgtggccgccgggtctcctgggctgaagtctccccaagccccctcggccgggcccccttatggttgggagcagctgtccaaggcaccgcaccggggacgcccctccctctgtgcccacccccctgtcccccgagctgaccagcgtcatggctgctacgtgtgcgggaagagctttgcctggcgctccacactggtggagcacgtctacagtcacactggcgagaagcccttccactgcactgactgcggcaagggcttcggccacgcttcctccctgagcaaacaccgggccatccatcgtggggagcggccccaccgctgtctggagtgtggccgggccttcacgcagcgctcggcgctgacttcgcacctgcgcgtccacaccggcgagaaaccctatggctgcgccgactgtggccgccgcttcagccagagctctgccctctaccagcaccggcgcgtgcacagcggcgagacccccttcccctgcccggactgtggccgcgccttcgcctacccctcggacctgcggcgccacgtgcgcacccacaccggcgagaagccctacccgtgcccggactgcgggcgctgcttccgccagagctcggagatggcagcccacaggcgcacccacagcggcgagaagccctacccctgcccgcagtgcggccgccgctttggccagaagtcagccgtggccaaacaccagtgggttcatcggcccggggccgggggccacaggggccgggtcgccgggcgtctgtctgtgaccctgacccctggccacggagacctggacccgcccgtgggcttccagctgtacccggagatattccaggagtgtgggtgacggccttaaaagtgactatctagacattacgggaggcccgagatgggctcaggggcccgaacctctgcggcggcctgcagggaggtcccagaatctagggcaagagctggccctggggtgcggacagtctgatcttgggcccttagcagcctcctctgccagcaccttgctccccactgcccagggctctccaaggccccctctactgaggcagggctgagttgagaacccccagacctacataaggggaaccaaaagctgtttctcagcccagaggtgctaagaggactgaggtagaggagaaccttgttttacccattgtctttttaaattttttatcattatttttattcttgtgaccctcccagaacacaatactcattgtctttttatttatttatttatttatttctgagacagcttcctgctctgtcacccaggctggagtgcagtggtgtgaacagggctaactgcagcctcaacctgcagtgctcaaggaatcctctcccatcagccttccaaatatctgagactacaggcgggcaacactacggccagctaatttttaaattttacatagagatgaggttctcactgttgtccaggctggtctcaaactccttggctgaagtgatcctgtcgtctcggcttccgcaagtgctgggattacaggcgtgagctaccaccatgcctggcttccattgtctttgtgtgtgtgtgtgtgtgatggggttttgctcttgttgcccaggctggagtgcaatagcgcaatctcagctcactgcaacctctgcctccagagttcaagcaattctccttcctcagcctcccaagtagctgggactacaggcacccaccacctccattgtctttttactgcccaagttaaaatcctgtgactgtgtactggatctggcctgcggttgtcatatttattgatctgagtccaggcagtgtttttaagtgatatgagttagtagtgaaaattgaaaaggatattttacaaccaaatacaggttttctggtgtcttttgaaaaatccaaagatttggcaactcgacctaggctccgacaaaaccacagttgttgggagctgagccggagccagaactcacaattcaccgtggcccggccacccatccccaccactcccgtgggctcctgaccaagcaccacgtgccattcatcatggcttgcttttagtgtttttggtgtttatcttaaagtacagcgaagaagaaagggaagtatttcttagacccatgtctctgtccaaataggcctttccatctggcatttcccgctcatttatatgacttgctgagttcctatggtcatttgagtttgcaaacagtggtctgtagcactcaggttttctggagttggagagaaagggtggcaagagagaagtaaaagttggttttattttaaaaaaaaaaaaaaaaaaaaaa

SEQ ID NO: 1343 - DNA, 2684 bp, HOMO SAPIENS
ggccgcgttaagtctgagtgccgctttgagttgttgaatgaagtgaacttcatttgtcagcgttcggttcatgaactggaatgtaagaggcaccagaggattcctgctctgtcccctggtttgcggcttgcgacgttggacatccccggattgttgtttaatagagaaaactcacctgccttcttgcttttaagtagccccaaaagcagaaccttgatttgtctgtaaggaagaaacacaaaccttttaaaaagttccacttcgactctgcaccgccgacccccaatctctttaattttgccatagaagaggggttttttcaacatctctctcactatctggtgctgatctcactgcataatgactttctatttgtttggtattcgaagctttccgaagctttggaagagcccataccttgggctaggcccagggcactcttatgtgtcgctgtttctggcagaccgctgtggcatcaggaaccagcagaggttgttttctcttaaaacaatgtctccacagaataccaaagcaacgaatctgattgccaaggccagatatctcaggaaagatgagggcagtaataagcaagtttattctgttcctcatttttttttagctggagcagctaaggagagatcacagatgaattctcaaactgaagatcatgccttggcacctgtgaggaacactattcaactcccaacacaacctttgaattcagaggagtgggataaacttaaggaagatttaaaagaaaacaccggaaagaccagtttcgaaagttggatcatttcacagatggctggctgtcatagctctatagatgtggctaaatctctgctggcatgggtagcagccaaaaataatggtattgtaagttacgatttactggtcaagtatttgtatctctgtgtctttcatatgcagacatctgaagttattgatgtctttgaaattatgaaagccagatataagactttagaacctagaggttacagtcttctcatccggggattgatccattcagacagatggagagaagcattgttgctgttagaggacatcaaaaaagttataactccttcaaaaaagaactataatgactgtatccagggagctctccttcatcaagatgtaaacacagcttggaatttatatcaggaattgctaggtcatgatattgttcctatgttggaaactttaaaagctttctttgattttggaaaagacataaaggatgataactattcaaataaactactagatattctttcatatctaagaaataatcagctgtatccaggggagtcatttgcacacagtataaaaacatggtttgagagtgttcctggaaaacaatggaaaggacaattcaccacagtccgaaaaagtggccagtgttcgggctgtggaaaaaccatagagtctattcagctgagtccagaagaatatgaatgtcttaagggaaaaatcatgagggatgtgatagatggaggtgaccagtacagaaagacaacacctcaggaacttaagagatttgagaacttcataaaatctcgtcctccttttgatgttgtcattgatggtctcaatgttgccaaaatgtttcctaaagttcgtgaatctcaacttctcttgaatgtcgtctctcaactagccaaacggaatctgcgactgctggtcctaggccggaagcacatgctaagacggagttcccagtggagtcgggatgagatggaagaggtgcaaaagcaagccagctgtttttttgctgatgacatctcggaggatgatccattccttctgtatgccacactgcactccgggaatcactgcaggtttatcacaagagacctgatgcgggaccacaaggcctgtctgcctgatgccaagacccaacgcctgttttttaagtggcagcagggacatcagctggcaattgtaaataggtttccaggatcaaaactaacctttcagcgtattctcagctatgacacagtggtgcaaacaactggagactcgtggcacataccatatgatgaagacttggtagaaagatgttcctgtgaagtaccaaccaaatggctttgcctccaccaaaagacatagagattcttacctctatgctaagtttgtgtttgggtaccctctaggttggcatcagaggctcttgagctggtgtttgtttagggcattgcctctgtcctgaagataaaaggattctattaacagcattgacattgattttttaatgaaatgagatatatcttttcataaccagctgcgtttttttcccctaacatttgtttttggaggcttatcaagagttggagaacttagtgtagagcaaaacctgcatttctcctactgggccagctattccacttagcttgggtgactaatagtgcttttggtatccattttttgctacttctgaccttgccttccaggcctaccaatagcagaatcaatccatctgtccctgagatactcatgttgtttcaaatgcctcctcccatttctggcatagtctcattctctgtatgttatgccctatccacatggaatcatttatcgtcctctgtaataaactggccaagatactaaaaaaaaaaaaaaaaaaaaaaaaaaaaaaaaaaaaaaaaaaaaaaaaaaaaaaaaaaaaaaaaaaaaaaaaaaaa

SEQ ID NO: 1344 - DNA, 2416 bp, HOMO SAPIENS
gccagccacaagaccccggcgcacgctcaccatttccgaccgatccggtagccccgcgtagcgaacacttagcgagtcctgtgcctttctgcgcctgcgcaaaggtttctgtcaaaacggacagctctagctgcctatcaggagccagcgtgaggcgggggcgggcgagccgatcttggctccgccaggattcttggaaaatctgctttccactgtggcaaagcgaaaagctaaggagcagtgcgctaagctgtggaaaattcccaactccagccgtgcagaaaagatgctggttctggctggacgcggtggcttacgcctgtaattccagcactttgggaggccgagtcggaaggattgcttgagcccaagagttcgagaccagcctgggcaacatggagagaccccttctctactaaaaaataaacaaaattagccgggcgtggtggcgcgctcgtgtagttccagttactccagaggctgaggtaggaggatcgcctgaccaggagttcgaggctgcagtgagccgagattgcgccactgcaccccagcctgggcgacagagcaagagaccctgactaaaacaaaacaaaacaaaaaccatgctggttctcggtatcggaagaggctttcagtgctggttctcggtatcggaagaggctttcagctctcaatggaggtctaagctggttctggagtccctgagtggagcgtggtgggagggtatgaaggcaagtgggacggttgctgagacccgctttgcgcccagactgagccagagagaggcccagggccaaaatgcgcttcgggatcgggcaggcctggggtggggctggagtcaggtacctcgagtctccgggtaagatgccgtgcaagctcggagatgaattggttagggctggcctgggagtctttagaatccgagctcagccccgcctcgcgttacctagcagaaggcacttcacatctgtgtgttctgtcttgttctcacctctgaaagggggactcttcccagagccctatgttgtcctgttccggcaggccgcaaacgtttctgggtcctctaggagtaaataacttctgttaaaacatgctgccgtttagtgaaccctgtgccacattactgtgctgaacacgcacataacgttatctccggtagcttcagggaagtatcggtaacctcgatactttataaatgctgtttctcccaggcactgtagcttgctggattcaacgatgatctaactccaaagtttcattccacagtagctgctcttcagtgaggaaggatttggttctccttccaggagtgtctgcatgttaagaggattgactttactgcgaagaaacctagcagacaccaccgtaaccagatcaaagttagtattactggcaaggggagatattgatgccgtgtgccccgataaaaatgcgttaagggcacatcacctccgagtcattttccacaaaaactcccagccttaaaccatgagaaaatttcactaaatccagtgtgagggatgttctacaagatacctgtaccccgcccccgccccccaaaatctcaaagtcatgaaagcaaggaatgaatgcggaactgtcacagattagaggagtaaggagaaagaaaaataacatgggtgggaaaattggtgaaatctgagtaagggctgtagtttagtgttatttttaccagtgttaatttattagttttggtaattctagcatggttatatgggatcataacattggagaaagctgggtgaagactgtgcaggaactcttaaccatttttgcaacagctctgtaaatgtaaaattatttcaaaataaatttttaaaaggactggatccaaaggaatttctattgaatgctggaaacattaggaaagcatttagcaaggggaagaagtgctgcagagactggaccctaaaacatcctggaagataagcactggaagaatcaccactgtcttgcccatggagaaccagactgagaggagtgaaaggattttaacagattacaatcccagaagcaaaaaagagaatggccaatagttcatgtgacaggagccaaaatgagaatgaaggaggagctggaataggaccaagaatgtcccggagtggcaggcttagagttttggcccggcgcagtggctcacacctgtaatctcagcactttgggaggccaaggtgggcggatcacgaggtcaggagttcgagaccagtctggccaacatagtgaaagcccctctactaaaaatacacaaaaaattagccgggggtggtggtgtgcgcctgtaaccccagctattcgggaggctgaggcaggagaatcgcgtgaacccaggaggcggcggttgcagtgagccaagatcgccccactgcactccagcctgggcgacagaacaagactc

SEQ ID NO: 1345 - DNA, 4200 bp, HOMO SAPIENS
ccagcggctgggcctgagcgtcgagactcggggccgaggcggaggagcggccgccgcgccggggcccagccggagccgccgccctcgcccttgcctttgcctgcgcggctcagaatcaccatccgcggcgcgggagacgagccggccgtcccgggccgggggacccgcccgccatggccaccaaggctcgggttatgtatgattttgctgctgaacctggaaataatgaactgacggttaatgaaggagaaatcatcacaatcacaaatccggatgtaggtggaggatggctggaaggaagaaacatcaaaggagaacgagggctggttcccacagactacgttgaaattttacccagtgatggaaaagatcaattttcttgtggaaattcagtggctgaccaagccttccttgattctctctcagccagcacagctcaggccagttcgtcggctgccagcaacaatcaccaggttggcagtggcaatgacccctggtcagcctggagtgcctccaaatctgggaactgggaaagctcagaaggctggggggcccagccagagggggctggagcccaaagaaacacaaacactcccaacaactgggacactgccttcggccacccccaggcctaccaaggaccagcaactggtgatgatgatgactgggatgaagactgggatgggcccaaatcctcttcctactttaaggattcagagtcagctgatgcaggcggcgctcagcgaggaaacagtcgtgctagttcctcatccatgaaaattccccttaacaaatttcctggatttgcgaaacctggcacggaacagtatttgttggccaaacaactagcaaaacccaaagagaaaattcccatcattgttggagattatggcccaatgtgggtttatcctacctctacttttgactgtgtggtagcagatcccaggaaaggctccaaaatgtatggtctaaagagctacatcgaatatcagctaacacctactaacactaatcgatctgtaaaccacaggtataagcactttgactggttatatgagcgtctcctggttaagtttgggtcagccattccaatcccttctcttccagacaaacaagtcacaggccgctttgaagaggaatttatcaaaatgcgcatggagagacttcaggcctggatgaccaggatgtgtcgccatccagtaatctcagaaagtgaagttttccagcagttcctaaatttccgagatgagaaggaatggaaaactggaaagaggaaggccgagagagatgagctggcgggagtcatgatattttccaccatggaaccagaggcacctgacttggacttagtagaaatagagcagaagtgcgaggctgtggggaagttcaccaaggccatggatgacggcgtgaaggagctgctgacggtggggcaggagcactggaagcgctgcacgggcccattacccaaggaatatcagaagataggaaaggccttgcagagtttggccacagtgttcagttccagtggctatcaaggtgaaacagatctcaatgatgcaataacagaagcaggaaagacttatgaagaaattgccagtctcgtggcagaacagccaaagaaagatctccatttcctgatggaatgtaatcacgagtataaaggttttcttggctgcttccctgacatcattggcactcacaagggagcaatagaaaaagtgaaagaaagtgacaaactagttgcaacaagtaaaatcaccctacaagacaaacagaacatggtgaagagagtcagcatcatgtcttacgcgttgcaagctgagatgaatcactttcacagtaaccggatctatgattacaacagtgtcatccgcctgtacctggagcagcaagtgcaattttacgaaacgattgcagaaaagctgaggcaggccctcagccgctttccagtgatgtaggacagaacgggccttgaagagaatgccgcgtgctttctcctgacttggggcaatgcaattcaaaactttttttcccctattattcagaaaaaaaaggaaacaaaaccaaaaagaaagagttgcaaaaaactgcatttattttattagccaccctaaatgcgtcagttatttagggatggtcttttgttcatttccgcatccattatttaaaccagtggaaattgtctctatttttggaaagtacttaaaagttaccagaattttcaatggaaaatgaggggtttctccccactgatattttacatagagtcataatttatatgtcttataaattataagtcttatataatttataagtctcccacaatcttccagttcttacccagtgtcagataattaattactaattactttcttaaaaacatgaactatgccagaataaaaaatatctatgtttgtatatttttataactcctttcagtcctctggggctcctgtcattgagggaagtcgttacgcctttcactgccacagttacagctcaagtgcttacacttcaagagggaggacgctgggggcccctggggctgctagtgccatcgtggtgtgtggcaggtgggccatcccatgtccctccagggggaccccacagcctggcagatgagcagatacccctggccacccatgtcctcagcgacatttctgatgtgctgctcttatgtgaggaccagtgctttctctctttgcacttccttcctaatcttggttaaggcatgttttatgccatgaagaatacattagaagaattgagggactttgtagagaattttgtggctttggtccaacgggtgagtggctgtgcggaggcctgtgttcgggagggcctgggagaaggagggcacccagcaccccggcgtctctggccctttcttattctttggctcctcatccaccgtgatgagaagcgctgctgtggccacggcacactgcttggcttgggtggcgggttcatggccagttggtgtcatcagcaaagagaaaaagcacaggttagctccccattagatggaaaagtgtagggactgagaagggctgcagcctcagcagtgtacagagtccccggcgctctgaggttggagagaaagaacagaccagcgcccttcccgactacatccgaaacttcacacagggtgtttctgagcaccagcacttccagcgcttcacttaacggcataaagcaaaacaggaccttggcacaccgtcagctcgaactcaacactggcagccaccgtctcacccctgcggaggagcgctcccgtctcccacaggtgccttaccgcgttccctcccgctgctttcatttttctgacctaataattacgggaaatggaaagtctgggccagcatcaataaaatgacaccaaaaataagtagatgaaatcaaatgaatatgagaacatcttgttcttcaatatcacgggtttttgttaatgtttcataagtaattctccccacttgatttttcttctataaaatcccatagaacaatgtttatgctatagccatttaatatatgtacaaattgtaaagaatatgtataaatgttttacacgaatgtaagagcatgtagaagccaacatataaataaattgtttaaaaaaactgtacagtaaattctcaaagcactttttcaaaacactttttggactttgtgtgtgatttttgttgttgttgttaagtactttttattccagctgctgaaaatggtccaggtaatgaattcttccccaaatcctatttcttctgacatgaattcatcatttcagttccgtaggtcagtgttgcggtccgggaagcgtatcataaccacctgggagttgccaagaagcagacagtctcccagtgtctgactctcggatatttggatttgactggtgtgaggcaaagtgaaaaagggatgggggaaatggagatggcacgggctcctcagagcgtggtagccgactgtgaggaaaagcagagggaatgtgaaagaaaataagagaatccacgggatttgatgcctggaagattctccttcaagtggcaacatggcatatatatccttctccggggagtcacatgcaccatttggttcttagatacgttgatgttttgatttttaatgatttgtatcaacctgtaggtaccacagaagagctgtagtcatacaatcacataacttttacaaatatagtgg

SEQ ID NO: 1346 - DNA, 4475 bp, HOMO SAPIENS
tccggggctgagtccgcgtcgacgccggccgcggaggcggcaccatgggcaaggggtagaggggcaagttggccaccgccgccgccgggggtggtgggagagccgctccgggggcgggggccggtgggggagggaggggcgggcagccgcgccgccgcggcacttttttaattttttcgggtgccgcagcggcgacccctcggcgccgatgtccctgatccctggagcgacgacggccgctgcctaagctggaaagaggaatgccagctcctgagcaggcctcattggtggaggaggggcaaccacagacccgccaggaagctgcctccactggcccaggcatggaacccgagaccacagccaccactattctagcatccgtgaaggagcaggagcttcagtttcagcgactcacccgagaactggaagtggaaaggcagattgttgccagtcagctagaaagatgtaggcttggagcagaatcaccaagcatcgccagcaccagctcaactgagaagtcatttccttggagatcaacagacgtgccaaatactggtgtaagcaaacctagagtttctgacgctgtccagcccaacaactatctcatcaggacagagccagaacaaggaaccctctattcaccagaacagacatctctccatgaaagtgagggatcattgggtaactcaagaagttcaacacaaatgaattcttattccgacagtggataccaggaagcagggagtttccacaacagccagaacgtgagcaaggcagacaacagacagcagcattcattcataggatcaactaacaaccatgtggtgaggaattcaagagctgaaggacaaacactggttcagccatcagtagccaatcgggccatgagaagagttagttcagttccatctagagcacagtctccttcttatgttatcagcacaggcgtgtctccttcaagggggtctctgagaacttctctgggtagtggatttggctctccgtcagtgaccgacccccgacctctgaaccccagtgcatattcctccaccacattacctgctgcacgggcagcctctccgtactcacagagacccgcctccccaacagctatacggcggattgggtcagtcacctcccggcagacctccaatcccaacggaccaacccctcaataccaaaccaccgccagagtggggtccccactgaccctgacggatgcacagactcgagtagcttccccatcccaaggccaggtggggtcgtcgtcccccaaacgctcagggatgaccgccgtaccacagcatctgggaccttcactgcaaaggactgttcatgacatggagcaattcggacagcagcagtatgacatttatgagaggatggttccacccaggccagacagcctgacaggcttacggagttcctatgctagtcagcatagtcagcttgggcaagaccttcgttctgccgtgtctcccgacttgcacattactcctatatatgaggggaggacctattacagcccagtgtaccgcagcccaaaccatggaactgtggagctccaaggatcgcagacggcgttgtatcgcacaggttcagtaggtattggaaatctacaaaggacatccagccaacgaagtacccttacataccaaagaaataattatgctctgaacacaacagctacctacgcggagccctacaggcctatacaataccgagtgcaagagtgcaattataacaggcttcagcatgcagtgccggctgatgatggcaccacaagatccccatcaatagacagcattcagaaggaccccagggagtttgcctggcgtgatcctgagttgcctgaggtcattcacatgcttcagcaccagttcccatctgttcaggcaaatgcagcggcctacctgcagcacctgtgctttggtgacaacaaagtgaagatggaggtgtgtaggttagggggaatcaagcatctggttgaccttctggaccacagagttttggaagttcagaagaatgcttgtggtgcccttcgaaacctcgtttttggcaagtctacagatgaaaataaaatagcaatgaagaatgttggtgggatacctgccttgttgcgactgttgagaaaatctattgatgcagaagtaagggagcttgttacaggagttctttggaatttatcctcatgtgatgctgtaaaaatgacaatcattcgagatgctctctcaaccttaacaaacactgtgattgttccacattctggatggaataactcttcttttgatgatgatcataaaattaaatttcagacttcactagttctgcgtaacacgacaggttgcctaaggaacctcagctccgcgggggaagaagctcggaagcaaatgcggtcctgcgaggggctggtagactcactgttgtatgtgatccacacgtgtgtgaacacatccgattacgacagcaagacggtggagaactgcgtgtgcaccctgaggaacctgtcctatcggctggagctggaggtgccccaggcccggttactgggactgaacgaattggatgacttactaggaaaagagtctcccagcaaagactctgagccaagttgctgggggaagaagaagaaaaagaaaaagaggactccgcaagaagatcaatgggatggagttggtcctatcccaggactgtcgaagtcccccaaaggggttgagatgctgtggcacccatcggtggtaaaaccatatctgactcttctagcagaaagttccaacccagccaccttggaaggctctgcagggtctctccagaacctctctgctggcaactggaagtttgcagcatatatccgggcggccgtccgaaaagaaaaggggctccccatccttgtggagcttctgagaatggataacgatagagttgtttcttccgtggcaacagccttgaggaatatggcactagatgttcgcaacaaggagctcataggcaaatacgccatgcgagacctggtcaaccggctccccggcggcaatggccccagtgtcttgtctgatgagaccatggcagccatctgctgtgctctgcacgaggtcaccagcaaaaacatggagaacgcaaaagccctggccgactcaggaggcatagagaagctggtgaacataaccaaaggcaggggcgacagatcatctctgaaagtggtgaaggcagcagcccaggtcttgaatacattatggcaatatcgggacctccggagcatttataaaaaggatgggtggaatcagaaccattttattacacctgtgtcgacattggagcgagaccgattcaaatcacatccttccttgtctaccaccaaccaacagatgtcacccatcattcagtcaggctccagcaaaccttcaccaatttacatcagttcctattcctcaccagcaagagaacaaaatagacggctacagcatcaacagctgtattatagtcaagatgactccaacagaaagaactttgatgcatacagattgtatttgcagtctcctcatagctatgaagatccttattttgatgaccgagttcactttccagcttctactgattactcaacacagtatggactgaaatcgaccacaaattatgtagacttttattccactaaacgaccttcttatagagcagaacagtacccagggtccccagactcatgggtgtagcatcaagatgcccaacagaggaactctttctttctaaccttgttcagattgaggtgaaaagtccatcttgctgatttgatgattgaaatgtgaaagtgaagtggaaggaatgaatgaagtgtgttttttttttcttttttgaggaattatcagggaagtgaggaaatgtttgggagaggactttctaagctctatttaggtgttagatctaattacttatagattctgtagtctggtgaaggtgtgggtgacgtgatgagaggtttgagaaatgggtgaaatgaaatgggggatatgtaggtcaaatcaaattaaagatgatttttttaatgtgaataaagttatgttctgatagtttgtacagaaaaaataaaatggatgcccatgttttattgctattactaaatgtcaagattgtatgctattatgtcttgtaaatttcttttgttggtgtaaatatggaaatgccacattggttaagtgccatcatttgtaatgcaatgtgtcacttgaaaagagatttgaagaaactgacaacttcaaaaacaaatgagaagcccaaggaactgtgagcaattaaaagcaaaccgcgacaccctttgtctccaccacacatagtgtactttggaagcacaacgtccaggctggtaccgcagcgccatgcccattcctcgcctcgttcataggacacttcactgccattttctattcacataaaagaaaaataaatgtggaaatttcatccttggaaaaaaaaaaaaaaaa

SEQ ID NO: 1347 - DNA, 2621 bp, HOMO SAPIENS
agggtgccccgcgcgcgcgcgcgccggcagttcggccacgtccctggccacgtcgcgggcgatctcgccatcttcgccgcttcctctcaggggccgccgcctcctgagccgcccagccccggggccgccgcgctgcgccgaccgccaccgccgccgccgccatgaacattttccggctgactggggacctgtcccacctggcggccatcgtcatcctgctgctgaagatctggaagacgcgctcctgcgccggtatttctgggaaaagccagcttctgtttgcactggtcttcacaactcgttacctggatctttttacttcatttatttcattgtataacacatctatgaaggttatctaccttgcctgctcctatgccacagtgtacctgatctacctgaaatttaaggcaacctacgatggaaatcatgataccttccgagtggagtttctggtggtccctgtgggaggcctctcatttttagttaatcacgatttctctcctcttgagtactcaagggaaagaagctcagtttgccagcataagtgccaaagaccatcaccagcatctgtccttcagggtgctcggacagaattcttaccacagcaaaggcataagatgcttgatacggaaaatcagaaacttaactcttttgttgcagatagtcatcagtggctctgtaaaaacgcagaggaaaagagccagaaggtttctgtttaatgcatcttgccttatctttttttattactgtgtacaaagatttttttacacaaagaaacttaatgctgtattaataaattcagtgtgtagcttcaattgggatagttccaaaagtgaagattttgtgaggaataagtgcaaattttttttttattttaaaaaattctttgaaactcttaagtctttgtgtctgcaatgaaattgtactccttgacagttgatagattatatattcttccatccctcaaacttgcattccactatatttattttttggcaaaagatgagctgtatttgtttgaaatctgagacactatgttcaattggatgtatctgttcaaatttattcccacgtgacgtggaagtccttcgttggatgtcacaacactacatttaaggttggtaaggatgacttggaggtccatggttttcattaccaacattttaagattctgaatgtcgatggagtctcactgaagagtcaccaaaggtgcctgccctcctcccctgctgggaagtgtcagttggagactgtcccaagggtgctgaagaatccagtggcaggggttctggctgctttccatctgagtgtgggatgggaggggtgttcatgatcatttggatatagcaatctactctgagaaatggaacacaaggagttacctatcactttcacttataattccaaaagatgactacaaccatgtccatgctcagattcaaacagttttccatatcacttttgggtggtaagatgatttaattacagttttttttttaattggcagcaccactaaccattccttacattcttttttgtatgtgtggttttctttttatttaacccgcagccgacatcgtagtttcttgttttgttttgttttacagagctgttgcatgacttatgttaccatcctaaaaaacactatattaaacatggaataaattgtctttttatgaattaggctttttgaacatcctgtgttgggatttttttgtttttcaattggcaacaaaagctctgtagggctgcagacatttaaagttcacataatcatctgtaagacattatgtattttgtggaaatactagaatttttttcctgattttgccattatatggatttgctattttttgattaatgcaaaagtatatgactttgttttttatgtgatacaccataaatattaaagtgttgaatactaacagtgctgactacaagaaggatgtagtattttggctttctgcattacaacgtcttctggaggaagggagcaggatgggtttcatttgtatctagtgtgtgtcttaacatctttctaaatcggcagtgtaactgcatagtttaacttcctgtctgtctccctcattttactcttccctccttgtcttatgttttggcttttgtgtatcagagcatctttctttgcagcatcctagtcttgcttcagtttctgtggtctcttttcatcctgcttgaagattcggagtgtggaaggaggctaggaagtctggtgcagtaggtgagcagacctcttgctgcccagcccagggtgggtggggcgcacacctgtctttgtgcatgcaaatctgatacacctggcgcatcctctggagagcacaacgcatggaaaggtctggaagctctgtgtagccattccttctgcagtcatcctacccaagtaaaagtaaccttggctatgttaccaccgttttggtcacccaggaggacatcttagcaagggtgcctgcgagggagtgtgggactgggcctcatcctcgccggcgttggaaaccaaggccttgtatgccacgccttatgaagcactgtttcacagttactttcacttcccgaataaaggttaccaggtaattaatatttttaaaaaaaaaaaaaaa

SEQ ID NO: 1348 - DNA, 6725 bp, HOMO SAPIENS
cgccgccattttcccagagcgagaggcagtgacactgagcgggcgcagggggccgagtcggagaccgtgccggagttcgggagcggcaacagagtgggcatagacactccgagcagcctcgccgtcgtctctgcgttcctgttgactgcctggctgccccctcccctactcctcggttcctggtgaagaggctgcgcgctgctgtttggggagggggtgtgtggagccgggtcctgtgtccgcagtggctgctgtcggggggtcgcctgttcgcggaggtgcggagagactccttgggggtcgagcactgtggctggcatgccccagtgttttggataccaatgcataggactccatagtaatcgaatttaccagaggcgaacgtcatgagcatagtgatcccattgggggttgatacagcagagacgtcatacttggaaatggctgcaggttcagaaccagaatccgtagaagctagccctgtggtagttgagaaatccaacagttatccccaccagttatataccagcagctcacatcattcacacagttacattggtttgccctatgcggaccataattatggtgctcgtcctcctccgacacctccggcttcccctcctccatcagtccttattagcaaaaatgaagtaggcatatttaccactcctaattttgatgaaacttccagtgctactacaatcagcacatctgaggatggaagttatggtactgatgtaaccaggtgcatatgtggttttacacatgatgatggatacatgatctgttgtgacaaatgcagcgtttggcaacatattgactgcatggggattgataggcagcatattcctgatacatatctatgtgaacgttgtcagcctaggaatttggataaagagagggcagtgctactacaacgccggaaaagggaaaatatgtcagatggtgataccagtgcaactgagagtggtgatgaggttcctgtggaattatatactgcatttcagcatactccaacatcaattactttaactgcttcaagagtttccaaagttaatgataaaagaaggaaaaaaagcggggagaaagaacaacacatttcaaaatgtaaaaaggcatttcgtgaaggatctaggaagtcatcaagagttaagggttcagctccagagattgatccttcatctgatggttcaaattttggatgggagacaaagatcaaagcatggatggatcgatatgaagaagcaaataacaaccagtacagtgagggtgttcagagggaggcacaaagaatagctctgagattaggcaatggaaatgacaaaaaagagatgaataaatccgatttgaataccaacaatttgctcttcaaacctcctgtagagagccatatacaaaagaataagaaaattcttaaatctgcaaaagatttgcctcctgatgcacttatcattgaatacagagggaagtttatgctgagagaacagtttgaagcaaatgggtatttctttaaaagaccatacccttttgtgttattctactctaaatttcatgggctagaaatgtgtgttgatgcaaggacttttgggaatgaggctcgattcatcaggcggtcttgtacacccaatgcagaggtgaggcatgaaattcaagatggaaccatacatctttatatttattctatacacagtattccaaagggaactgaaattactattgcctttgattttgactatggaaattgtaagtacaaggtggactgtgcatgcctcaaagaaaacccagagtgccctgttctaaaacgtagttctgaatccatggaaaatatcaatagtggttatgagaccagacggaaaaaaggaaaaaaagacaaagatatttcaaaagaaaaagatacacaaaatcagaatattactttggattgtgaaggaacgaccaacaaaatgaagagcccagaaactaaacaaagaaagctttctccactgagactatcagtatcaaataatcaggaaccagattttattgatgatatagaagaaaaaactcctattagtaatgaagtagaaatggaatcagaggagcagattgcagaaaggaaaaggaagatgacaagagaagaaagaaaaatggaagcaattttgcaagcttttgccagacttgaaaagagagagaaaagaagagaacaagctttggaaaggatcagcacagccaaaactgaagttaaaactgaatgtaaagatacacagattgtcagtgatgctgaagttattcaggaacaagcaaaagaagaaaatgctagcaagccaacccctgccaaagtaaatagaactaaacagagaaaaagtttttctcggagtaggactcacattggacagcagcgtcggagacacagaactgtcagcatgtgttcagatatccagccatcttctcctgatatagaagttacttcacaacaaaatgatattgaaaatactgtacttacaatagaaccagaaactgaaactgcactagcagaaataattactgaaactgaagttccagcacttaataaatgtcctaccaagtaccccaaaacaaagaagcacttggttaatgaatggttaagtgagaagaatgagaagacaggaaaaccttcagatggcctttcagaaaggcctctacgcataactacagatcctgaagtgttagctacacaactcaattctttaccaggtctcacttacagcccccatgtatactccactcctaagcattatattagatttacttcaccattcctttcagaaaaaaggagaagaaaagaacctactgaaaacatttctggttcatgcaagaagcgatggttgaaacaagctctggaagaagaaaattcagcaattttacatagatttaattcaccctgtcaagaaagatccagaagtcctgcagtcaatggtgaaaataaaagtccactactattaaatgacagctgttcccttccagatttaactacaccactaaaaaaacgaagattttatcagttgctagattcggtttactcagaaacctccacacctactccttccccgtatgctacaccaactcacaccgatattactcctatggacccatcttttgccacgcctccacggataaaatcagatgatgaaacttgtagaaatggttataaacccatatattcaccagttaccccagtaactcctggtacaccaggaaataccatgcactttgagaatatttcttccccagaaagttctccagaaataaagagacgcacttatagtcaagagggatatgacagatcttcaaccatgttaacattggggccttttagaaattctaatttaactgaactgggtctgcaagaaataaagactattggttatacgagccctaggagtaggactgaagtcaacaggcagtgtcctggagaaaaggaacctgtgtcagaccttcagctaggactcgatgcagttgagccaactgccctacataaaaccctggaaacgcctgcacatgacagggctgagcccaacagccaactggactcgactcactctggacggggcacaatgtattcttcctgggtaaagagccctgacagaacaggagttaacttctcagtgaactccaacttgagggacctgacaccctcgcatcagttggaggttggaggaggcttccgaataagtgagtcaaagtgcctgatgcaggatgatactagaggcatgtttatggaaacaactgtgttttgtacttccgaagatgggcttgtatctggtttcggacggactgttaatgacaatttgatcgacgggaattgcacaccccagaatccaccacaaaagaaaaaggtttctctattagaataccgtaagagacaacgtgaagctaggaaaagtggctctaagacagagaactttccactcattagtgtatcaccccatgcaagtggaagcttgagcaacaatggtgatggctgtgccagcagtaatgacaatggggagcaggtggaccacactgctagcctacctttaccaacaccagctacagtttataatgccacttctgaagaaactagcaataactgccctgttaaggatgctactgctagtgagaagaatgaaccagaagttcaatggactgcctcaacttcagtggaacaagtcagagaaaggagttatcagagagctttacttctcagtgatcaccgaaaagataaagatagtgggggagaatcaccatgtgtctcatgttcaccgagtcatgttcagtcttcaccttcatctcattcaaatcacataccccagttgcaagctaagggcccagtcccttctttcagtgaacttatggaagaccctgatcctgaaaatccagaacccacaactacgaatgaatgtccatccccagatacttctcaaaatacttgtaaaagtcctccaaaaatgagcaagcctggttcacctggatctgtaattcctgctcaagcacacgggaaaatattcacaaaaccagatccccaatgggactccacagttagtgcatccgaagctgaaaatggtgttcacctaaaaacagagctccaacaaaaacagctatcaaataacaaccaagcactttcaaagaatcatcctcctcagacacacgttcgtaattcatctgagcaactttcacaaaagctgccttctgtgccaacaaagttgcactgtcctccatcacctcacctagaaaatcctccaaagtcatccacgcctcacacacctgtacagcatggttatctttcaccaaagcctccttcacagcagttaggatctccctacaggcctcatcattcacagtcacctcaagttggaacacctcagcgagagcctcaaagaaacttttatccagcagcacagaaccttccagccaatactcagcaggcaacttctggaacattatttacacagacaccctcaggacaatcttcagcaacatacagtcagtttaaccaacaaagtctgaacagcacggcaccaccccctccacctcctccacctccttcttcgtcttactatcaaaaccagcagccctctgcaaactttcagaattataatcagctcaaaggtagtctttctcaacaaactgtgtttacatcaggaccaaatcaagcacttcctggcaccacaagccagcaaacagttccaggacaccacgtgactccagggcattttttgccctctcagaaccctaccattcaccatcaaactgctgctgccgtagtcccccctcctcctccaccaccacctgctccaggaccgcaccttgtacaacagccgaattcccatcagcaacactctgtagcacatgtagtagggcctgttcatgcggtcacccctgggtcgcatattcattctcaaactgctggacaccacttacccccacccccaccccctcctggtcctgcccctcatcaccatccaccaccccatccatccacaggactccaaggtctacaagcacaacaccagcatgttgtaaattcagcacccccaccaccccctccgccgccaccttccagtgttttggcttctgggcatcataccacatcagctcaagccttacaccacccacctcatcaaggacctccactttttccttcgagtgctcatccaactgtaccaccgtatccctcacaagctacacatcataccactttgggaccgggaccccagcaccagccttctggaacagggccacattgtccattacctgtcacaggtcctcatctccagccccaaggaccaaacagtattccaacacctactgcttcagggttctgtcctcatcctggctctgtggccctgccacatggggttcaaggacctcagcaggcatctccagtgcctggacagattccaattcacagagcacaggtgccaccaacatttcaaaacaattaccatgggtcagggtggcattaaaatggactccaaaaacatttttttaaatgttctgtaagataaactgtatatttcatatgtacctgttaaggtactttttaaagcttgtacatgaacctttgtataaaaaacaccagtgctctttcgttgtatttttctcatttttgctttttaaaattcctttaaaaaatgtgctgttaagccagtattaggtatctttattttgtaagtgaacattccagctgtttttttctggcagatctgatgctgatttgatgctgtatgatcttttttttttttttagttaaattcatttagtgaatgttctattattttatacatacacattaagtactcagctaagtaatggcactatgaggattttttttttctttcctgtcagcagcagttctgtgaatgcatcttaggtataaaaatgcaatacagatttttatattttggtgtggacatggctcattttgttttaccagttatttgcaagcaaaatgtaatttaatgtatagatgatttctaatgtctcctgacaaactgtaaatactgcatttcttttgcgtatataattgcttacagcttttctcatttgatatatagcattgtacatatgacaagtcttttgcaaaactgtgtgatctttgtgaaagtagtacagtatatgacctttaatttcttttttattttaaatatactgtcacactgaagcactggttgggcattttaattcatgttaataaatcacaattatgtcagttttaaaaaaaaaaa

SEQ ID NO: 1349 - DNA, 380 bp, HOMO SAPIENS
agttaggctatgcttcaagctgccagaatggatgcagaatttgcttgggagccatgtgaaagtgagctttaaccccactttcctactttccagttgtatggcatagagtaaaatctttattcctgatgagcttcaagctcctcatctgtgaagtgggtaaaataatatctgcttctgagacttattttgaagatcacacaaaacggacctaattggcctgcgataaacggtagctcttgacttttacacttcactgtttcccttggtactcaagttaatctcattttacctgaaggagacacagacccatagcctctgctgggagtgttctggttaaaggtaagccaaccaacccgggagagctatgggtccagaagcca

SEQ ID NO: 1350 - DNA, 483 bp, HOMO SAPIENS
  misc_feature (42)..(42): n is a, c, g, or t
  misc_feature (248)..(248): n is a, c, g, or t
  misc_feature (288)..(288): n is a, c, g, or t
  misc_feature (290)..(290): n is a, c, g, or t
tgtgaccacggaaggccgcaggggaaggcagattacatatgngaaggaggtgtctgtggccatgtgtctttaagggagagcccacagaaaaatgagcctaagggaaataaagcgagaagtctgcttcaatcacagagacggtaaggtgtaaattcttaagaaggtcagaggaatgattgacaattatgtgagtgactcacaaagtgaaatgatggaaagactgaactgcatgagagttaaaaaaaaantcttttccagggcaataaagctctgtctacacagcgtaangnatggtttaaaaatagggccaccactcacgcctgtaatcccagcactttgggaggccgaggcgggcggatcgtgaggtcaggagttcgagaccagcctgatcaacacggtgaaaccctgtctctactaaaaatacaaaaaatattagccgggtgtgggggcgggcgcctgtaatcctagctattcaggtggctg

SEQ ID NO: 1351 - DNA, 3316 bp, HOMO SAPIENS
atctgctcctgtaagcccagagaggcccagggacaacttccactttattctggatgttttcacttttgggacatcctgttctgagtcaagattcctccttctgaacatgggactttccagaaggaccacagctcctcccgtgcatccactcggcctgggaggttctggattttggctgtcgagggagtttgcctgcctctccagagaaagatggtcatgaggcccctgtggagtctgcttctctgggaagccctacttcccattacagttactggtgcccaagtgctgagcaaagtcgggggctcggtgctgctggtggcagcgcgtccccctggcttccaagtccgtgaggctatctggcgatctctctggccttcagaagagctcctggccacgtttttccgaggctccctggagactctgtaccattcccgcttcctgggccgagcccagctacacagcaacctcagcctggagctcgggccgctggagtctggagacagcggcaacttctccgtgttgatggtggacacaaggggccagccctggacccagaccctccagctcaaggtgtacgatgcagtgcccaggcccgtggtacaagtgttcattgctgtagaaagggatgctcagccctccaagacctgccaggttttcttgtcctgttgggcccccaacatcagcgaaataacctatagctggcgacgggagacaaccatggactttggtatggaaccacacagcctcttcacagacggacaggtgctgagcatttccctgggaccaggagacagagatgtggcctattcctgcattgtctccaaccctgtcagctgggacttggccacagtcacgccctgggatagctgtcatcatgaggcagcaccagggaaggcctcctacaaagatgtgctgctggtggtggtgcctgtctcgctgctcctgatgctggttactctcttctctgcctggcactggtgcccctgctcagggaaaaagaaaaaggatgtccatgctgacagagtgggtccagagacagagaacccccttgtgcaggatctgccataaaggacaatatgaactgatgcctggactatcagtaaccccactgcacaggcacacgatgctctgggacataactggtgcctggaaatcaccatggtcctcatatctcccatgggaatcctgtcctgcctcgaaggagcagcctgggcagccatcacaccacgaggacaggaagcaccagcacgtttcacacctcccccttccctctcccatcttctcatatcctggctcttctctgggcaagatgagccaagcagaacattccatccaggacactggaagttctccaggatccagatccatggggacattaatagtccaaggcattccctcccccaccactattcataaagtattaaccaactggcaccaaggaattgcctccagcctgagtcctaggctctaaaagatattacatatttgaactaatagaggaactctgagtcacccatgccagcatcagcttcagccccagaccctgcagtttgagatctgatgcttcctgagggccaaggcattgctgtaagaaaaggtctagaaataggtgaaagtgagaggtgggggacaggggtttctctttctggcctaaggactttcaggtaatcagagttcatgggccctcaaaggtaaattgcagttgtagacaccgaggatggttgacaacccatggttgagatgggcaccgttttgcaggaaacaccatattaatagacatcctcaccatctccatccgctctcacgcctcctgcaggatctgggagtgagggtggagagtctttcctcacgctccagcacagtggccaggaaaagaaatactgaatttgccccagccaacaggacgttcttgcacaacttcaagaaaagcagctcagctcaggatgagtcttcctgcctgaaactgagagagtgaagaaccataaaacgctatgcagaaggaacattatggagagaaagggtactgaggcactctagaatctgccacattcattttcaaatgcaaatgcagaagacttaccttagttcaaggggaggggacaaagaccccacagcccaacagcaggactgtagaggtcactctgactccatcaaactttttattgtggccatcttaggaaaatacattctgcccctgaatgattctgtctagaaaagctctggagtattgatcactactggaaaaacacttaaggagctaaacttaccttcggggattattagctgataaggttcacagtttctctcacccaggtgtaactggattttttctggggcctcaatccagtcttgataacagcgaggaaagaggtattgaagaaacaggggtgggtttgaagtactattttcccagggtggcttcaatctccccacctaggatgtcagccctgtccaaggaccttccctcttctccccagttcctgggcaatcacttcaccttggacaaaggatcagcacagctggcctccagatccacatcaccactcttccactcgattgttcccagatcctccctgcctggcctgctcagaggttccctgttggtaacctggctttatcaaattctcatccctttcccacacccacttctctcctatcaccttcccccaagattacctgaacagggtccatggccactcaacctgtcagcttgcaccatccccacctgccacctacagtcaggccacatgcctggtcactgaatcatgcaaaactggcctcagtccctaaaaatgatgtggaaaggaaagcccaggatctgacaatgagccctggtggatttgtggggaaaaaatacacagcactccccacctttctttcgttcatctccagggccccacctcagatcaaagcagctctggatgagatgggacctgcagctctccctccacaaggtgactcttagcaacctcatttcgacagtggtttgtagcgtggtgcaccagggccttgttgaacagatccacactgctctaataaagttcccatccttaatgactcacttgtcaactagtggactaattaaccctccaccaaaaaaacacaaagtgcttctgtgagaccaattttgtgctaatgagcattgagactgatgctttgtaagtcacaccacaacaaatattgattgagggcgctgcatgtgctgggtacatttcttggcacttgggaatcagtagtcaagcgaaacccttgcctttgagagtttatggtctggataatataaataaacaagtaagcataaaaaaaaaaaaaaaaa

SEQ ID NO: 1352 - DNA, 2320 bp, HOMO SAPIENS
aagtgtgaaaaaagcgcgcctctgttgggacgggaaatcagcctttctattggtcagggttagaaaccccgcctttgaggcattttcaaccaatggaagcgcggcattcttcatttaaactgtctataaatttctgcctagtcaaagttaagagtggcgccagggatttgaaccgcgctgacgaagtttggtgatccatcttccgagtatcgccgggatttcgaatcgcgatgatcatcccctctctagaggagctggactccctcaagtacagtgacctgcagaacttagccaagagtctgggtctccgggccaacctgagggcaaccaagttgttaaaagccttgaaaggctacattaaacatgaggcaagaaaaggaaatgagaatcaggatgaaagtcaaacttctgcatcctcttgtgatgagactgagatacagatcagcaaccaggaagaagctgagagacagccacttggccatgtcaccaaaacaaggagaaggtgcaagactgtccgtgtggaccctgactcacagcagaatcattcagagataaaaataagtaatcccactgaattccagaatcatgaaaagcaggaaagccaggatctcagagctactgcaaaagttccttctccaccagacgagcaccaagaagctgagaatgctgtttcctcaggtaacagagattcaaaggtaccttcagaaggaaagaaatctctctacacagatgagtcatccaaacctggaaaaaataaaagaactgcaatcactactccaaactttaagaagcttcatgaagctcattttaaggaaatggagtccattgatcaatatattgagagaaaaaagaaacattttgaagaacacaattccatgaatgaactgaagcagcagcccatcaataagggaggggtcaggactccagtacctccaagaggaagactctctgtggcttctactcccatcagccaacgacgctcgcaaggccggtcttgtggccctgcaagtcagagtaccttgggtctgaaggggtcactcaagcgctctgctatctctgcagctaaaacgggtgtcaggttttcagctgctactaaagataatgagcataagcgttcactgaccaagactccagccagaaagtctgcacatgtgaccgtgtctgggggcaccccaaaaggcgaggctgtgcttgggacacacaaattaaagaccatcacggggaattctgctgctggaaagctaaaaccatgggggcaatctaaagaaaataattatctaaatcaacatgtcaacagaattaacttctacaagaaaacttacaaacaaccccatctccagacaaaggaagagcaacggaagaaacgcgagcaagaacgaaaggagaagaaagcaaaggttttgggaatgcgaaggggcctcattttggctgaagattaataattttttaacatcttgtaaatattcctgtattctcaacttttttccttttgtaaattttttttttttgctgtcatccccactttagtcacgagatctttttctgctaactgttcatagtctgtgtagtgtccatgggttcttcatgtgctatgatctctgaaaagacgttatcaccttaaagctcaaattctttgggatggtttttacttaagtccattaacaattcaggtttctaacgagacccatcctaaaattctgtttctagatttttaatgtcaagttcccaagttccccctgctggttctaatattaacagaactgcagtcttctgctagccaatagcatttacctgatggcagctagttatgcaagcttcaggagaatttgaacaataacaagaatagggtaagctgggatagaaaggccacctcttcactctctatagaatatagtaacctttatgaaacggggccatatagtttggttatgacatcaatattttacctaggtgaaattgtttaggcttatgtaccttcgttcaaatatcctcatgtaattgccatctgtcactcactatattcacaaaaataaaactctacaactcattctaacattgcttacttaaaagctacatagccctatcgaaatgcgaggattaatgctttaatgcttttagagacagggtctcactgtgttgcccaggctggtctcaaactccaccaaatgtacttcttattcattttatggaaaagactaggctttgcttagtatcatgtccatgtttccttcacctcagtggagcttctgagttttatactgctcaagatcgtcataaataaaattttttctcattgtcatagaaaaaaaaaaaaaaaaaa

SEQ ID NO: 1353 - DNA, 341 bp, HOMO SAPIENS
gtgggattaggccttatctgcaaataaactttggtagtgatataattataagagaacaataatatatttctgtagtctaccatttagtccatgttttatgcacgtttagaccattgaattaatctctgaaacaatagaaataaattctttactagaaatagcttgcttttgccttggctttgtggcaaagcgacattagggaacatatatggttgttgttgaacctgattgctttagcagcccttgggttgatagtatcaggttccagcctgccctgctaggtcaacgtggacccagggctttaaagagaaaagttcagggaaagttcacttctattgttt

SEQ ID NO: 1354 - DNA, 461 bp, HOMO SAPIENS
atgatctccgccaaagtgtaacctggctgggagatagagttatgaacttgcaacaccgtatgcaattacagtgtgattggaatacttctgattattgcataacgccttatgcttataatcaagatcaacatagctgggaaaatgtctcaagacatttaaaagcctgggatgataacttaaccttggatatttcacaacttaaagagcaaatctttgaggcttcacaagcccatttatccacagttcctggctcacacatttttgaaggcataactaaacaattacctgattttaatcccttcaaatggctcaaacccgtcagaggatcattgttgttactggcattattaatattggtatgcttatgttgtctccttttagtctgcagatgcctctaaggagtccgaaaccaagtccgaagtcaacaacaagcaatgatggcgatggcgattctagttaat

SEQ ID NO: 1355 - DNA, 3946 bp, HOMO SAPIENS
gtcggtggcagcggagcacggagaagaggcccgggcggcccggcggcctggaggccgcgaaaggtggaggccgggccgcccttgtgcaccgcaggattgacccgggaaggggcagaagctagcgagccccgcccggccgccgggaaggtgggggaagccccgtgcaccccccgccctccggccgccgccgccccgctggccctgcagccgtcgccgctgcctcgggctacagccccgggctcggcggtcccggctggggaaggagggcggcgagcgcgtccggagccgccggagatggcgggagggcactgcggcagcttccccgcggcggcggccggcagcggcgagatcgtccaactgaacgtaggggggaccagatttagtacctcaagacaaactcttatgtggattccagattcttttttttccagtttgctgagtgggagaatttcaacacttcgagatgaaactggtgctatatttattgatagagatccagcagcatttgcacccattttaaattttcttcggacaaaagaactagacttaaggggagtgagtattaatgttctcaggcatgaagcagaattttacgggatcactccattagtaagaaggcttctcttatgtgaagaattggagcgttcctcttgtggcagtgtcctttttcatggttacttgcccccaccaggtattcctagtcgtaaaataaacaacacagtcagatctgctgattctaggaatggtctaaattctacagaaggtgaagcccggggaaatggtacacagcctgttctctctggaacgggagaagaaactgttaggctaggatttcctgtggatccacgaaaggtgctaatagtagctggccatcacaactggattgtagctgcatatgcccattttgctgtgtgttacagaatcaaagaatcttcaggatggcagcaagtgtttacgagcccatatttggattggactatcgaacgagtagctttaaatgcaaaggtggttggagggccacatggagacaaagacaaaatggttgctgttgcctcagagagtagcatcatcttgtggagtgttcaggatgggggaagtggaagtgaaattggagtgttcagcctgggtgttcctgtagatgctctcttctttattggtaaccagttggtggccacgagtcatacagggaaagtgggagtgtggaatgctgtcactcagcactggcaggttcaagatgttgttcctataactagttatgacactgctggatcattccttctgcttggatgtaacaatggatcaatatattacatagatatgcagaagttccccttgcgaatgaaagataatgatcttcttgtaactgaactgtatcatgatccttcaaatgatgctattactgctctgagtgtttacctcacacccaaaacaagtgtcagtggtaactggatcgagatcgcctatggtacgagctctggagcagtacgagtgattgtacaacacccagagacagttgggtcaggtcctcagctttttcagactttcacagttcaccgaagtcccgtaacaaaaatcatgctatcagagaagcatcttgtatcagtctgtgcagataataatcatgtccggacgtggacagtaacacgattcagaggaatgatctctactcagccaggttctactcctttagcgtcattcaagatactatccctggaggagacagaaagtcatggtagctattcctctggaaatgacataggaccttttggagagcgagacgatcaacaggtgtttatccagaaagttgttcccatcaccaacaaactatttgtaagactctcatcgactggaaaaagaatatgtgagatccaggctgttgactgtactacaatatcctcatttacagtgagggaatgtgagggatccagtaggatgggctcaagaccaaggcgctacttgttcacaggccatacaaatggcagtattcaaatgtgggatctgaccactgctatggatatggttaacaaaagtgaagataaggatgtaggtggtccaaccgaagaagagctactcaaattactcgatcaatgtgatttgagcacatctcgctgtgctactcctaacatcagtccagcaacttccgtagttcagcatagccacttacgagaatcaaattctagccttcagcttcagcaccatgataccacccatgaagcagctacttacggttccatgaggccttacagagaaagtcctttattagcaagggcaagaaggactgagagctttcacagttatagggacttccagactattaatttgaacagaaatgtagaaagagctgtccctgaaaatggtaacttgggtccaatacaagctgaagtgaaaggggcaacaggggaatgtaatatatctgagagaaagtctcctggagtagaaataaaaagtttgagagaattggatagtggattggaagtgcataaaatagctgaaggtttttcagaatccaagaaaaggtcatcagaagatgaaaatgaaaataaaatagagtttaggaagaaaggaggatttgaagggggaggattccttggaagaaagaaagttccctatctggcgtcatcaccaagtacttccgatggaggaactgactcacctggtactgcgtccccatctcctacaaagactactccatctcctcggcataaaaaaagtgattcttcaggtcaggagtacagcttgtgaaaactcaccaaaatgaatagttgtttcgttacatttagatgaaagttaaactttactgaatttcagtacattagtttttacactaaaactttacaagataaaattggacttcatttagtatctttttaacagaattacttggaataatgagatacaataatcatatctcttttgacattttggaaatttttttaattttacaagtacatttaacagatcatttataaagcaggagtccattttaacacttaccgactttttttggtttggaaacatattaccacgtcttaataggatggtgcccatataggtgagcatccctttagatcatgggaaccagcagactgcattcctaatcttcattatgcctgagacttgtcttacaatgttacctttaagtgaatcacataattgtctttggaacttggtctcccaacacttattgtgattgcaaagtgtttaccagatatttgatgaggtgctatgtttgtgaaaaacatatcatgtaattcaaaaacactattgatattgaataccagataccactatgtagtaagtcttttaggatgattttaatttagtcgtgcgtcattttctgattctcatcattgggagatcttaaatcttagcaagcattagcaatattaaatgccaaaattccattgaaactttcaagttggagcaattgtctgtgtttgaaaagatgaaataaaaataataatcaagggcaaagctttgagtgcccagaagggaaagctgtaccagttgctaacctgtcttgtttcaggagccaccatgtttttttttcagtgttaacaacaatcatgataattaaattaaaacactagtttgttcacttgtaggactgcagttctgaattttgggttaaaggttttggctgctgtaagaatgtgaatttgaatgtattttgaattgtaagagcaaaagaacgtttttgtacaattttttttcatttaattggaatgatcttcaggtttctacaaatagggtaattgtaaatttaaagcattagcatttattggtgaataatgtatatatccccattccaagaaatataagtgagtgaagttgaaataaaatctttaaaatttactatattgccagtggtttcacaacagttctcttgtatttatttatcaattaaatcaaataaaaatgattatgtcaaaaaaaaaaaaaaaaa

SEQ ID NO: 1356 - DNA, 5072 bp, HOMO SAPIENS
ggaggcggggccgaccaagagcaggagctggagtctgagccggtggttgcagcggaggcggtgatgtcggtgcaggttgtgtcagccgcggctgccgccaaggtgcctgaggtggagctgaaggacctgagcccctccgaggcggagtcgcaactaggactgagcacggccgccgtgggcgccatggcccccccggcgggcggtggagaccctgaggctccagctcccgccgcggagcggcccccggtccccggcccgggctcggggcccgccgccgctctcagccccgccgccgggaaggtgcctcaggcgtcggccatgaagcggagcgacccacatcaccagcaccagcggcaccgcgacggcggcgaggccctggtcagccccgacggcaccgtcaccgaggcgccgcgcacagtcaagaagatccagtttgctgaccagaagcaagaattcaacaaacgtcccaccaaaattggacgtcgctctttgtctcgttccatttctcagtcatctactgacagctacagctcagcggcttcatatacagatagctctgatgatgagacatcgcccagggacaagcagcaaaagaactctaagggaagcagtgacttctgtgttaagaacatcaaacaggcagagtttggacgaagagaaattgaaattgctgaacaagaaatgcctgcattgatggctttgaggaagagagctcaaggagaaaagcctttggctggagccaaaatcgtgggttgcacacacatcactgctcagactgctgtgcttatggaaactctgggtgctctgggggcccagtgccgatgggctgcctgcaacatctattccactctcaatgaagtggctgctgctctagcagaaagtggatttcctgtttttgcctggaagggagagtcagaagatgacttttggtggtgtatcgatagatgtgtgaatgtggagggctggcagccaaacatgatcttggatgatggaggggatcttacccactggatttataaaaagtatcccaacatgtttaagaaaatcaagggcatagtagaggagagtgttactggagttcacaggctgtaccaactgtccaaagctgggaagctgtgtgttccagccatgaatgtcaatgactcagtcaccaaacagaaatttgacaacctctactgttgccgtgaatcaattcttgatggacttaaaaggacaacagacatgatgtttggtggaaagcaagtggtagtctgtggctatggagaggtggggaaagggtgctgtgctgccctgaaagccatgggctccattgtgtatgtaactgaaattgaccccatctgtgccctgcaagcctgtatggatggatttcgactggtgaaattaaatgaggtcatccgacaagtggacattgttattacctgtacaggtaacaagaatgtggtaaccagagagcacttggaccgtatgaagaatagctgcatcgtttgtaacatgggacattccaacacagagattgacgtggcgagtctgcggacaccagaactgacctgggagcgagtgagatctcaagttgaccatgtgatatggcctgatggcaagaggatagtactgctggcagagggccgcctgctgaaccttagctgctccacagtgcctacatttgtgctctcaatcactgctactactcaggctcttgccttgatagagctttacaatgctcctgagggtcgctataagcaggatgtctacctgttgcccaagaagatggatgagtatgtggccagcctacacctgcctacctttgatgcccacttgacagagctgacagatgaacaggccaagtatctgggactcaacaagaatgggcccttcaagcctaattactacaggtattaagttcctgtaactcaaaccagaatttttaaggaatagaactccaagccttttctccactactatacaagaaagaattcagcaagctgcttctccaatcaaagctgcctgccgtgctcaccctgtgtgttaggttatttatttattaaaatcaagaatcctgtgcctgtagtgttggcccagagtgtggttactgccctgagggccatgaaagccacagaggatgggctgaggaaggaaagaaatggggttactgctcccagtgcatcatttgcatcattccccattgactgaatcctcagcagtggccgtttttcctcttgtccaggctcacgagttagtccagggattccatactccctattccctggagttttctggaataaattttcagcacctgcttttctcagcttggcccttccccgggtgaggccgtttggaattaacatggccagtgtttcacacaagattgggttcccaatcttgaccatcactatcactgccttctttatataaaggctaataaggaaggagtgttatttatggctttgccaagctacatcaagaactcagctgtgctgtgcctaccaggggtctcctttcttacccaggactcctttcttctccttgaatatttatgtccattttaacacttcctggttgcaagagggatgtgcctccattatttcctccacagttttggtatttgtcagacatttgttctgctgtctttctaatccagccaacgtctgctcaggaagtggggccagctccactgggacccatagttttacttccttgtcatttgattggatagtttccaaggaagcccctccagattggcactatctcagaaaaggagagcttgttgtgaaacactgcttcctgaaacttcctgctattgcctaaagctacgtctgaaactgagtagggaaaggcatacttttccagggacttagggggataggctttggaaatgggacaggtctttcagactcacagcttgataccctaacaaagcagagtatatttatttgtttcccaggaaggccattgcagtttgactggctgagggatacagagatgaaattgtaaactgtatccagattatcaaagctaatttgactagtttgaacctcgtcagacattcattcctttggccattgccatggatgaaaccgagatctgcagtctgatctgtggacttctctgctggcatatcttttatgatttaacctcttccatttgatgattctgtatttcagagtcagtttcttgagtaactccagtgctacaaaaagaattagtaatgtggtgtgggcagcgtgacattttatgtcccacccaaaaattggattccttttggagactgatctgttggtctcaggcatttcattaggaccagattggttctaagagttagtctggactggccctaggaaacttgaattaaataagcctcttccccttaccgatcctttttaacactctcaggtttgtttgtttcccacttttttcctatgctggtctgcctcaaagtctcaagaccaaggtgactcaagataacaccagaccacgcatgatcaccaaaaccttcccatcctgattctcttcttctacctctaccctctccaacttctcctggtcttcacatatactctcaaagctagtctgaaagtgaccttactttcggaagtagggaagtggaactttggtaaatgactgtttgcctcatttaatagtatacaggctcagcccatagactacagttcttcagaggccatatgtctcagcaagtactggttatattctttttttgtaaggaagatcataaatgctaaaaattccactaagccattcagttcttccttttgcctacctagtcctgatttttgtattaattggttccctttagcaagggattcagatctttgtaccttatcttatatccagagcagattccatttggcagatagatggtctctagcctattgtattcttagaccaaaaatcataacctgctgtttctcagcaaagccttgctctctggagcttactatgtgctggtacttaaagagtacattctgccttgctgtagtgaagagacccactccaaataaaaaaggggccacacggggcttctaagttaggttgccagtgttgctgcccatgatgagttatttgcctctgagtttcagatgacctctctgtagggacactgtgttatcaaccattaagaagaaagaaccacaagcctcccaagtatttgggttctatcttagggttgaaatctggtcattattccctctacccttggaatcagagcaatgtgtcttctttcctccaacctcttaccttagatgcatcctggttatctggaagcatgggaaagaaggctacttatctctttgtatgtggctccagtctgtgaggatacataacattttctctacaatgaatctgtgctaatattttgccttctttctttcttttcttttcacccttagagacagggtttcactatgttgcccaggctggtctcaaactcctgggctcaagcaatcctcctgcctcagcttcctgagtagctggaaccacaggtgtgtgctaccgtgcctggcacttttttgccttcttaatggagatattcagttttctttttttcatttaaacaaagaaaaaaaatgtatctactctaccttccctctgctctcctccctccctatcctacttgcccatatgagcacggctccccatggccacatactcctgcaaagcttttatgctgcttcgcttttctctaaacagatctgatattgctgctcctgtggttttctcaaaattaactttgccgtggtttttaaaaaggaatcaaaatgcattgttgcattaagctttttcaataaaggaaaattacggaaggaaaataggcaacaccagcaaattatatgtggacaggttctaaactctatatatacatatatatatatatatctatatatctatatacgtaatcatctagttctgtcatcttactgaaaggaataacacttctaaagatcaccatttctgagaagttcttggaaatctttatgtctaagtgattgtattagatcagcaataatgactatgtaatctcaaaaaacaaataaaatattcttaacatggaaaaaaaaaaa

SEQ ID NO: 1357 - DNA, 1494 bp, HOMO SAPIENS
agtgaaacagaaggggaggtgcagtttcagaacccagccagcctctctcttgctgcctagcctcctgccggcctcatcttcgcccagccaaccccgcctggagccctatggccaactgcgagttcagcccggtgtccggggacaaaccctgctgccggctctctaggagagcccaactctgtcttggcgtcagtatcctggtcctgatcctcgtcgtggtgctcgcggtggtcgtcccgaggtggcgccagcagtggagcggtccgggcaccaccaagcgctttcccgagaccgtcctggcgcgatgcgtcaagtacactgaaattcatcctgagatgagacatgtagactgccaaagtgtatgggatgctttcaagggtgcatttatttcaaaacatccttgcaacattactgaagaagactatcagccactaatgaagttgggaactcagaccgtaccttgcaacaagattcttctttggagcagaataaaagatctggcccatcagttcacacaggtccagcgggacatgttcaccctggaggacacgctgctaggctaccttgctgatgacctcacatggtgtggtgaattcaacacttccaaaataaactatcaatcttgcccagactggagaaaggactgcagcaacaaccctgtttcagtattctggaaaacggtttcccgcaggtttgcagaagctgcctgtgatgtggtccatgtgatgctcaatggatcccgcagtaaaatctttgacaaaaacagcacttttgggagtgtggaagtccataatttgcaaccagagaaggttcagacactagaggcctgggtgatacatggtggaagagaagattccagagacttatgccaggatcccaccataaaagagctggaatcgattataagcaaaaggaatattcaattttcctgcaagaatatctacagacctgacaagtttcttcagtgtgtgaaaaatcctgaggattcatcttgcacatctgagatctgagccagtcgctgtggttgttttagctccttgactccttgtggtttatgtcatcatacatgactcagcatacctgctggtgcagagctgaagattttggagggtcctccacaataaggtcaatgccagagacggaagcctttttccccaaagtcttaaaataacttatatcatcagcatacctttattgtgatctatcaatagtcaagaaaaattattgtataagattagaatgaaaattgtatgttaagttacttcactttaattctcatgtgatccttttatgttatttatatattggtaacatcctttctattgaaaaatcaccacaccaaacctctcttattagaacaggcaagtgaagaaaagtgaatgctcaagtttttcagaaagcattacatttccaaatgaatgaccttgttgcatgatgtatttttgtacccttcctacagatagtcaaaccataaacttcatggtcatgggtaaa

SEQ ID NO: 1358 - DNA, 2230 bp, HOMO SAPIENS
gcagagcggcggcttctctcgcgaggacggacgccattatcgcatctccccgacaaacaccacgagaattccgcagcccacacggtgaccaaaagccagccccactgtgagttgaactctttcgtgttgaccggccactctccgtgctctggatgatgtcggaacacgacctggccgatgtggttcagattgcagtggaagacctgagccctgaccacccagttgttttggagaatcatgtagtgacagatgaagacgaacctgctttgaaacgccagcgactagaaatcaattgccaggatccatctataaagtcattcctgtattccatcaaccagacaatctgcttgcggttggatagcattgaagccaaattgcaagccctggaggctacttgtaaatccttagaagaaaagctggatctggtcacgaacaagcagcacagccccatccaggtccccatggtggccggctcccctctcggggcaacccagacgtgcaacaaagtgcgatgcgctgtgcctgggcgtcggcagaacaccattgtggtgaaggtgccgggccaagaagacagccaccacgaggacggggagagcggctcggaggccagcgactctgtgtccagctgtgggcaggcgggcagtcagagcatcgggagcaacgtcacgctcatcaccctgaactcggaagaggactaccccaatggcacctggctgggcgacgagaacaaccccgagatgcgggtacgctgcgccatcatcccctccgacatgctgcacatcagcaccaactgccgcacggccgagaagatggcgctcacgctgctggactacctcttccaccgcgaggtgcaggctgtgtccaacctctcggggcagggcaagcacgggaagaagcagctggacccgctcaccatctacggcatccggtgtcaccttttctataaatttggcatcacagaatccgactggtaccgaatcaagcagagcatcgactccaagtgccgcacggcgtggcggcgcaagcagcggggccagagcctggcggtcaagagcttctcgcggagaacgcccaactcgtcctcctactgcccttcagagccgatgatgagcaccccacctcctgccagcgagctcccgcagccacagccgcagccgcaggccctgcactacgcgctggccaacgcacagcaggtgcagatccaccagatcggagaagacggacaggtgcaagtaatcccacagggacacctccacatcgcccaggtgccgcagggggagcaagtccagatcacgcaggacagcgagggcaacctccagatccatcacgtggggcaggacggtcaggtgctgcagggtgcacagctgatcgccgtggcctcctcggaccccgcggcggcgggcgtggatgggtcgccactccagggcagcgacatccaggttcagtacgtgcagctggcgccagtgagtgaccacacggccggggcacagacggccgaagccctgcagcccacgctacagccggagatgcagctcgagcacggggccatccagattcagtgagcggtgcccatggcaccaggagcccctcgccggctccgcctacggcccggcccccacgcgccctgctctcacggcctcggcacaggcagcggctgcacgtgttctgctgaagtgcgtctgaaggccgctgcctccgcggggaacagcatcctatcaactgaaagagcagccgccgccgcccccagccggagacccctttcgtttgagtcctgctgttggtgtcggagcacgaggggaggcacggtgcggagagcgtcgcatatgcgcgggaaatcaagaactatgatatttttctgtttaaacagctttttttaatttgctatggtgtttataacaaaaaagaaaatttgaaaaaaaaaatcccaggggagtagcaggagccctttgctgtgtgctctgtccagtgtcatgagacgggagccctttgctgtgtgctctgtccagtgtcatgagacgggagccctttgctgtgtgctctgtccagtgtcatgagacgggagccctttgctgtgtgctctgtccagtgtcatgaggcaggtgtttgcaaagccagctctcggttccgatggggtattgctgacctacttttctaggggaaatgctcttaaacactgtaattatgcatttctaatgaaataaaatgtatttatgaccacaaaaaaaaaaaa

SEQ ID NO: 1359 - DNA, 3962 bp, HOMO SAPIENS
agtcttccagcagggttctgaaagcagcctgctcccatcgcgcccctcggatgtggacacccagggtgggctgcagaccgcggccgggccgcactctctgggggcgagggccaggtcaggtggctgcactgtcgcccagcagcgagtaaagactcgaaactgagggagccagagccctagtcactctgctggtcgagggtcggaaccgctgggggaaagaggaaatgtggacgaaggcagcccttcctggagacagcttggaagagagggatgaagatgcaaaaagcaaaacccaacctatcaagtgccacctccccggtgacaggcccccagccttgctctgcgctttcgctgaatgaactcctgagcacgtttttcccgttgcctaggaagggttgggccgcaggtttcgccagtgctcgacaacccacctggagatagcgggtcggggagggagctgcgaggggggcggactcctgttgctcagtcttcagaccgcagcacagcatcatctgcaccgggacccgggaatggggggacacttggagactgagagagaggaggctcgaggaatgaaccttggtctgttctaagccacaacccctgtctcaggtcgtttggcttcctttccttctctttgtatttgaatttaaaaacattcctgaatctcaagtgcttttgcttgaagtaggggggaggaggagaaaagaatagaagcaagccaggcttcctaagcgagctctgaaaggagaaatccattcactgcaaacctcgttccccatttctgaaaacggatagactgatatcgtaaactaaaggtcatgagggtttttccccccggtttgggggatttgttctgttaaaaggaattttaaagcaccacttgagaaaataattttgcctcagtttccctaaactatctttaaaatgggttgccataattacaggtcttcttttctctcacctctataagccaccgttttcaggtcatctgaagtcaagatttccagccttttgaatggactgatgtgttctaagcccgaagatccagtagaatacttggaaagttgtttacaaaaagtaaaggaactgggtggctgtgacaaggtgaaatgggatacatttgtaagccaggaaaagaagaccttacctccactaaatggaggacagtcacggagatcctttctaagaaatgtaatgcctgaaaactcaaactttccatatcggcggtatgaccggctccctccaatccatcaattctccatagaaagtgacacggatctctctgagactgcagagttgattgaggagtatgaggtttttgatcctaccagacctcgaccaaaaatcattcttgttataggtggtccaggaagtggaaagggtactcagagtttgaaaattgcagaacgatatggattccaatacatttctgtgggagaattattaagaaagaagatccacagtaccagcagcaataggaaatggagtcttattgccaagataattacaactggagaattggccccacaggaaacaacaattacagagataaaacaaaaattgatgcaaatacctgatgaagagggcattgttattgatggatttccaagagatgttgcccaggctctatcttttgaggaccaaatctgtacccccgatttggtggtattcctggcttgtgctaatcagagactcaaagaaagattactgaagcgtgcagaacagcagggccgaccagacgacaatgtaaaagctacccaaaggagactaatgaacttcaagcagaatgctgctccattggttaaatacttccaggaaaaggggctcatcatgacatttgatgccgaccgcgatgaggatgaggtgttctatgacatcagcatggcagttgacaacaagttatttccaaacaaagaggctgcagcaggttcaagtgaccttgatccttcgatgatattggacactggagagatcattgatacaggatctgattatgaagatcagggtgatgaccagttaaatgtatttggagaggacactatgggaggtttcatggaagatttgagaaagtgtaaaattattttcataattggtggtcctggctctggcaaaggcacacagtgtgaaaagctggtggaaaaatatggatttacacatctctcaactggcgagctcctgcgtgaggaactggcatcagaatctgaaagaagcaaattgatcagagacattatggaacgtggagacctggtgccctcaggcatcgttttggagctcctgaaggaggccatggtggccagcctcggggacaccaggggcttcctgattgacggctatcctcgggaggtgaagcaaggggaagagttcggacgcaggattggagacccacagttggtgatctgtatggactgctcggcagacaccatgaccaaccgccttctccaaaggagccggagcagcctgcctgtggacgacaccaccaagaccatcgccaagcgcctagaagcctactaccgagcgtccatccccgtgatcgcctactacgagacaaaaacacagctacacaagataaatgcagagggaacaccagaggacgtttttcttcaactctgcacagctattgactctattttctgaaggcaaaaatgcatgtttgttagaatggaaacagaaaaacattaaaaagttcattccttaacacaatgtttcaagttaaaccttttgtgtcaccgcccccaccaaccaccacctcctaaatcctgacagcactgtttgcttcccagctagacctgtgtgagaggtgtctggaaatcatgcatggtgtatttgggactatatcaacctattctccacacttcagacaactgtctgcactcacggcacacacactttgtatcatgcaggccacactcagagctagtcagtacatgaacagtggtgcggtgccagtctgtgtccgttgtgatcacaggccttgctagaccctgatcatctggttctcctctcattaagcatccctaacccccagtcacaccttcctcttacatactgttccccaatggaggcccctggcataggggacagccctgggcatcttcctttggtgtctggctgttttgtcaactctcatccactggtggctcagagccataaggtgggttgattacacaatgccttgtacatgatatagaggcatcaagcaagtaaaatttgacagaaattttaaaatatgaagatgtatagctttcccaagatgatggtaaaacccaggttagtcatcagtaaccttctctattattattattttttagaaacttggaatactgtcgtcatggctaagagaacaaatctgataaattgtgtaacctagtctcttctctacatggtgatgcatttcagcaattataaattaatataaatgaccaaaagtaacttaaaagcatgagatatttgctatttcattcattgggcacatatcaaattataattttgattttaaatggtcacccatgtatttatttgttgccaagcaagtaaaaaaataccctaacaaacctgatgtgggtgggaggggcatgtcagtaagtggtgtgttcaatgtgtttgtttcatatgggccctttccaggagtttgcaaaccttgtcatacccatatgcaaaactgtgtttccttgcattaaaccagtgaagtttgggttctcttttgtgctatcaatcagttgtaaaatcagagctgcttatatattctactggaataactgcatcttccactcagtcactacaaaaaagcatagtttcagtttgcatgaatttttttttttttcttcaatggctgtgcagataaggatccatttctgggatagaattgtattttttaagtcatttttttttcttgaaatggatatgtacaaataaaataaatggaagacaggataaaaaaaaaaaaaaaaaaaaaaaaaaaa

SEQ ID NO: 1360 - DNA, 1514 bp, HOMO SAPIENS
gacgcctcctgcagcgcctggagccacacagggatccggagcctgggggaaaagcggcgcgggagccggcacccaccgctggaggggcggcgacggcggccgtagcgacctcgggaggcaagcggagccgccatggccgagttcccgtcgaaagttagcacgcggaccagcagtcctgcgcagggcgccgaagcctcggtgtcggcgctgcgcccggacctgggcttcgtgcgctcccgcctcggggcgctcatgctgctgcagctggtgctggggctgctggtgtgggcgctgattgcggacaccccgtaccacctgtatccggcctatggctgggtgatgttcgtcgctgtcttcctctggctggtgacaatcgtcctcttcaacctctacctgtttcagctgcacatgaagttgtacatggttccctggccactggtgttaatgatctttaacatcagcgccaccgttctctacatcaccgccttcatcgcctgctctgcggcagttgacctgacatccctgaggggcacccggccttataaccagcgcgcggctgcctcgttctttgcgtgtttggtgatgatcgcctatggagtgagtgccttcttcagctaccaggcctggcgaggagtaggcagcaatgcggccaccagtcagatggctggcggctatgcctaaaccacctgtgccacggccccctctggggctgaagccgccgctgggtcacagagcagggtcaccctgcaagcctgaagctggggagccctgcgtggagtcagcccaacagggactgcatttgctcctctctgcccgtcagacataagctctcacagcgctaaggaagcaggcccaggctggcaggcatctcggcttgcaggaggccaactgctgagacctcttctccatcccccttattcagtggaagatgacgggggatctgaggctgtgtctctgccttgtctttagaggacttcagcgtccaagactggggcccacccttctcaccagcactaaatgcactaacaaggactccagacctgcagccccagacccgccgtagtataagcctaacaagcaacacgtagcaccttagtctttgttccaggagagctgagcaagctggtgaaaccactctccttcctttaaacaccgtttcaaccaacctctccctggagccaacctgtaaaaagtgggttgattgctgacagcatggtcttccctccctgcatttcagacataccagttactgaaagcaaatcagttttaagtgatttctcagtgctgaaaagcctgtccaggtttccttccctttcccaagcctctctctgtaatactccctttgggcgaagctaacatcggtgcctccccgaccttgctgactaggcacatgggacgcaaaggagggagggaagcaaggccttgcctggcgagttgtcatgtggttggtggtgactgttttattttttttaataaaaataaagatgagagaaattaaaaaaaaaaaaaaaaaa

SEQ ID NO: 1361 - DNA, 146 bp, HOMO SAPIENS
gtgggcaatgtgaaacgggtattttaagctgctgagttctgcgggagtttgctgagcaacagtagaaaccagaactctcggatactgtgttctgtccttgaaacggtggaagattttatgtgaccagaatggaatgtttgaacaaa

SEQ ID NO: 1362 - DNA, 5144 bp, HOMO SAPIENS
ccctgtccctggctcacgtgatcgcgcctagggagaaaacgtctgactccagccaccggccttcaaggcacggctttttattccttcggctggtcggcctctcgcccttcagctacctgtgcgtccctccgtcccgtcccgtcccggggtcaccccggagcctgtccgctatgcggctcctgcctctagccccaggtcggctccggcggggcagcccccgccacctgccctcctgcagcccagcgctgctactgctggtgctgggcggctgcctgggggtcttcggggtggctgcgggaacccggaggcccaacgtggtgctgctcctcacggacgaccaggacgaagtgctcggcggcatgacaccgctaaagaaaaccaaagctctcatcggagagatggggatgactttttccagtgcttatgtgccaagtgctctctgctgccccagcagagccagtatcctgacaggaaagtacccacataatcatcacgttgtgaacaacactctggaggggaactgcagtagtaagtcctggcagaagatccaagaaccaaatactttcccagcaattctcagatcaatgtgtggttatcagaccttttttgcagggaaatatttaaatgagtacggagccccagatgcaggtggactagaacacgttcctctgggttggagttactggtatgccttggaaaagaattctaagtattataattacaccctgtctatcaatgggaaggcacggaagcatggtgaaaactatagtgtggactacctgacagatgttttggctaatgtctccttggactttctggactacaagtccaactttgagcccttcttcatgatgatcgccactccagcgcctcattcgccttggacagctgcacctcagtaccagaaggctttccagaatgtctttgcaccaagaaacaagaacttcaacatccatggaacgaacaagcactggttaattaggcaagccaagactccaatgactaattcttcaatacagtttttagataatgcatttaggaaaaggtggcaaactctcctctcagttgatgaccttgtggagaaactggtcaagaggctggagttcactggggagctcaacaacacttacatcttctatacctcagacaatggctatcacacaggacagttttccttgccaatagacaagagacagctgtatgagtttgatatcaaagttccactgttggttcgaggacctgggatcaaaccaaatcagacaagcaagatgctggttgccaacattgacttgggtcctactattttggacattgctggctacgacctaaataagacacagatggatgggatgtccttattgcccattttgagaggtgccagtaacttgacctggcgatcagatgtcctggtggaataccaaggagaaggccgtaacgtcactgacccaacatgcccttccctgagtcctggcgtatctcaatgcttcccagactgtgtatgtgaagatgcttataacaatacctatgcctgtgtgaggacaatgtcagcattgtggaatttgcagtattgcgagtttgatgaccaggaggtgtttgtagaagtctataatctgactgcagacccagaccagatcactaacattgctaaaaccatagacccagagcttttaggaaagatgaactatcggttaatgatgttacagtcctgttctgggccaacctgtcgcactccaggggtttttgaccccggatacaggtttgacccccgtctcatgttcagcaatcgcggcagtgtcaggactcgaagattttccaaacatcttctgtagcgacctcacacagcctctgcagatggatccctgcacgcctctttctgatgaagtgattgtagtaggtgtctgtagctagtcttcaagaccacacctggaagagtttctgggctggctttaagtcctgtttgaaaaagcaacccagtcagctgacttcctcgtgcaatgtgttaaactgtgaactctgcccatgtgtcaggagtggctgtctctggtctcttcctttagctgacaaggacactcctgaggtctttgttctcactgtattctttttatcctggggccacagttcttgattattcctcttgtggttaaagactgaatttgtaaacccattcagataaatggcagtactttaggacacacacaaacacacagacacaccttttgatatgtaagcttgacctaaagtcaaaggacctgtgtagcatttcagattgagcacttcactatcaaaaatactaacatcacatggcttgaagagtaaccatcagagctgaatcatccaagtaagaacaagtaccattgttgattgataagtagagatacattttttatgatgttcatcacagtgtggtaaggttgcaaattcaaaacatgtcacccaagctctgttcatgtttttgtgaattctaggctggtgctgcactgaaatagagcagtaagcttgtgataaaggccaattccaggtagctcttgaaggtgatagccatctactttccagtggctgccaaccacagggagtgccagttaacactggaaggattaaggcaaggtcccttctcttgagactcccctctgagatctgaaaaatgaagtggcttaggaacatcagcagtgaagaactgccaagagttggtgaaggttgtctcttccgagggccttctgaagacagggctcttgaacagacaagtggaagggctgtaccagggataaaggaaagaagtgcctgtccagcagggagcttgaatttaagttccatgtatgaagtcattggctctatctgcatttttctgtcattctcttcatttgttttaaggtggaaaattttcttacagttgatgcaaagtatcaactactttaccctaccttctccccttttagatgggttcttcctgagttttggagtcttgtatgattatcagtattcccctgtcaaaatcaaatctattcaggtttcttcactgttgagaacacctaaatgtttttatttttgagaagtggggacagagtctcactatgtcacccaggctggagtgcaatggcatgatctcagctcactgcaaccttcgcctcctgggttcaagcgattctcctgcctccgcctcctgagtagctgggattataggcacgcaccaccacgcccagctaattttttgtatttttagtagagacagagtttcaccatgttggccaggctggtcttgaactcctgaccttgtgatccacccacctcggcctcccagagtgctgggattacaggcatgagccaccacgcttggctaagaacacctaaatttttatgtttcttggctcaaaaaccagttccatttctaatgttgtcctcacaagaaggctaattggtggtgagacagcaggggaggaggaagagctgtggtttgtaacttgttcaactcaggcaataagcgattttagctttatttaaagtcttctgtccagctttaagcactttgtaagacatggctgaaagtagcttttctatcagaattgcagatagtcatgttgggctaacagtcaattggatatattcctttacctcacatgaccccagcaactgtggtggtatctagaggtgaaacaggcaagtgaaatggacacctctgctgtgaatgttttagagaaggaaattcaaaaaatgttgtaactgaaagcactgttgaatatgggtatcggctttctttttcactttgactcttaacattatcagtcaacttccacattaatgaaagttgaccatagttatttccaaataaaaagaaaccaactcttaccaggtcttggactgtgatgtcatattattcagttttatgcttgttcctgagcagaactcataagagtgacatagtcagctgctgacggcacctcagccacgccactcttactcagttcagtgggtgtgcttgcgtggtaggatgtggtgcagccctctctacgctcttctatttttggtatatttcctatctaaccttcaaatagcttccaattctttttttcttggactggcttcattctgaatttgtgctaaaataatctttcataaagagacctcagtttatagcgtaacagactacacaatgcactgatgttttcataatgtttaagggacccactgcaagaagcttgctgcctccttttaattgtattcatttagattttgattttccatgttaagaaggtgaggtccatgttggtgcccttcagagtagagaaccatgtaaacattaggaatgaacagaggccttaggaatgaatagagagtttgccttatacaatttcctgttacaaagctctccctctcatgcaaagtagggaacaccttttgagcatctttgaatttgacaaatggtgctgttgcaaacactttttttttgagatgaagtctcgcggttgtcacccgggctggagtgcagtggcgtgatctcggctcactgcaacttccacctcctgggttccagcagttctcctgcctcagcctcccaagtagctgagattacaggcgcctgccaccccacctggctgatttttgtaattttagtagagacggggtttcaccatgttggccaggctgattaactcctgacctcaggtgatccacctttctcggcctcccaaagtgctgggattacgggtgtgagccaccgtgcccggcctgcaaacacattttaattgacaacactagggctgttgtacaaaatagtaatgatagccatggaagttttaccttattctgtgagaagtgttcttaaacttattaagtgtctaaactaaggtttagtgcttttttaaaggaaagttgtcccaggattcatcctaaagaaagcaaaagttaattcaactgatccaccaatggaattagatgggtagagttgggttcttgagttttaccaccacttagttcccactgaattttgtaacttcctgtgtttgcatcctctgttcctattctgcccttgctctgtgtcatctcagtcatttgacttagaaagtgcccttcaaaaggaccctgttcactgctgcacttttcaatgaattaaaatttatttctgttctagtgggaaaaaaaaaaaaaaaaaa

SEQ ID NO: 1363 - DNA, 399 bp, HOMO SAPIENS
atgactatcaggctcctctgctacatgggcttttattttctgggggcaggcctcatggaagctgacatctaccagaccccaagataccttgttatagggacaggaaagaagatcactctggaatgttctcaaaccatgggccatgacaaaatgtactggtatcaacaagatccaggaatggaactacacctcatccactattcctatggagttaattccacagagaagggagatctttcctctgagtcaacagtctccagaataaggacggagcattttcccctgaccctggagtctgccaggccctcacatacctctcagtacctctgtgccagcagtgaatacacagtgctacatggataccgacactccgcacagaaagggtcgcctctaatgtga

SEQ ID NO: 1364 - DNA, 2108 bp, HOMO SAPIENS
ctttcaattcctctggcaacaaaccacacactgggatctgacactgtagagtgctttctcttctctttttttgggggggggagggggtgtggttgcatatttaaactctcacgcatttatgtactgaggactgcagtgtaggactttcctgcagaataccatttgatcctattaagaattgtccaaatgttggagcatttgattgaaaaatccttcttagccattttaaagatagctttccaatgattagacgaattgattctttctgtgactcatcagttcatttcctgtaaaattcatgtcttgctgttgatttgtgaataagaaccagagcttgtagaaaccactttaatcatatccaggagtttgcaagaaacaggtgcttaacactaattcacctcctgaacaagaaaaatgggctgtgaccggaactgtgggctcatcgctggggctgtcattggtgctgtcctggctgtgtttggaggtattctaatgccagttggagacctgcttatccagaagacaattaaaaagcaagttgtcctcgaagaaggtacaattgcttttaaaaattgggttaaaacaggcacagaagtttacagacagttttggatctttgatgtgcaaaatccacaggaagtgatgatgaacagcagcaacattcaagttaagcaaagaggtccttatacgtacagagttcgttttctagccaaggaaaatgtaacccaggacgctgaggacaacacagtctctttcctgcagcccaatggtgccatcttcgaaccttcactatcagttggaacagaggctgacaacttcacagttctcaatctggctgtggcagctgcatcccatatctatcaaaatcaatttgttcaaatgatcctcaattcacttattaacaagtcaaaatcttctatgttccaagtcagaactttgagagaactgttatggggctatagggatccatttttgagtttggttccgtaccctgttactaccacagttggtctgttttatccttacaacaatactgcagatggagtttataaagttttcaatggaaaagataacataagtaaagttgccataatcgacacatataaaggtaaaaggaatctgtcctattgggaaagtcactgcgacatgattaatggtacagatgcagcctcatttccaccttttgttgagaaaagccaggtattgcagttcttttcttctgatatttgcaggtcaatctatgctgtatttgaatccgacgttaatctgaaaggaatccctgtgtatagatttgttcttccatccaaggcctttgcctctccagttgaaaacccagacaactattgtttctgcacagaaaaaattatctcaaaaaattgtacatcatatggtgtgctagacatcagcaaatgcaaagaagggagacctgtgtacatttcacttcctcattttctgtatgcaagtcctgatgtttcagaacctattgatggattaaacccaaatgaagaagaacataggacatacttggatattgaacctataactggattcactttacaatttgcaaaacggctgcaggtcaacctattggtcaagccatcagaaaaaattcaagtattaaagaatctgaagaggaactatattgtgcctattctttggcttaatgagactgggaccattggtgatgagaaggcaaacatgttcagaagtcaagtaactggaaaaataaacctccttggcctgatagaaatgatcttactcagtgttggtgtggtgatgtttgttgcttttatgatttcatattgtgcatgcagatcgaaaacaataaaataagtaagtatgtaccaaaaaatattgcttcaataatattagcttatatattacttgttttcactttatcaaagagaagttacatattaggccatatatatttctagacatgtctagccactgatcatttttaaatataggtaaataaacctataaatattatcacgcagatcactaaagtatatctttaattctgggagaaatgagataaaagatgtacttgtgaccattgtaacaatagcacaaataaagcacttgtgccaaagttgtccaaaaaa

SEQ ID NO: 1365 - DNA, 971 bp, HOMO SAPIENS
cactcgttgcataaatttgcgctccgccagcccggagcatttaggggcggttggctttgttgggtgagcttgtttgtgtccctgtgggtggacgtggttggtgattggcaggatcctggtatccgctaacaggtcaaaatgcagatcttcgtgaaaacccttaccggcaagaccatcacccttgaggtggagcccagtgacaccatcgaaaatgtgaaggccaagatccaggataaggaaggcattccccccgaccagcagaggctcatctttgcaggcaagcagctggaagatggccgtactctttctgactacaacatccagaaggagtcgaccctgcacctggtcctgcgtctgagaggtggtatgcagatcttcgtgaagaccctgaccggcaagaccatcaccctggaagtggagcccagtgacaccatcgaaaatgtgaaggccaagatccaggataaagaaggcatccctcccgaccagcagaggctcatctttgcaggcaagcagctggaagatggccgcactctttctgactacaacatccagaaggagtcgaccctgcacctggtcctgcgtctgagaggtggtatgcagatcttcgtgaagaccctgaccggcaagaccatcactctggaggtggagcccagtgacaccatcgaaaatgtgaaggccaagatccaagataaagaaggcatcccccccgaccagcagaggctcatctttgcaggcaagcagctggaagatggccgcactctttctgactacaacatccagaaagagtcgaccctgcacctggtcctgcgcctgaggggtggctgttaattcttcagtcatggcattcgcagtgcccagtgatggcattactctgcactatagccatttgccccaacttaagtttagaaattacaagtttcagtaatagctgaacctgttcaaaatgttaataaaggtttcgttgcatggta

SEQ ID NO: 1366 - DNA, 2723 bp, HOMO SAPIENS
gggagaaacgttctcactcgctctctgctcgctgcgggcgctccccgccctctgctgccagaaccttggggatgtgcctagacccggcgcagcacacgtccgggccaaccgcgagcagaacaaacctttggcgggcggccaggaggctccctcccagccaccgcccccctccagcgcctttttttccccccatacaatacaagatcttccttcctcagttcccttaaagcacagcccagggaaacctcctcacagttttcatccagccacgggccagcatgtctgggggcaaatacgtagactcggagggacatctctacaccgttcccatccgggaacagggcaacatctacaagcccaacaacaaggccatggcagacgagctgagcgagaagcaagtgtacgacgcgcacaccaaggagatcgacctggtcaaccgcgaccctaaacacctcaacgatgacgtggtcaagattgactttgaagatgtgattgcagaaccagaagggacacacagttttgacggcatttggaaggccagcttcaccaccttcactgtgacgaaatactggttttaccgcttgctgtctgccctctttggcatcccgatggcactcatctggggcatttacttcgccattctctctttcctgcacatctgggcagttgtaccatgcattaagagcttcctgattgagattcagtgcatcagccgtgtctattccatctacgtccacaccgtctgtgacccactctttgaagctgttgggaaaatattcagcaatgtccgcatcaacttgcagaaagaaatataaatgacatttcaaggatagaagtatacctgattttttttccttttaattttcctggtgccaatttcaagttccaagttgctaatacagcaacaatttatgaattgaattatcttggttgaaaataaaaagatcactttctcagttttcataagtattatgtctcttctgagctatttcatctatttttggcagtctgaatttttaaaacccatttaaatttttttccttacctttttatttgcatgtggatcaaccatcgctttattggctgagatatgaacatattgttgaaaggtaatttgagagaaatatgaagaactgaggaggaaaaaaaaaaaaaagaaaagaaccaacaacctcaactgcctactccaaaatgttggtcattttatgttaagggaagaattccagggtatggccatggagtgtacaagtatgtgggcagattttcagcaaactcttttcccactgtttaaggagttagtggattactgccattcacttcataatccagtaggatccagtgatccttacaagttagaaaacataatcttctgccttctcatgatccaactaatgccttactcttcttgaaattttaacctatgatattttctgtgcctgaatatttgttatgtagataacaagacctcagtgccttcctgtttttcacattttccttttcaaatagggtctaactcagcaactcgctttaggtcagcagcctccctgaagaccaaaattagaatatccatgacctagttttccatgcgtgtttctgactctgagctacagagtctggtgaagctcacttctgggcttcatctggcaacatctttatccgtagtgggtatggttgacactagcccaatgaaatgaattaaagtggaccaatagggctgagctctctgtgggctggcagtcctggaagccagctttccctgcctctcatcaactgaatgaggtcagcatgtctattcagcttcgtttattttcaagaataatcacgctttcctgaatccaaactaatccatcaccggggtggtttagtggctcaacattgtgttcccatttcagctgatcagtgggcctccaaggaggggctgtaaaatggaggccattgtgtgagcctatcagagttgctgcaaacctgacccctgctcagtaaagcacttgcaaccgtctgttatgctgtgacacatggcccctccccctgccaggagctttggacctaatccaagcatccctttgcccagaaagaagatgggggaggaggcagtaataaaaagattgaagtattttgctggaataagttcaaattcttctgaactcaaactgaggaatttcacctgtaaacctgagtcgtacagaaagctgcctggtatatccaaaagctttttattcctcctgctcatattgtgattctgcctttggggacttttcttaaaccttcagttatgatttttttttcatacacttattggaactctgcttgatttttgcctcttccagtcttcctgacactttaattaccaacctgttacctactttgactttttgcatttaaaacagacactggcatggatatagttttacttttaaactgtgtacataactgaaaatgtgctatactgcatactttttaaatgtaaagatatttttatctttatatgaagaaaatcacttaggaaatggctttgtgattcaatctgtaaactgtgtattccaagacatgtctgttctacatagatgcttagtccctcatgcaaatcaattactggtccaaaagattgctgaaattttatatgcttactgatatattttacaattttttatcatgcatgtcctgtaaaggttacaagcctgcacaataaaaatgtttaacggttaaacagtcaaaaaaaaaaa

SEQ ID NO: 1367 - DNA, 490 bp, HOMO SAPIENS
  misc_feature (96)..(96): n is a, c, g, or t
cgaccctcaacactgttattctctagcttatcttcttggtcagagtctactttcttcttttctgggaagatgcttgtaagggagtaaggagaggcnttctagctggaagggaagggcaaaatgaatgattagtgtttggaaacaccacaatactctgggaattgaacgttttctaaatccctgattgtaatgctgatgagtagaaactgactctgtttgtcatgtttagttttcataaatgataacaacgcctaacacaatataagtatattttctttttcaatataaaatgtctttgattcttgtattatttctttacatgaatggagggttggcctaagaagtatgctgtttcataggctcttgtataagataaatgaaaaagcaaagaaaatgaataaaatctaatactagaaaagaatgaaaaaatatgattaagccagtcatatattttgtagaaatggccatatgaggcattgtacccctaccc

SEQ ID NO: 1368 - DNA, 3894 bp, HOMO SAPIENS
ttataaataatcttaatagcagtattcacgtttgcattctcgcatccgtggcatggagtcctacacacaataggcgccctaagaaagcgtgtttgacttgatcgctggagcatctgccggcaccgcccaggacccgcccaggacccgccccgccccctgcggccccgccccccgcatgctgaatgccatataggcgagtgacgtcaggccgtttgttgtcattggcggctcccaagatggcgtccatcatggaagggccgctgagcaaatggactaacgtgatgaagggctggcagtaccgttggttcgtgctggactacaatgcaggactgctctcctactacacgtccaaggacaaaatgatgagaggctctcgcagaggatgtgttagactcagaggagctgtgattggtatagacgatgaggacgacagcaccttcacaataactgttgatcagaaaaccttccatttccaggcccgtgatgctgatgagcgagagaagtggatccatgccttagaagaaacaattcttcgacatactctccagcttcaaggtttggattcaggatttgttcctagtgtccaagattttgataagaaacttacagaagctgatgcttacctacaaatcttgattgaacaattaaagctttttgatgacaagcttcaaaactgcaaagaagatgaacagagaaagaaaattgaaactctcaaagagacaacaaatagcatggtagaatcaattaaacactgcattgtgttgctgcagattgccaaagaccagagtaatgcggagaagcacgcagatggaatgataagtactattaatcccgtagatgcaatatatcaacctagtcctttggaacctgtgatcagcacaatgccttcccagactgtgttacctccagaacctgttcagttgtgtaagtcagagcagcgtccatcttccctaccagttggacctgtgttggctaccttgggacatcatcagactcctacaccaaatagtacaggcagtggccattcaccaccgagtagcagtctcacttctccaagccacgtgaacttgtctccaaatacagtcccagagttctcttactccagcagtgaagatgaattttatgatgctgatgaattccatcaaagtggctcatccccaaagcgcttaatagattcttctggatctgcctcagtcctgacacacagcagctcgggaaatagtctaaaacgcccagataccacagaatcacttaattcttccttgtccaatggaacaagtgatgctgacctgtttgattcacatgatgacagagatgatgatgcggaggcagggtctgtggaggagcacaagagcgttatcatgcatctcttgtcgcaggttagacttggaatggatcttactaaggtagttcttccaacgtttattcttgaaagaagatctcttttagaaatgtatgcagacttttttgcacatccggacctgtttgtgagcattagtgaccagaaggatcccaaggatcgaatggttcaggttgtgaaatggtacctctcagcctttcatgcgggaaggaaaggatcagttgccaaaaagccatacaatcccattttgggcgagatttttcagtgtcattggacattaccaaatgatactgaagagaacacagaactagtttcagaaggaccagttccctgggtttccaaaaacagtgtaacatttgtggctgagcaggtttcccatcatccacccatttcagccttttatgctgagtgttttaacaagaagatacaattcaatgctcatatctggaccaaatcaaaattccttgggatgtcaattggggtgcacaacatagggcagggctgtgtctcatgtctagactatgatgaacattacattctcacattccccaatggctatggaaggtctatcctcacagtgccctgggtggaattaggaggagaatgcaatattaattgttccaaaacaggctatagtgcaaatatcatcttccacactaaacccttctatgggggcaagaagcacagaattactgccgagattttttctccaaatgacaagaagtctttttgctcaattgaaggggaatggaatggtgtgatgtatgcaaaatatgcaacaggggaaaatacagtctttgtagataccaagaagttgcctataatcaagaagaaagtgaggaagttggaagatcagaacgagtatgaatcccgcagcctttggaaggatgtcactttcaacttaaaaatcagagacattgatgcagcaactgaagcaaagcacaggcttgaagaaagacaaagagcagaagcccgagaaaggaaggagaaggaaattcagtgggagacaaggttatttcatgaagatggagaatgctgggtttatgatgaaccattactgaaacgtcttggtgctgccaagcattaggttggaagatgcaaagtttatacctgatgatcagggcagtaggcataattcagcaacaaacaatcttcctttgggagaaacctgttcattccaatcttctaattacagtggttcctatctcagggatactggactttctgacgcagatgaacaattaaggggaaaagcttcccttttccctctgtggcagttacgattttgacttcagtcctgagaaaaacttcaggttttgaaaatcagatgatgtcttctccttttccaaacaccacacgttgaaagcatttataaatccaagtctgaaactctgcgctctagtactgctgttaagatacacaacttgtttcttagttcatataatctcgggatacacacacacacacacatatatatacacacacatacgtatacacacacatacatatatataaatatacctgatgccagatttttttcataaatattctgcctactgtaaatatgggttcctctgagttgttttagaaaattagcgcaatgtattaaaatcaagtgttaggaaatttcatggtcttacctacaataacttttattttggaattgaactattattaaattgtatctaatcctggattacagtttaattaattattcttagtgcttaaggcttcataaagtaatttttccaaccttttttttaaaaatgtgcatcttttattatcttttatggttaaacttggaagccaattatttggcaaccttgaatacaagagctagcttttcaaagaaagacacttgaaataatggaggatccattcttttcctctgtcagattgtatgttctgtctttagcccctgccaggcaattccccagaatcttcacttaactcatattgcacatgtagggctgcctaccaacattttatccaaaaatgttttattgccttagagggtttgggaagagtgtgtatttatagatccccaccccacagtgaacaaaaatagatagatagatagaataaaatgaatgccacagcagcagatggctcattctgaagggaaatacagaactatatctatctatctatctatcatcttttttatttaaaaatacattaaaaaaacaggtattagtacctagcatttagttagttattcaatatactggttacgtaaggcctttcaagaagtagattctcagtctgagaggacacaggccagggcttctcaaagtgctgctgcaggctttctggtctcgcttggcccattctgctaattttcctttgccagctcctacagtaaccctgggtttattagtctcaacaaaggataaaaagtaaatcaaatgctatgatgccagtgcaaaacttcaatggaagccctaaggcagtagtataactaactccataaaatacaaacaaacacattttaaaatacacattgcttcaggccaaaaaaaaaaaaaaaaaaa

SEQ ID NO: 1369 - DNA, 1575 bp, HOMO SAPIENS
gggcctcgccggcgccgtcaagtagcctgggggacaggccggcgcggctgggagcgggtgggcggccgggaggccggagcagcacggccgcaggacctggagctccggctgcgtcttcccgcagcgctacccgccatgcgcctgccgcgccgggccgcgctggggctcctgccgcttctgctgctgctgccgcccgcgccggaggccgccaagaagccgacgccctgccaccggtgccgggggctggtggacaagtttaaccaggggatggtggacaccgcaaagaagaactttggcggcgggaacacggcttgggaggaaaagacgctgtccaagtacgagtccagcgagattcgcctgctggagatcctggaggggctgtgcgagagcagcgacttcgaatgcaatcagatgctagaggcgcaggaggagcacctggaggcctggtggctgcagctgaagagcgaatatcctgacttattcgagtggttttgtgtgaagacactgaaagtgtgctgctctccaggaacctacggtcccgactgtctcgcatgccagggcggatcccagaggccctgcagcgggaatggccactgcagcggagatgggagcagacagggcgacgggtcctgccggtgccacatggggtaccagggcccgctgtgcactgactgcatggacggctacttcagctcgctccggaacgagacccacagcatctgcacagtcaggaccggcctctccgattcttacccgccttgctgtctgtctcttggatgttggcgtggcgtgggccacgcatggatccgtggccggaacacgcacacccagccaggctacagctccagagtatggatagctgccttctctccagcctgtgacgagtcctgcaagacgtgctcgggcctgaccaacagagactgcggcgagtgtgaagtgggctgggtgctggacgagggcgcctgtgtggatgtggacgagtgtgcggccgagccgcctccctgcagcgctgcgcagttctgtaagaacgccaacggctcctacacgtgcgaagagtgtgactccagctgtgtgggctgcacaggggaaggcccaggaaactgtaaagagtgtatctctggctacgcgagggagcacggacagtgtgcagatgtggacgagtgctcactagcagaaaaaacctgtgtgaggaaaaacgaaaactgctacaatactccagggagctacgtctgtgtgtgtcctgacggcttcgaagaaacggaagatgcctgtgtgccgccggcagaggctgaagccacagaaggagaaagcccgacacagctgccctcccgcgaagacctgtaatgtgccggacttaccctttaaattattcagaaggatgtcccgtggaaaatgtggccctgaggatgccgtctcctgcagtggacagcggcggggagaggctgcctgctctctaacggttgattctcatttgtcccttaaacagctgcatttcttggttgttcttaaacagacttgtatattttgatacagttctttgtaataaaattgaccattgtaggtaatcaggaggag

SEQ ID NO: 1370 - DNA, 4359 bp, HOMO SAPIENS
agctcacttccggaccgcggatagcactggcgaccctagcgggtgagaggcccttcagggccgcggcgggttgagcgcaccatcacatctaagccatcagcaagtttgttggttttaatctccaaaatacgtcttgattttgtctgactctttgccaccaccctgatctaagcccttatcatctgcttgaatcactaacttgtctccacttgcagtttttaaaagagttgcttccatttgactttttctgtctgctgtaccagcatatgagtttcaggaggggtcattgatgcagtcattctcagtctcctcggagggagtctgaagatgcttaaagagcatccagagatggcggaagctcctcagcagcagttgggtattcctgtggtgaaactggagaaagagttgccatggggcagaggaagggaggaccctagtccagagacttttcggctgaggtttcggcagttccgctaccaggaggcagctggaccccaggaagctcttagggagctccaggagctctgtcgtcggtggctgaggcccgagttgcacaccaaggagcagatcctggagctgctggtgctggagcagttcctcactatcctgccccgcgagttctacgcctggatccgggagcatggcccagagagtggcaaggccctggccgccatggtggaggacctgacagaaagagcactggaggccaaggcggttccatgccacaggcagggagagcaggaggaaacagcactttgcagaggcgcttgggagccaggcatccagctggggccagtggaggtcaagcctgaatgggggatgccccctggggaaggagttcaaggtccagacccaggtaccgaggagcagctcagtcaggaccctggagatgagacacgggccttccaggagcaagcactacctgttctgcaggcgggtcctggcctccccgcagtgaatcccagagaccaagagatggcagctgggttctttactgctggatcgcaggggttggggccatttaaagatatggccctggccttccctgaggaggagtggaggcatgtgaccccagcccagatagactgctttggggagtatgtggaaccgcaggactgcagggtctctccaggcggtgggagcaaggaaaaggaggcaaaacccccacaggaagacctgaaaggggcgctggtggcactgacatcagagaggtttggggaagcctctctccagggccctgggctcggaagggtctgtgagcaggagcctggtggccctgcaggcagtgcgcctgggcttcctcctccccagcacggtgccatccccctgcctgacgaagtcaaaacccacagctccttctggaagcctttccagtgccctgagtgtgggaaaggattcagtcggagctccaatctcgtcaggcaccagcgaacccacgaagagaagtcttatggctgtgtggagtgtgggaagggctttaccctgagagaatacctgatgaagcaccagagaacccacctgggaaagaggccctacgtgtgcagcgagtgctggaaaaccttcagccagagacaccacctggaggtgcaccagcgcagccacactggggagaagccctacaagtgcggggactgctggaagagcttcagccgcaggcagcacctgcaggtgcaccggaggacgcacaccggggagaagccctacacctgcgagtgtggcaagagcttcagcaggaatgccaatctggcggtgcaccggcgtgcccacactggcgagaagccatatgggtgccaggtgtgcgggaagcggttcagcaaaggggagcggctggtccgacaccagagaatccatacaggggagaagccctaccactgtcctgcctgcgggcgaagcttcaaccagaggtccatcctcaaccggcaccagaagacccagcaccgccaggagccgctggtgcagtgagcatagcaggtggcaggcagcaccatcattcatctttctcactgcagggccttgcggggtgcaaggtgatggctgcaggaaagcactggtcccatcgccttcccacccattcgccaacgcgggaaaggcaaggcctggcttacttagagcttccagagagcatagctgcttccatctcttacccaagtggtgctaaacaatttttcttccaatgtttgagggaagcagtctcctgcggttcagttcaggctgagattttctccttcagtggactgtctgtgtccccctgccgaacaaagctgggagtaaaggcaaaaccttgacacgtgttggtagctgggacctcatcttcctgagggctctgtcttgcctgcagggtcatagctcagactcttcccccaccccctctcttttccattgaacaaacatttattgaacatcctctgagcacctggccgtgggaatgccgtggtgaatgagagactagacgtgatgcctctgggggttgtgcgttggggatgcatgcgacagcccatgacccgaggcattctcagggtatctgtgctgtgtgcccgtgagaacatcttcccatgaccactcctgccctcctgccccgtgctggatcttccctccccagctgggatctgctcccaggcaactgtgtgaattttacattatttggagcctcatctgtgtcaggctataacattctatcctcatctgtaaaacttccccgtccattattccttgcactataacaactgtcaacacaccaactattaggaagttagtattttgctattgatcactgaataaacatcagagtattttaaaaaacagttctctagaaagaactgttataattaaaatgagtctgaaagatgaactctagtattaatgccctatatttgatggcactttatagttcataaaattaatttcaccccattctcattggacccatttcccaagtatttattgaggccctgtaacaaacatgtcaggaactcttctgggtgcttgagacacatccatgaataaaatagggggagaagctgttgacctcgtagagcttatgtctcgtggatgtacctgatcttcagaacccgtggatattcctgcaaatcctctgggcctgtattcattgctttgtcagcatcttgccctgaaatgcatttgtcacctacctcttgttactaaatggtctctgccctccagacccttgtcatccaaggcactaggggtcctggacacccactggggatgatgagctggtagcgacctgttttgcatgagtgccaagtcaggaaaaataaagatatttgtaggcattaaaaaaaaatacatttctttaaaaatgagaagatgcaatatttgtaaactgttgaagcttccttattgtgccatcacttaagggtttcatttctgtttaaagttctggaagctgcataactagcgtggactgactgctgtgtcattgtgctgtgcctttgaaccctggctgagtgagtgagtttgtcctttgttgatagtgtcctataattgcaaaatgtggtttgtcttctgatgcctcttaataccagattcttttactgagatttttttttttcattttccattgtaaataaggtaaatggtaatgactaacacaaagctgtattactcagcccactttgaaacgtggttttatcacctgttcttgttaggcagcatggtgtctaattttggcttagcaaatgacgctccttggtcttcctggctcattagctgtgcccacgaggctgcactgactgggtcgtaaatgtatctgagatgtccacacggggctgctgctgctcctctgtaatactgaggtccacatgcaaaatcagctttttttcccccgtaattatcagagcagctaggcagggctgacagccaggcagactcagtgggaggcttctggcctgagtgtggccttccccagagggtggttttccaaaggcaggtggggactggggaggcctcggggggctgcttgtcattacctgaatcacagatgctcttttgtcatacacagccagcattcctctgggtttcagcaagttggcatatcttaagcttcagaaggagctgggccttgctgactttcctatctggcctcttccctatctcctgtggggccaagagcttaggacagtgtctcagaaaagcctctaagtagggggtttttcccatgggattgtggtagtctgatttttcatatctattcaaatgttaagaaatattttgttttctgtatttttctattctttagaaatttttttataatagataatttcaaacctatataaataaatccttatgtatttatcatttgactttattataaactcataatcaatcttaaaaaaaaaa

SEQ ID NO: 1371 - DNA, 3993 bp, HOMO SAPIENS
aatgtaagaacttttcttcctcccttaactttgcttccttctttcctgcatgttaccactggcagagcaaatatgactcagaaaccggctcctcagggttgtaacattagatgatacaggcttgggtcgttacacatgacaccagtgcctttgtttcattgggctgggctctctggaaggtgtgctgctgcctgagctgctggaaaagcactgacaggtgtttgctagaaaagcactcctggagcttgccaccagcttggacttctagggactttcctctcagccaggaaggattttgatattcatcagaaatacctccagaagattcaaggagctgtagaggtgaagtaagcctgtgaaggaccagcatgggaatcctatactctgagcccatctgccaagcagcctatcagaatgactttggacaagtgtggcggtgggtgaaagaagacagcagctatgccaacgttcaagatggctttaatggagacacgcccctgatctgtgcttgcaggcgagggcatgtgagaatcgtttccttccttttaagaagaaatgctaatgtcaacctcaaaaaccagaaagagagaacctgcttgcattatgctgtgaagaaaaaatttaccttcattgattatctactaattatcctcttaatgcctgttctgcttattgggtatttcctcatggtatcaaagacaaagcagaatgaggctcttgtacgaatgctacttgatgctggcgtcgaagttaatgctacagattgttatggctgtaccgcattacattatgcctgtgaaatgaaaaaccagtctcttatccctctgctcttggaagcccgtgcagaccccacaataaagaataagcatggtgagagctcactggatattgcacggagattaaaattttcccagattgaattaatgctaaggaaagcattgtaatccttgtgaccacaccgatggagatacagaaaaagttaacgactggattctatcttcattttagacttttggtctgtgggccatttaacctggatgccaccattttatggggataatgatgcttaccatggttaatgttttggaagagctttttatttatagcattgtttactcagtcaagttcaccatggccgtaatccttctaagggaaacactaaagttgttgtagtctccacttcagtcagaaactgatgtttcagctaggcacagtggtacatgcctgtaatcccagctacttgggaggctgaggtgggaggatcacttgaactcaggagtttgagagcagccagggcaacacagcgagaccctgtctcaaaaaaaaaaaaaaaaaaaaaagccctggtgttccaaactcagtctttcctgaagaagaggatctgagttatcttctgaaacagcgttctcccttcccagttgtatcactcttataaaaagactgtccagtctatgtcatgccctaggagacaaactgttcctcccagccccctttgagtattgagcagaagaatcaaattattaaatacgtatgtttgtacagaatggtatttgtgtatgtgtgtgggcttagagattcacaagtaaatattcctttggtgaaggaatttcaataaaaacatctatcaagtgtcagcggtgagtgtgtttacaccacagaaattggcaaattgacaaatcagagtttgtttttgtttttttgttttttactttccataaagttcgtttaccagcataccactagagatttcggtttacaaataaaagccatcttggtttgagcaagactatgcaactatgaaaatgttcgtttaaaaaaatcttcatgatccttttgtaaatacaaggtggttgccaagcttgttagttttgtttattttattgatagatgtaaaatattattgtaacttatttggataaagttcttcaaaagaaacagagctatacaatgaggtaggatctggattatttgtctaagtgagagattgcgaatatcaaaatatctgtctcacttcttctgtgaatgacacagagtagaaataaattcactttaaaaatatgactgaattttgaaaatcaagactgaatctcacatagctgcagacaggaactaagccagcctctttgtatgtggtaacaagtacagtataagaatgaaagatttaccatccttgaaagctctaatgaaaatcaaatccagcaatatatattcaactgtgtacaggatttaagaaacttattttatgaaggaagtaatagtgtgtagatatagattctgaagtctttaaacgtgtcttaataaattaagattcactggcattgagctgagctaccaggtgacccttggggacaaaaaacccacacaagtgaatttcacacaccagtataccttcaacaatatacttttgacacacacaaacctttgatttggtttcagagattttgcaaaatagtaccaatgtaatttacaactgtcatctttgaaattgtgtaaaagtggaataattttctgaagaaataaatcatggtttgtcaatgagttgcagagactgtctgacattaactttgtcaagattaaaggataaagtatatgacaatttgtttcatcatgctcatgacattatgcaattttctccctagcttttaatttttggaggcagaaaattgagccagaaatttttagtcattaggtctcctagcaacaagctgtaaaccttccaacaagcttggactagaatctagacactgaaatgcacatacatgctttatgtaatgcagaatgcatttattggagaactcataaacatcctataaaattttcttccctgagatgcaactataaaacttggccttattctgagaatgcttaacatagatttcatccatactgtaacactgattttgttgttgttgtccttaaagcagctcagcttcctgaggtagtgttatgtctctgtggcaacaaggtgaaaatgtctagcttattttgtcaaagtcaacaataatccacagactccagacctcaatatctgtcccaatttgccattttactttagtgctccaaaaatatggcttatagaaaaaacaataggtgttttaaagagatttacctgaatgatatagagaatgtctagatattttctggctatcaggtaaaacctacccttcaagatggtagaatatataatagcatacaaaacctctatttacctaataagtactttaatttacagaaaaaaaatgtaaatgtaagtgtcggatttagtgccaagtgcagggaatctgaaaaatgtatactaggtctctgctctccgtaattctgccttcatgggtcctagccccatccctcaggaggttgtcctaagatcgtcagtgtcagatgcttcacaatacggcctcacaccgtccctgggaaaggttggtctcctcctgctgcatcagatggatgatttcattgtacatacggtgaggagcatccaaaccccagatgaaatccacgtgagcccattcaggaatattcttatggtagatgaggttggtcacctcagagagcagcattttcacgtcttctggatttgaaagccagtcctgacctcctgtccacattgctgtagggaccgtcatatctctgactctgtaccttacaggagttggctagagaaaaggaatagttcttaactctaggtaacatttggactttcaggctcataatttatgtttcaaatagacataataaacatgccatctgttgtggtgaagggtacatgggtgttagagccacacaactctgttaagaatttctgttcccgcccttactttaaggtaaaattacttaacattattgaacctcagtttcttcttctgtgactggggataatatctgtaataacttgctagatcaaatgacaaaacacataaaaacatgtaatgccttgtatttcttttttcttcctattaaatattttgtaaataaattgtttttaaaaaaaaaaaa

SEQ ID NO: 1372 - DNA, 3049 bp, HOMO SAPIENS
ggcgagggtcggggccaccgcgcggcgacctcgggtcccggagcgaccgcagggcagccccgggcgccggccccggtgcgcgtctcctgtgcgcgcccctccgcgcgcggccccgatgctggacatgagcgaggcccgctcccagccgccctgcagcccgtccggcaccgccagctccatgtcgcacgtggaggactcggactcggacgcgccgccgtctcccgccggctccgagggcctgggccgcgcgggggtcgcggtggggggcgcccggggcgacccggcggaggcggcggacgagcgcttcccggcctgcatccgcgacgccgtgtcgcaggtgctcaagggctacgactggagtctggtgcccatgccggtgcgcggcggcggcggcggcgcgctcaaagccaagccgcatgtgaagcggcccatgaacgcattcatggtgtgggcgcaggcggcgcgccgcaagctggccgaccagtacccgcacctgcacaacgccgagctcagcaagacgctgggcaagctgtggcgcttgctgagcgagagcgagaagcggcccttcgtggaggaggcagagcgccttcgcgtgcagcacaagaaggaccaccccgactacaagtaccagccacggcgcaggaagagcgccaaagccggccacagcgactccgactcgggcgcggagctgggaccccaccctggcggcggtgccgtgtacaaggctgaagcagggcttggagatgggcaccaccatggcgaccacacagggcagacccacgggccgcccaccccgcccaccacccccaagacggagctgcagcaggcgggcgccaagccggagctgaagctggagggacgccggccggtggacagcgggcgccagaacatcgacttcagcaatgtggacatctcggagctcagcagcgaggtcatgggcaccatggacgccttcgacgtccacgagttcgaccagtacctgcccctgggcggccccgccccacccgagccgggccaggcctatgggggcgcctacttccacgccggggcgtcccccgtgtgggcccacaagagtgccccgtcggcctccgcgtcgcccaccgagacgggtcccccacggccgcacatcaagacggagcagccgagccccggccactacggcgaccagccccgaggctcgcccgactacggttcctgcagcggccagtccagcgccaccccggccgcccccgccggccccttcgccggctcacagggcgactatggcgacctgcaggcctccagctactatggtgcctaccctggctacgcacccggcctctaccagtacccctgcttccactcgccgcgccggccctacgcctcacccctgctcaacggcctggccctgccgcccgcccacagccccaccagtcactgggaccagccggtgtacaccaccctgaccaggccctgagggcccagccgcggggagggactcgcaggcgtcagggggcagccttgtcccggcccagtgtgtgtgaccagggcgggaggggccccagtggctgagctccaagtgcctgctgaagtctgcagggaaacacgcttgctgcccgtggccctcggcctccagatggccacacctctgccgacgacggaccagctccctctcccttctatctttctttttgaggtggtgggattattccacaaagaagggctgccgtttggtccctcttccgtgaggactggcggcaccagcaccttcgctttgcatctcggtagaggagaaacggcagcacagcccaaggaccaaaggagggggtggcaggggccttgcagggcgctgtgaggtccaggccggtcttggcgccgagagcccctgcactcaaggccacattccctcgacaacggctgcacgggctgtccgggatccggggtgtctgtccgcagactgggatgagtctactcgagcatctccgggacctgcctgtcagatctgaggtgtctccttgctggcagagtgcgctcacgcgagggctggctgtgatgaacacatctctcttttatttttatgtttttgataatttttatttttgaagcttaaatgtgtttcttctgaaagctgttaaagatgtatttatgttctgtgttattttatctttaattaatgaggtaattcgggcaaagagtagaatttaagacaaaacggaagctgggaagcttcccttgagggcaggcaggaggtggagttgcagctgttggccggcatcacgttgctcgttgctcggcttatgggaggccgccctggagggcccggaggtcccaaggtccctgggaggactgggcccctcatgcctcgagcttggcaaccgaaaacccgagggaggagaagggacctgccttgtgacatctctgatcaggttggggtgccccagcacccagtaccagtttggggtttgggaagcaggactccgtccctgtccccgactgtgccacgtggtaggacacataggacacaggaattcctgggtccttgcccatgactgtgccatgtggtaggacacaggacacaggaattcctggaaagtggtggcttcagaagtgatcttggctcgcaggcaccagtgccacctaccaagctgtgaaactaaaccttctccactaaacgtcgttagggcctcagttctagacgagtcatacctgattcacctgcactgcttcccctgtgtgctgagcatagagcatacaatagcgcctacttcacggaaacttgtgcctttaaactttgtaaacttaaacacagccgagaagttgcttctttgtactttttctacttttcctacttttttgtagaaaaaaaagataatgcctctgcttctatttctctgggggtgggggtgggggccgggagccgtcgcagacccgtttcatgcagcgtctcccttggcaccgcgttcggaggacgcaccctcactcccctgctgccttcactcctttctgaccaagcaacgctaacttttgtacagatcgatttgataaaattaaacaaagtgctttttatgga

SEQ ID NO: 1373 - DNA, 539 bp, HOMO SAPIENS
tgcaacccaaaacagtcagaacccttctcaaaatcctctggctaagtacccacctatcatcaagctgctgttgttggctctgaagtggtaaagcaaatatccacttatataataaagaggggaagagcagagggagataaatctccaatttccagatgtaaatggtatctatacatattcacctgtgaaagattaggaaatggaaacattagcttatttgattttcttgcatctagtaataagtattcagtgatcttgtgtgccaagcactatctgaagtaccttacatacatttattcatttaatctgtgaagcaacttcatgaagtagaaaccattttcattattttacagttgaaaggaggcttagggaagttatataacttgtccaaggtcacacagtttaagtagcacagttatgatttgaactcagtgtatcagactctcaagccttccatatagcttcccaaaagcagattacaagaaccaggcaaggcacagaatttcacagtaaagcttgtccctgaacatatgaccttc

SEQ ID NO: 1374 - DNA, 773 bp, HOMO SAPIENS
gacatcatagtatatccgtgagtcaagcggctgtgggtttttggctcttgcatctgctatagttctgtctcgggtgccatttgctaactctgttctctgtgtagctgcttttggcagctcctcatctctcttctaatccaccactcacagtcctagagaacagaccacaagttaagaccgtcacctacagaatcccaagggccaaaactgggcagaggacaactccatccttcttacaaaagggcttctccacaagaagcatttccgttagactctagcagtgagataccctgcttcaagaatttctcatggagccagaagcctttgaaatttgcccttatgatcctcaccaccgaatcccactcagcagattccagtaccacctggcatcgtgcaggagaaagaaccccaagaaagccaaaaagatggccacctgcaaatacaacgcctgccacgtggtccccatcaaaaatctggaggaacatgaggctgtttgtgtcaacaggagcgctgtggaagaagaggacaccgagaaccctctgaaagtcagtcctcctagttcagagcagaacgatgacacccagcagactttttttcctcaaaaggttgtttgtgaaaatgacacgaaagagtcagcaagagagaccagtccccagaagatcctcagaccaggacagtaaactgccagctgaggaaggagcacacgcctcatcaatgcatggaagaacgtgcaatgcatcagaataaaagacatgcaaagtaaactaaaaaaa

SEQ ID NO: 1375 - DNA, 384 bp, HOMO SAPIENS
  misc_feature (130)..(130): n is a, c, g, or t
  misc_feature (226)..(226): n is a, c, g, or t
aattcttgattcatctttgattataagtttttttttgtgattataaattcgatagaggaaaaatcattatggtccatttaaacttgaagaaatgtatctctccatgagcattaaattgccatatccattntaggaaagttttaatttaacccagatctgtacagaatataaatttataatgtaacaatttaatggttttcagctattggtagactgacttattctntctgctatatttagagtaacatacaggattaattttaaagagattggaatatggtgcttcatagtgatttctggattctcctgaaacatgccttaagtaaataatgttccagagttttagggtactttactatctccctggtttgcaagaagtaggca

SEQ ID NO: 1376 - DNA, 358 bp, HOMO SAPIENS
aatcttcgggagacttcttcaatgagtcagtgttagagctttcagtttccataaatgcagatttcctttactcagtttttttttaaacatgagctgatctttcttagtttgcactataataccctccactgaagtctcactgcaactgcttttaattatatgtgaagagaaactagccctttgctaaaatagttgcatgtttcacgggccagtgagtcatttagtcatacacttaagaactttccacctttcaagtgtttatcatcacctcggatttcacggcctaatgccagtcaatttcatggggcatagaagccctgtacgtattagtttgggccattattgtatcagtcttgtt

SEQ ID NO: 1377 - DNA, 2262 bp, HOMO SAPIENS
agcccaagacaccagggcatttgctgacatctgaggcccttcccaggaagacatggcctcgttcttggtgtggccactgaggacggcgctgagagggggaaagtcatgggcaggacctggtgtgggatgtggaggagacggcgcccggggaggaggagaattgtctctctccaaccttgacctccctggagctggtgaggcgggcctggagcaccacccgcttctgggacacctcttcatcagcgctgtgcccaggtggcctcacttgtcatctcaaagtggcgtcgaaccccctgacaggtggacgggaacccccggctggccctccagagaccaggaggcccctggctcaatgatgccacctgcagctgcccaaccctccgcccatggtgcccttgttccacctgccaccgctcatgaacctgtggatcacccagctctgcactggcttgcctgctgctgctgtctcagtttacctgggcagttgcccctggctatccggctgggatgggacttggacttagaagcaggcccctcctctggaaagctgtgtcctcgggccaggaggtggcagcctctaccttcctgagacagggacccttttctgtccatcagaggacagctgtatgaagacacagagagaaggcagccatctgtaagccaggaagagagccctcaccaagactggaatcagcagcaccttgatattggacttccagcctccagaactgcaagaaataagcacctgctgtttacatgcccagcctgcagtgcttccttatggcagattggagctaactgagacagctcccagcactcattcattcattcattcattcactcacctcatgtctactaaacagctctgggctggctctgggaagcagtgagtcacacacactgcccccagcaacgtgtgaaatatgtttagagacagtgggctacagcggaaagggtagatgccctgagaaccccagcggtgctggtcagaagcacaggccttgttgggctgaggctggcatggggtgaacctggggagcctcgggggcagaggtgatagatgtggggtgtttcaaggcagtgagacaaagaagggagatgggtggtgccccccaatgccaggcttcaccagcctcccaacacacgagtgttcacccgcctggatgagacacctctgtggacttgggagtgaaggcagtgaatttgggcaatgctggaggccgtgcaggtgggaggtgggacaggggcaagaggccggggcccaggcaggagctgacagcccaccagtggtgctcccctgagaagcaacctcagtgggtggcttggggtctgctgggctgtccccacactgacaccctggctgcagggcccccctgtgtccccagtgaggggtctcgggagctgtgtgtcctactcagggccatccctgcagcccatgctctctgggtgaccagttgccagcagtgtcccccctgccttgggcggaggctgaggaccccagggtgggagggaaggtgcggtgggggctcagccaatgctgcccagcctgagggtccctcacatgtgggccgcacccctgcgtcagccggagtgatctctgcttagggtggtttgaggtgagttctgatatctcaaacaccagcatcagggccagggcagacaaaataagagtgagctggtcaggggtgtcccagttgggagctcgctcacagtctttaaggaggcagggcacagcccagtgggggtggccacgaggccccgggcctgtggctgagatggcaactggcaccggcagtgattggaacagtccagcccatggagccctgtggccttggccggtggctcacggtgccacgggagctggagcaatgggtggcctcccttgcctggtgcctgagtgaaggaggactgggtgcccctgaggaaggaccttgccatactcctacaaatttacattattcttctttccccagtctcccctcagggacctgcagccatttgctggggtggctagtggaaagggggatcatcagactcagggggattactggactctaactctaacctgacacccactcctggggacacaaacacccatcggatctaatagtcagaggaggggcgtatggaggtcagtgggctcacggagttctagctcaggtccaaccctcggtgggtgcagaggtcacttccctagcctcagatgggtgagtaaacagacgtatgtggcagccagcagagcccccacatttgttccctgac

SEQ ID NO: 1378 - DNA, 5758 bp, HOMO SAPIENS
acgaggctagatggcttcacaagatggcggcgcgctgggagcgtatcatctgcgtttctaggagcttcgctatgcggctgctttaagattctagggttgtacaggcccacgccagacacgacgtctggcaggaacctcggcctcagagatggctctgagtaaatcaatgcatgcaagaaatagatacaaggacaaacctcctgactttgcatatctggcatccaaatatccagattttaagcagcatgttcagataaatctgaatggaagagtgagccttaattttaaagaccccgaagcagtcagagctctgacgtgtactctcctaagggaagattttggactttctattgatattccattggagagactaattcccacagttcccttgagactcaactatattcactgggtagaagatctgatcggtcaccaggattctgacaaaagtactctccgaagaggaattgacataggcacgggggcatcttgcatctaccccttacttggagcaaccttgaatggctggtatttcctcgcaacagaagtggatgatatgtgtttcaactatgcaaagaaaaatgtggaacagaataacttatctgatctcataaaagtggtgaaagtgccacagaagacactcctgatggatgctcttaaagaagaatctgagataatctatgacttttgcatgtgcaaccctcccttttttgccaatcaattggaagccaagggagtaaactcacgaaatcctcgaagacctccgcctagttctgttaatacaggaggcatcacagagatcatggcagaaggaggtgaattagagtttgttaaaaggatcatccatgacagtctacaacttaaaaaaagattaagatggtatagctgcatgctgggaaagaaatgcagcctggcgcctctgaaggaggagcttcgcatacaaggggttcccaaagtaacgtacactgaattctgtcaaggtcggacaatgagatgggccttagcttggagtttttatgatgatgtcacagtaccatcaccaccaagtaagcgaagaaaattagagaaaccgagaaaacccataacattcgtggtgctggcgtccgtgatgaaggaattatccctcaaagcatcacctctgcgctcggagacggcggaaggcatagtcgttgtcacgacatggattgaaaaaattctcactgatttgaaggtccagcataaacgagttccctgtggaaaagaggaagtcagccttttcctaacggccatagaaaactcctggattcatttaaggagaaagaaaagagagcgtgtgagacagctgagagaagttccccgagctcctgaggacgtcattcaggccttggaagagaaaaagcccacccccaaagagtctggcaatagccaagaactggccaggggcccccaggagaggaccccctgtgggcctgctctgcgggaaggcgaggctgccgctgtggagggcccgtgcccgagccaggagtccctgtcccaggaggaaaacccggaacccacggaggatgaaaggagtgaggaaaagggaggggtggaggttttggaaagttgtcaaggctctagcaacggagcccaggaccaagaggcttctgagcagttcggcagcccagtggctgaaagggggaaacgtctcccaggagtggccggacagtacctgtttaagtgtttgataaacgttaagaaggaggtggacgatgccttagtggagatgcactgggttgagggccagaacagggatctgatgaaccagctttgcacctacatacgtaaccaaattttcaggcttgttgcagttaactagaaacctcctgcacagttggaaacgtgttgatagtaacttgctttggagtggcctgtggggtggcaagaggaatcctaccagcggcccattagtagcacgatgtggaattatcttcgaaaacaaaaacctatgaatctgtcccccacctccccccgcctccttcccgctttttgagttacagggagtcgtagtgtggtcatttacaaggaggaattgtggtcatcagtaacaacagaaagccctcagtaaactcccgagggattgcaagctggctcaagctggcccctcagctctggactgcctctgcaaggtcagaagggttgtttgtggagtctgggctgggcagcactgcctagaatatcatgctgtctctgtcacccaagggtgtttcttgaggaggggtggctctctctgcctccagctggaggccctggtaccctgttctaggtcactcttcaagatggggcctaccttgcatcaatcccacaaagggagctgtatggtgggtggtggggaatctgggagagaaaccttagtaatgctgggaaggagcagcagagtctggggaccacccggtaaatggcacattcctgacacctggctgttttgatgttgcttatttcagaagcagaattaggtaagcaaaactccccggtgtgactgaggcacacagaaggcacccatacccccacctccagcctgttgacagtaccattttgtagcagttttactactgtgtgatttttgtttggacatctgaagtagagcttgttttgtttttaaataagaatattcacaaattaaaaaccagcggtcctatttgaatcctggggttagctgagtgagcggctgatgatagaaatgagaaatagaacaaaatagtatgtgccgtaggtagcttaagaaagtctcagatattttgttgctgatcaaatactgtttttttgtggcttcacttgtaatcccccctgtacttacctactcacattggagagttctgaggccggagtaactgtgtccttgaaacacgtttctaattggaatgccagggttcagtagccgtccccccggaaaggggtgaccttttgctgtgcttgatgttgcatcagcagcctagggttctgtttagactaaaatcttggccagagctccttgccatctgctaagaagactggggctgagtagttaagccagccttctgagaggtggctgttggtcaggacgggaagctggtgaccttggcatgtcttggcagcagctagatcaggccctcggcagagacacaggaagcggaactgctgtgccttaacttggctgtggagctggagctggagaaggcagcatactgaccagtggctttttgattgattgtttgttatgaggtggagttttactcttgttgtctaggctggagtgccgtggtgcgatcttagctcactgcaacccccgcctcccgggttcaagcgattctcctgcctcagcctcccaagtagctgggattacaggcacgcgccaccacgcctggctaattttgtgtttttggtagagatgggatttcaccatgttggccaggctaatctcgaactcatgatctcgggtgatccgcccaccttggcctcccaaagtgctgggattacagccgtgagccactactcccagcctctgaccagtgttcttaacctggtccgtggacctccagagagtccatgtacctcctagagttacttctaaaagctctgtgagcatgtgtgtgtgtgtgtgtgtgtgtgtgtattttttttcctggagagagggttcccagaaccctcagacacagacaaaggggtcaataacccactaaggattaagaatcattattctagtccaagcattcatgtgtcaggctgcaaaaaacaatacccagggtcacacagagccaagactcaattcaggaccgtggattcccctggtctagaaattttctgctgtgccagcccacaccaccccactgtccttacctcgagtgaatattacatttgagtcatttgctgggcccaaacctagtttccttggtataattttaggataattgtttaagtggcaactattcattcagtaagtagtaagtacttattgtttgcttgtttcattatgaaagagtggcacatgctcattaaagatttggaaaaatgaaagtcaaaacaacaaaatcaccccgagtcccaaccttctgtaacataaccactcttggcattggcgtgttcctttctagtctctctgtagacggggtgtgtgagtgtgtgggtttaactttggttgtcctcatgctgcgtattcagttttgtattctggtcctttgttcatttaacatcttacaagtatttgtccatgttgtaacagtagtgtattagcttacactccttgcctgttcaaaatgtctttcaggcacagcactggcctttaagcctgtgtcgtagggatttccagagaatgctctgtgtattgaagcacagaaggtgtttctgtgtctcagtgtgtttctgtccctaggtttaaggcttcatgtcatggaggagattttatagatgtcaagctaatgaccttagagttttaaaaaatccgtgaccgtggccaggcgcagtggctcacgcctgtaatcccagcactgtgaggctgagatgggcgcatcgcatgaggtcgggagtttgagaccagcctggccaacatggcgaaaccccgtctctactcaaaatacaaaaattagccgggcatgatagcacgtgcctgtaatcccagctactcgggaggctgaggcaggagactcgcttgaacctgggaggtggaggttgcagtgagccgagaatgccactgcactacagcctgggcgacaaagtgggactgtctcaaaaaaaaaaaaaaaaaaaaaaaaaaaggaacccatgagcaggccagctttcagtctggagccgagtgccttctgtgcatttggatgtttccatttccttccctgagaagattttcttaggctacctagtgagagaacattgaaaatatttttaaaggacatctaagcattgttttggtcatgcatatgctttataattgtgtgttgtttcatagcatatacctctggtacaggtgggcaagtttttctttgaagaaatgggttattgactcatatgtcataaccttgagtgttactctcccggtgtccagaggtcacattcatgttgcggggttggtatgaaattaaatcttggtgatgtgaccctacattctcttctggtccctagaatcggcttctggtctcctgataactgaagtggagacagaagttgagcctgttgcccaggcaaactaaagctgcttttgttcttcggaatctgctttgcctccgtcagcctgcttccttccccacacatgctggccgcactgtccccactccagacctctgctgtgtgtcctgggcagggccgcgttttggcagtaccctttcaactcatcctaagcttcgtgtagattactttagtatatattttttataaaacataaagcctttcctctcgatggaaatcaaagcttaccatgtgagcactcgaacttctaagttgtgacaggaataacaaaactgcaaggagtggaaaagatggaaaagcctgtgggaaatccgaggccttttgaaagaagggagctgatgacttcacgaccagctcctggagcccctcctttctgctgaagccgcggcatttccctccgtggccacacgagggcacccttggcccttttatcaaagcgccttcacttccccgtgggaatggagacaagtctgtccacggtgttttcttgaaatacccagttgctacccagatttgtatttttatgtaaacaaatacattttcacagaaataaaatttgaaaaataaaagtagaaagagaaaaaaa

SEQ ID NO: 1379 - DNA, 8395 bp, HOMO SAPIENS
cccgcgcagacttgtctccggccagtcgcgcgtgggtagaggccttaggcgggcgttgcgaagggttgtttgctagagttcggaccttgttacggcgcgaagttccctccttggggcgggggaaaggtaccgcacccgctacctagtgtgaatgaactgtggcgtgggctgctaagggcaggctgcggagtacccgggccgtggccatgaactcacccgtggaccctggcgctaggcaggcgttgaggaagaagccacccgagcggactcccgaggacttaaatactatttattcttatcttcatggaatggaaatattatcaaatctcagggaacatcagcttagattaatgtctgcaagagcacgctatgagagatacagtggcaatcaggttctcttttgttcagaaacgattgccagatgttggtatatcctactttctggatctgtgcttgtgaaaggctccatggtcttgcctccttgcagttttggtaagcagtttggaggaaaaagaggatgtgattgtcttgtattagagccttcagaaatgattgtggtagagaatgccaaagataatgaagatagtattctacaaagagaaattcctgccagacaatcccgaagaagatttcggaaaattaactataaaggagagcgccaaaccattactgatgatgtggaggttaacagctatctttctcttccagctgatcttaccaagatgcatctcacagaaaaccctcatccacaggtgactcatgtgtcttctagtcagtctggttgtagcattgccagtgactctggaagcagcagtttatctgatatctatcaggctacggagagtgaggtaggagatgtagatttgacacgtcttccagaaggacctgttgattctgaggatgacgaagaggaagatgaagagattgatcgaacagatccattgcaggggcgagatcttgttcgagaatgtcttgaaaaagaacctgcagacaaaactgatgatgacattgaacaattgctggagtttatgcaccagctccctgcatttgcaaacatgaccatgtctgtaaggagagaactctgctcagtgatgatttttgaagtggtagagcaggctggagctattattcttgaagatgggcaagagcttgactcatggtatgttattttaaacggcactgtggaaatcagtcatccagatggaaaagttgaaaatttgtttatgggaaatagttttggaattactcccactctggataagcagtacatgcatggaattgtcaggactaaagtagatgattgtcagtttgtctgcatagcccagcaagattattggagaattttaaaccatgtggaaaaaaatacccataaagttgaggaagagggagaaattgttatggtacatgagcatcgggaactagaccggagtggaaccaggaaaggacacattgtgatcaaggcaacacctgagcgtctcataatgcatttaatagaagaacattccatcgtggatccaacttatatagaagattttctattaacttacaggacatttcttgaaagtcctttggatgttgggatcaaactattggaatggtttaagatcgacagcttaagagataaggtgacacggattgtattattatgggtaaataatcattttaatgattttgaaggtgaccctgctatgactcgatttctagaggaatttgaaaaaaatctggaagatacaaagatgaatggtcatctccggttattgaatattgcctgtgctgcaaaggctaagtggagacaggttgtgctgcaaaaggcttcccgcgagtcccctctacaattcagccttaatggagggagtgagaagggatttggtatttttgttgaaggagtagaacctggtagcaaagctgctgattcaggactgaaacgtggtgatcagattatggaagtaaatggacaaaactttgagaatattacatttatgaaagccgttgaaattttgaggaataatactcatcttgcacttactgtgaagaccaacatttttgtgttcaaagagttactttttaggactgaacaagagaaatctggtgttcctcatattcccaaaattgctgaaaaaaaaagtaatcgccattctatccagcatgtgccaggagatattgaacagacatcacaggagaaaggaagtaagaaagttaaagcaaatactgtttcaggtggaagaaacaaaatcaggaagattttggataaaacacgatttagtatcttgcctccaaagctatttagtgatggaggcctaagccaatcacaagatgacagcattgtgggaacaaggcactgtaggcatagtctggctataatgcccatccctggaacactctcatccagcagccctgatctcctgcagcctaccaccagtatgttggatttttccaatccttcagatatccctgatcaagttataagagttttcaaagtggatcagcaaagttgctacattatcatcagtaaagacaccacagctaaagaagtagtttttcatgctgttcatgaatttggtttgaccggtgcatccgacacatattctctctgtgaagtttctgttactcctgagggtgtcataaaacagagaagacttccagatcagttctccaaattagctgatagaattcaactcaatggaaggtattacttaaaaaataacatggaaacagaaaccttatgttcagatgaagatgctcaagaactagttaaggaaagccagctatccatgctgcagctcagtaccattgaggtggccacccagctgtcaatgagggactttgatttgtttcgtaatattgaaccgactgagtacatcgatgacctttttaagttaaattccaaaacaggaaatactcatttgaagaggtttgaggacattgtaaaccaagagacattctgggttgcctcagaaattttaactgaagcaaatcagctcaaacgaatgaagattattaagcattttattaaaattgcacttcattgtcgagaatgtaagaacttcaattccatgtttgcaataataagtggcttgaacctggcatctgtagcaagactcagaggaacttgggaaaagttaccaagcaaatacgagaaacatcttcaagatctacaagacatttttgatccatctagaaacatggcaaagtatagaaatattcttagtagtcaaagtatgcagcctccaattattccactcttccctgttgtcaagaaagatatgacatttctacatgaaggaaatgactccaaagtagatggtttagtaaactttgagaagttaagaatgatttccaaggaaatccgccaagttgttcgaatgacttctgctaacatggacccagctatgatgtttcgacagaggaagaagaggtggcggagtctggggtcactgagtcaaggaagcacaaattcaaacatgctggatgttcagggaggtgctcacaaaaaaagggcacgccgcagctctctgcttaatgccaagaagctatatgaggatgcccaaatggcaaggaaggtgaagcagtatctttccagtctcgatgtagagacagatgaggagaagttccagatgatgtcattacagtgggagcctgcatatggtaccttgaccaagaatttaagtgagaaaagatcagccaaatcatctgaaatgtctccagtgcctatgaggtcagctggccaaacaactaaagcccacttgcatcaaccccacagagtaagccaggtgcttcaggtgccagctgttaatttgcaccccatcaggaagaagggacaaacaaaagaccctgcactgaatacaagtttacctcagaaagttttaggaacaactgaagaaataagtggtaagaagcatacagaagacactatttctgtggcgtcatctttacattctagtcctcctgcatctcctcaaggctcccctcacaaaggttacacacttattccatcagctaaatctgacaacttgtctgactccagccatagtgagatttcttcacggtccagcatcgtgagcaattgttctgttgactccatgtctgcagctctacaggatgaacggtgttcctctcaggccctggcagtccctgaatccactggggcattggaaaagacagagcacgcttcagggataggagatcatagtcaacatggccctgggtggacactcttgaagccatctctaatcaagtgtttagctgtctcatcgtctgtgagcaatgaagagatttctcaagagcatatcattatagaagcagctgacagtggtcgtggaagttggacttcgtgttcaagcagctcccatgacaacttccaaagccttccaaacccaaaaagctgggattttttgaactcttacagacatacccatttggatgaccccattgctgaagttgaacccactgactctgagccctattcctgttctaaaagctgctctagaacttgtgggcagtgtaaaggaagcctagagagaaagagttggacctcctccagttctctgtctgacacgtatgaaccaaactatgggacagttaaacagagagtattggagagcaccccagctgagtcatctgaaggcttggaccccaaggatgccactgacccagtttataaaactgtcacttcaagtacagaaaagggcttgattgtgtactgtgtcacctcacccaagaaggacgataggtatagggagccacctcccactcctccaggatatttggggatttctttagcggacctaaaggaaggaccccacacacacctaaaacctccagattatagtgtggcagtgcagaggtcaaagatgatgcataacagcctctctagactgccaccagcttctctcagtagcaacctcgtggcctgtgttccatcgaagattgtaactcagcctcagaggcataatttgcagccattccatcctaaactaggagatgtgactgatgcagatagcgaagcagatgaaaatgaacaagtttcagcagtctagcctttggatgacctatttgaaaaccactgaaagtcgtggaggaatgggcaagaaccacctcatgattctgcaggccattgctaacgaacagctcattgctacaaccagtccagaggttttattccctctactccgagcaatgaaatagacctgagttatgcttcctttcatttaatttctgcagataaatagtttcctgagcaatggatgctatgcctggataccagtctccactttgcacgccggaactgccttgggaccacagttacagaaaaaatgtaaactcagagtgatccttgtgtatattgctatagatttttctttaacaagctattttaaagataatggcattattatttccaagccatagcttgggctgaaggacaaattgaaattgtctgccaataccaaggatattcttgtatatttgaaaaataacttattatttgaattgttgtggttttgtttgtatttgagagctcttgttagctgatattcatgtttgaggtcataaaattgtctctggtctgaccaaacagaagtcatctttacagaggtgatatgcttgatctacacagagatgtgacttgatctgtagcaccaatgcaatgtaggtctcagtttgagagaaataggaagccctttgcagttgaggtgttaggaacctgctggtcatggtgtggaaggccaaatgaagctgccacagggtttcttgtcagtcctttgggaaatgggagggagtagtttggggaggagggtgggaaccctaatttccacagaatgaaattttgatgttaaatgacatgtatacaaattcttccttaagtgaaagttatgctgcatcgaattgtaactgaaagtatagatccaacaaatagagactgggttctagagagttctggtctatagaaacccaaaactaaaatctctcataactcaagtatggaatactttttttaaagaaattcttatcatgggtgttgtaataatgaagacgaatttgactttatgcagtgttctgcagcatgcctcccccacatctcatagcaccaggttgtgtctgacctgacataccctgcagctctcagctggctgcagtaacattttgtgggagaaagaggagctggagttacagaaatgattgtctcttggttctcagtttttagcccttgagaggacatacttttccagcctcatgggtatggcactcttaattaaaatttcagtgactgtttactggatgaggcagatttttcacatttttgcaaattaaatatattttatatatattaagtttaattttttcagtttttttaatgtaaaagcaagtgaaattttaataaacttctgtaattaccaaaaaaaaaaaaaaaaaaaaagccaaagccattaacgtgcactacccagatcaacttggagccaaaaggggtttacttctgaatggctgtccgtatgtgtccacataggatttagttggtttgtggcctcctttatagaaatgtgttgtctttccctagctgtctctgctgtctgtcttcctgcatatcccccttcattttaaaatcatgaatcagttgtaagtggtaaatggtagtagttcatctttcccatcaacatgattgtctctttattttaggaataatagcatttcaaaaattcctgtggtaaagaaacattaatctgaaacttaagccttagaaattaatcgcaggtatgatagaatgaggcttggtggttccatagctttcttggtcctttgaaatgggaaataacctgaaccaaaaatcctagtttgaaagttacacttcagtgatttggcctataaacagtggtcctatgattatacattttttccttcactgatttgcataattttgttttcatggccacagcaaaacaatgtgaaatatatttttgctatacccactttttttatcaaattcagatgtctactctcaccattttatattcatttccccagaaaaatgtgctgttttcataatgtctttatttagcaggtctttcaaaccaaatggaagccttacctgtctttgtccttaatagtgtaaatatcttgcacagagtgttgaggcctatggttttggacttgcaccttacagctgcctttgttttatctatctagctttaactgtgagtgttcagatcagctgatcacattgatcaggagccaaagccaaatgctttgtagtttgttatgtatgtatcccttaaaaaatcatgaggttttgatttttatattttaactaagggtacattcctgccttctcttagtttgtcatatgactagaacaagagaagtcttaagctgcatttactccaattccagatctccatttgtttttgttttataaatttataatcttaatgaagagactagtgccctctcttcctgccacaactctcaatctgccaagactgttgaagcagttaacgctcagtgcaaacttttgccaaatagtaagtttcaacaaaatatctttatagtgaaagattttgagaattagtaaatccagtacatgattccataaaagcttattaaagttaataattctaatttactccaaatgattactttcaatatgatctttggggagaaaaagcctttagtgaattttcttgagggtgataaatcacatcattgcgatctatatcacctccttgagaatctctcccaggctgaaaatgtgatggtaatcatgggtgtttttaagaacaaatctaatttttatcaagtgttctttcctctacaaaaaaggaaggaggagaaaaagcttccttaaaactgattattttgattcaattttaagtttctaaaaaaggtgatattaaagtatatgtattccttcagcattaccttaaaggctagaaaaacgggataaatcttcagaaaagtgtcaaaagtgtcacagtacatgttcaaatttaaacttgaatcctggttcatctttgacttttgttgtgcatttttaatgcttctttatttttgatacacagaatgcagttgaacttgatcttttaaaattgagacatgtaagctaatcagcaaaagacagaaacaaaactgcacatctgtaataatcagatagcaattctactgcacaattcattgattgtaaggtatcctgtaacaagcaatgtttgtctcctattttttgatacctcttaaacttatgtcttttagaaagacagtgcctctgtatgctttttgtatttttactgagtgtaaatatttgttatatttttggttaagagaatgtaaaaataccatttattattatcatatctactaatacattggtggaatcaataaagaatctacattaaaaaaaaaaaaaaaa

SEQ ID NO: 1380 - DNA, 3725 bp, HOMO SAPIENS
gtcaaatagcagccgcggggaggctcgttcccatcggcatctgtgactggctgcgatcgagggcccgggcggccggccagccgtctcgccgagtgcggactggccggatctgctgtcagtcagcgggaacagacttctccctctccatctggtcaactgcgggagaaaaattttcgagaatttccagcaggcaaggcagtggccgctttgactgcttgcttcggagatccgagacgacggagaaggcactcttatttaccgaccaagaaagctcctcccccgtcctccgttagctaattaaaacatttttcagggacgtagccatccagagacattccattattgttccattgacctttccctcatcactgagtcctttggagctgagttatgtcaacagctgccttaattactttggtcagaagtggtgggaaccaggtgagaaggagagtgctgctaagctcccgcctgctgcaggacgacaggcgggtgacacccacgtgccacagctccacttcagagcctaggtgttctcggtttgacccagatggtagtgggagtccagctacctgggacaattttgggatctgggataaccgcattgatgagccaattctgctgccacccagcattaagtatggcaagccaattcccaaaatcagcttggaaaatgtggggtgcgcctcacagattggcaaacggaaagagaatgaagatcggtttgacttcgctcagctgacagatgaggtcctgtactttgcagtgtatgatggacacggtggacctgcagcagctgatttctgtcatacccacatggagaaatgtattatggatttgcttcctaaggagaagaacttggaaactctgttgaccttggcttttctagaaatagataaagccttttcgagtcatgcccgcctgtctgctgatgcaactcttctgacctctgggactactgcaacagtagccctattgcgagatggtattgaactggttgtagccagtgttggggacagccgggctattttgtgtagaaaaggaaaacccatgaagctgaccattgaccatactccagaaagaaaagatgaaaaagaaaggatcaagaaatgtggtggttttgtagcttggaatagtttggggcagcctcacgtaaatggcaggcttgcaatgacaagaagtattggagatttggaccttaagaccagtggtgtcatagcagaacctgaaactaagaggattaagttacatcatgctgatgacagcttcctggtcctcaccacagatggaattaacttcatggtgaatagtcaagagatttgtgactttgtcaatcagtgccatgatcccaacgaagcagcccatgcggtgactgaacaggcaatacagtacggtactgaggataacagtactgcagtagtagtgccttttggtgcctggggaaaatataagaactctgaaatcaacttctcattcagcagaagctttgcctccagtggacgatgggcctgattaccagctgggacttagagtttctgtgcaacagtttttcactgagcatgtcaagaaactgataagatcaaaaaggtctcctaactcactagatcagcgcacaagtcagtgtaaaccacttagatagtagttttttcataaatgctcatcatatttatgttccgctgtacatgttcagtataaatatatgtgtagtgaagctactgtgagtctttaaatggaaagagcaaatgagaagtggtttggatacacttgatgagagatgagagtgtcacattaataatttttaagactcttaggcagctatgggtttcttttgatcatttttgttctttattcatttgaacacgtttttgaagttcttcaaaactagtcagtttgaattttgacagctattcaatatgtgatctccaagtttaaaaaaatttttttccagacttccctaatcctaaaatgcgagtttttatttttaataactgtaccaaggaataagtatgaaaacagttctctgttaccatattttgtattctggaccacttactggtgaaagcaaccatgcaaaagaaattaatttggccaggcacagtggctcatgcctgtaatcccagcactttgagaggccaaggtgggtagatcatctgaggtcaggaattcaagaccagcctggccaacatggtgaaaccctgtctctagtaaaaatccaaaaaaaaaaaaaaaaaaaaaaaaaaaattggctgggcgtggtggcagacacctgtaatcccagctactcgggaggctgaggaaagaggaatcacttgaacccaggagatgggggttgcagtgagctgagatcatgccattgcactccagcctgggcagcaagagcgaaaaactccatctcaaaaaaaaaaaaaaaaagaaagaaaagaaattaattcagatgatgtgacattactaaattgtatacatatttataaatgtgtatttcagctgtctcatcagccctcccctccatttattcctatttttctgtagttaagaatactgtaaaaatgtgactattccttaatatcagaaaagaatgcacaggctgagtcttccggtcaaaagttaaatactgatggaatcaagtattttgtatgaagttctcatttgttatctctaacgctattttgtgttttgcatatagtattatagtatgtgtatatcactttttgtatagagtaagcaattgaataatttgttaataaaaataataccacattgactgatactgctatagacatagcttgagttttatgtctcctttttgctcattttctaagacttaggagaaagaataaatctaaaatgaccattaaaacattctccatttcagcttgctgtgtaacttaggaagtataaaactatacttctctttatctgcatgtaagtttgctgttaaaatgtgaatttctaaatgtgtatttggaattatttccgtagtttatttctgcaaactatgtaaatttgttatatgtgtgagtatgtgtacatatgtatattttagagtaatataaaattaaagggaacaatcttgcatagctctttcaccagttttaaattattgatacgttatttttaaggactcttgacaaactaggggcaattttcttatagtggagacccagtgattatcagcagatgaggaaataggttaaaaattgctatatggcaatttgtatataaagtaataggatgtgagaaaaatactgaatcttaagaatgacatggaattctgtggcagaaacaaaagaaaaagttgatgtagtatataccttcaactgtgttttgagttgacttttttttttttctttaagctttgggtaaaaatgtatgaggagggagagggcccaatataaatatttacatcttcttacctttttggaaatggaagaagataaatcttgagtttttctgcctatattaatcaggaattgccctttgaaaaaagtgctaaataaatattttgattttttttttcaagggaagttaggtgaaagaaggaaaaacatcacaggaaagactgttaacattctgtttgttgtctgagaggtgaggaaccaaagggaggcaactaaagcgggaaaccatcttgctttttctaatcagttcttggaacagaaatgtggaagctacctttaggaacatggagaatttccaaaccaacaggcaaaggaaaactaacgcacaaa

SEQ ID NO: 1381 - DNA, 11425 bp, HOMO SAPIENS
gcgcgcgcgcaggctcttcagctggagcggacacacggtgtgcgaaccgaacagaataacccgcccccagcgggatgtgaaggactccgggtgaggccggccacgccccgcacggatgggaaggccattgtgactatgtggtgattacagttgtcttactactgagtttcctactgaaatcatggaggagaaacagcagattatattggctaatcaagatggtggaacagtggcaggagcagcacctaccttctttgtcatcttaaagcagccaggaaatggcaaaactgatcaaggaattttggttactaatcaggatgcctgtgctttggctagtagtgtgtcatcaccagtaaaatctaaagggaagatttgccttccagctgattgtactgtgggtggaatcactgttaccctcgataacaatagtatgtggaatgagttctatcatcgaagcacagagatgattctgaccaagcaaggaagacgcatgtttccttactgtcgttattggataacaggtttagattcaaatttgaagtatattcttgtcatggatatatctcctgtggataaccatcgttataagtggaatggtcgttggtgggaacctagtgggaaggctgaacctcatgttttggggagggttttcattcatccagaatctccttccacaggtcattattggatgcatcaaccagtatctttctataaactcaaacttaccaacaatacactggaccaagaagggcatatcatcttgcactctatgcatcgttacctgccgaggcttcatttggtgcctgcagaaaaggctgtggaggtgatacaattaaatggccctggtgtccacacttttaccttcccacagactgaattctttgcagtaacagcttatcagaacattcagattactcagctgaaaatagattacaatccatttgccaaaggctttcgggatgatgggctgaataataagccccagagagatggaaaacaaaagaacagctctgaccaagaagggaataatatttccagttcttctggtcatcgggtccgtcttacagaaggtcaggggtcagagatacaaccaggtgatttggatcctttgtcaaggggtcatgaaacatcaggcaagggtttggagaagacttcccttaatataaaacgagactttcttggtttcatggatactgattcagcacttagtgaagttcctcaattgaagcaagagatttctgaatgtcttattgccagcagttttgaagatgactcccgtgtagcctcaccgttagaccagaacggaagcttcaatgttgttattaaagaggaacctctagatgattatgactacgaacttggtgagtgcccagaaggggtcactgtgaaacaggaagagacagatgaagagacggatgtatactcaaacagtgatgatgatcctatactagagaaacagctaaagaggcacaataaagttgacaacccagaagctgaccatctatcttctaaatggcttccaagcagcccatcaggtgttgctaaagctaaaatgttcaaattagacactggaaagatgccagtagtctatctggagccctgtgctgtcaccagaagcacagttaagatttctgaactccccgataacatgctttccacatctcgaaaggataaatcttctatgttggcagaattggaatatttgcctacatacattgaaaattccaatgagactgccttctgcttaggcaaggaatcagaaaatggtcttagaaaacattcaccagatctcagagtggtacaaaaatatcccttactgaaagagcctcagtggaaatatcctgatatatctgacagcattagcacagaaagaatactcgacgattcaaaggattcagttggagactcactttcaggaaaagaggacttgggcagaaagagaacaactatgcttaagattgcaacagccgcaaaggtagtgaatgctaatcagaatgcctctccaaatgtccctggaaaaagaggaaggccacgaaaattgaaactctgtaaggcaggacgaccacctaagaacacaggaaagtctttaatttctacaaagaatacacctgtaagccctgggagtacctttccagatgtgaagcctgatctggaagatgtggatggtgttctctttgtttcctttgaatcaaaggaagctctagacattcatgcagttgatgggacaacagaagaatcttctagtctccaggcatcaaccacaaatgactcaggttacagagcaagaatttcccagttggaaaaggaattgatagaagatttgaagactttgcggcacaagcaggtgatacatcctggtcttcaagaagtgggcttaaaattgaattcagtggatccaacaatgagcattgatcttaaatacttgggagtacagttacctttggctccagctactagctttcctttttggaaccttacaggaaccaaccctgcctctcctgatgcgggatttccctttgtttctaggacagggaaaaccaatgatttcactaagatcaagggatggaggggaaaatttcatagtgcttctgcatctaggaatgaaggtggaaattcagaaagttcactgaaaaatcgttctgctttctgtagtgataagctagatgaatacttggaaaatgaaggcaagctgatggaaacaagcatgggtttttcttctaatgctcccacatctcctgtggtgtaccagcttcccactaagagtaccagttatgtacgaacacttgatagtgtactaaagaagcaatctactatttccccttctacctcttattctttgaaacctcattctgtaccccctgtctctcgaaaggcaaagtctcaaaacagacaggcaactttcagtggccgaactaaatcatcttataaatccattttaccataccctgtttcaccaaagcagaaatactctcatgtgattctaggagataaggttaccaagaattcttcaggcatcatctcagaaaatcaggcgaataactttgttgtgccaactttggatgaaaatatatttccaaagcagattagtttgcggcaggcacagcagcagcagcaacagcaacagggaagtcgccctccaggcttgtctaaatctcaggtgaagctaatggacctggaagactgtgcactttgggaaggaaaaccaaggacatacatcacagaagagcgagcagatgtatccttaacaactctacttacagctcaagcatccctcaaaactaaacctatccacacaatcataaggaaacgagcccctccctgcaacaatgacttctgtcgactgggttgtgtatgttccagtctagctttggagaagcgccaacctgctcactgccgccgaccagactgcatgtttggttgtacttgtttgaaaagaaaagttgtacttgttaaaggaggatccaaaactaagcattttcagaggaaggctgctcatcgagatccagtattttatgatactctgggagaggaggcaagggaggaggaagaaggaatcagggaggaggaggaacaattgaaagagaaaaagaagagaaagaagctagaatacactatatgtgagacagagcctgaacagcctgttcgacattacccattatgggtaaaagtagaaggtgaagtagatccagaaccagtttatatccccacgccttctgtcattgagcctatgaaaccattgttattgcctcagccagaagttttatctcctactgtgaagggcaaactgctcactggaattaaatctccacggtcatatactcccaaacccaatcctgtgattcgggaagaggacaaagatccagtctacttgtactttgaaagtatgatgacttgtgctcgagttcgagtatatgagcgaaaaaaagaggaccagagacaaccatcttcctcctcctccccatctccatcatttcagcagcaaacttcatgtcattctagccctgagaaccataataatgcaaaggaacctgattctgaacagcagcccttaaaacaactcacctgtgacttggaggatgattctgataaattacaagaaaagagctggaagtcttcctgcaatgaaggagaatcctcttctacttcttatatgcatcagaggtcacctggtggtcccaccaaactgattgagatcatctcagactgcaactgggaggaagatcggaacaagattttgagcatcttatcccagcacatcaatagcaacatgccacaatcacttaaggtgggcagcttcatcattgagttggcttctcagcgaaagagccggggtgagaagaaccctcctgtttattcttctcgtgtgaaaatctctatgccatcatgtcaagaccaagatgatatggctgagaaatctggatcagagactcctgatggtccattgtcccctgggaaaatggaggatatctctcctgtgcagacagatgccctggattcagtgagggagagattacatggaggcaaaggtctgcctttttatgcagggctttctcctgcagggaagcttgtggcctataaacgtaaacccagttcaagtacatctgggcttatccaggtagcatccaatgccaaggtggctgcatccaggaaaccacgtaccctgttgccttcaacatccaattccaaaatggcatcctcctctggcactgcaacaaatcgccctgggaagaatctgaaggcgtttgtcccagcaaaacggccaattgaaaatgctgctcaaattccagtggctactccacaggtctctcctaacacagtgaaacgtgctggacctcgattgttgttgattccagtgcagcagggttctcctactcttagacctgtctcaaacacacaacttcagggacatcggatggtcttgcagcctgttaggagtccaagtggaatgaacttattcaggcaccctaatgggcagattgtccagcttctacctttgcatcagcttcgaggctctaatacccagcccaacttacagcctgtcatgtttcggaacccagggtctgtgatgggaatccggttacctgctccttccaaaccctctgagactccgccatcttccacttcgtcctctgctttctctgtcatgaatcctgtaattcaagctgttgggtcttcttcagcagtgaatgttatcactcaggcaccatcattgctttcctctggagctagttttgtgtctcaggctggtacattgaccctgaggatttctcctcctgaaccacaaagctttgcaagtaaaacaggctctgaaaccaaaataacttatagctcaggaggacagcctgttggtacagccagtcttattcctctccagtctggtagttttgccttgttacagctcccaggacaaaagcctgttcctagctccattcttcagcatgttgcttcccttcagatgaagagagaatctcagaatccagaccagaaagatgaaacaaactcaataaaaagagagcaagaaacgaagaaggttctacagtcagaaggagaggctgtagaccctgaggctaatgtaataaaacaaaactcaggagctgctacctcagaagaaactctgaatgattccttggaagataggggtgatcatttggatgaagaatgccttccagaagaaggttgtgcaactgtcaaaccatctgagcattcctgtatcactgggtcacatacagatcaagattataaagatgttaatgaagaatatggggctaggaatcgtaagagttccaaagaaaaagtggctgttctggaagttaggaccatttctgaaaaagccagtaataagacagtccaaaatttaagtaaagtacagcatcaaaaacttggtgatgtgaaggtggaacagcagaaaggatttgacaatccagaagaaaactcaagtgaatttccagtcacctttaaggaagaaagtaaatttgaattgtcaggaagcaaagttatggagcagcaatctaatctacagccagaggccaaagagaaggaatgtggagactctctggagaaagacagggaaagatggagaaaacatctgaagggccccttaaccaggaaatgtgttggagcttcacaggaatgtaagaaagaggcagacgagcagttaattaaagaaacaaagacatgtcaggaaaattcagatgtgtttcagcaagaacaaggcatctctgacttacttggaaaaagtggaattactgaagatgccagagttttgaaaactgaatgtgattcttggagtaggatttctaatccttcagccttctccattgttcctaggagagctgcaaaaagcagcagagggaatggacattttcagggtcacttactgctacctggagaacagatacaaccaaagcaagagaagaagggtgggagaagcagtgctgacttcactgttttggatttggaagaagatgatgaagatgataatgagaaaactgatgattctattgatgaaattgtggatgttgtttctgactaccagagtgaggaggttgatgatgtagaaaagaataactgtgtagaatacattgaggatgatgaggagcacgtggacattgagactgtagaagagctctcagaggaaattaatgttgctcacctgaagaccacagcggcccacacacagtcattcaaacagccgtcctgtactcacatctctgcagatgaaaaagcagctgaaaggagtcgaaaggctccaccaattcctctaaaactgaagcctgattactggagtgacaaactacagaaagaagcagaagcgtttgcttattatcgccggacacacactgccaatgagcggcggcggcgtggtgaaatgagggatctctttgagaaattaaagatcacattgggattacttcattcttccaaggtttccaaaagtctcattcttactcgagccttcagtgaaattcagggactaacagatcaggcagacaaattgataggacagaaaaatctcctgactcgaaaacggaatattctgatacggaaagtatcgtctctttcaggtaagacagaagaagtggtcctgaagaagctagagtatatttatgcaaaacagcaagcactagaggcacaaaaaagaaaaaagaagatgggatcagatgagtttgacatatctcccagaattagcaaacagcaggaaggatcttctgcatcatctgtagatcttggacagatgtttataaataacaggagggggaaacctttgattctttccagaaaaaaagaccaggccacagaaaatacctcacccttgaacactccacacacctctgccaaccttgtgatgactccgcaagggcaattgctcaccctaaaaggtcccctattctcaggaccagtggtagctgtttctcctgatctcttagaatctgatcttaagcctcaagttgccggtagtgctgtggctctaccagaaaatgacgacttatttatgatgccacgaattgttaatgtgacatcattggccacagagggaggtttggtagatatgggtggcagcaaatatcctcatgaagttcctgatagcaagccatctgaccatctgaaagacaccgtcaggaatgaagataattccttagaggataagggtagaatctcttccagaggaaacagagatggcagagtgacgttgggtccaacgcaggtttttctggcaaacaaagattctggttatccacaaatagttgacgtttccaatatgcagaaagcacaagagttcttacctaaaaagatttctggtgatatgagagggattcagtataaatggaaagagagtgaatcaagaggggagagagtgaagtcaaaggattcttcatttcataaattaaagatgaaagatctcaaggactcaagcatagagatggaactgaggaaagtaacatcagctatagaggaagcagctcttgattccagtgaactgctgactaacatggaagatgaggatgatactgatgagacactgacttcactgctcaatgaaattgcctttcttaatcaacaactaaatgatgactctgttggcctggctgaactacccagctctatggatacagagttcccaggggatgctcggcgggcttttattagtaaggttcctcctggaagcagagcaactttccaggttgagcacttgggaactggtttgaaagagttgcctgatgttcaaggggagagtgactctatcagtcccctcctcttgcacttggaagacgatgacttttctgagaatgaaaaacaacttgcagaaccagcctctgagccagatgtccttaagattgttattgactctgaaataaaggattccctcctttccaacaagaaagctattgatggagggaagaatacttctggcctccctgcagagcccgaaagtgtgtcctcaccccccaccctacacatgaagactggcttggagaacagcaacagcacagacactttgtggaggcctatgccaaagttggcccctctaggtttaaaagtagctaatccttccagtgatgcagatggtcagagtctcaaggtgatgccttgtttggcacctatagctgccaaagttgggtcagttggacacaaaatgaacttaacagggaatgaccaggaaggccgggaaagcaaggtgatgcctacattggcacctgttgtggctaaattgggcaactcgggggcctcaccaagttctgcagggaaatgaacttacttgtccttaagcagaagccaggctgtgaggggaaatagatctcacctcctttctctgcaggcatctgtttgtttgtgtcttagaacttggatccttgacttcaatgatgcagtggataatgatgggagaaagggggtagggtgctgaccctggtataagaagtactctgaaattctgatcatgttaaaatgtgttacctcacttgtggtgctgggtcccctcatcctctctaagaagatgtgatccattactgaacatgaggtgcccctcttacccaaggaatttataacatgactctggctccacagtggtttctagttcttcccccacaagcgaaagagctgtttgcaactttggagttgctgtagactgaactgtagcttgtagctgttgaattaagtccaaaatctaaggaatgcgatggacttgtgcaaagggatccagaagagacactttttagttgatgtttcaagaatagggagagagaggatgggtaccatggaataccaaagtgaaggactttgtgtcattcagtaaaattttcttttttcatatcctaagtagctcccattccctcaccttttcaatcagaattaacaaattcaagccttcagtaaagtagggatgcttttaacttttattattaattattttgagatcttaaaaaaatagtagttctcccttattatttttgtgggcattgaaaagctcatttcacagtaccagagatttttactgggagtatatattttggaggtaggcatagagggagccctaccccttccacaaattacgttactcaagagacagctaaaataaaatgcattatctccccagaccagagacagtggccaaaataaaaaatcatggggctggaaatttcccaaatcaaaccagcctcctggtgcttgaaggtttcattcactattacctgcacaggatgtaaagaaaagtcacagtaggcactctttaccagggaaataaggcagtatttgaatcacaagatatattttttatctgcaaccatggatccaatgatctgtagagctttttcactcattaactgtcaggatatgaaggactgacagtctgtaaagatatttatatttttgtatagttgttttcatagatttctcaaaggctgaagttttcaacctagaagatgagatttgtattgagtatagaaatgatgtttcctatctagtttgtaaataatcatggtgcacttgaggggtctcttggaaactcctagggggtcaagaatcactattctgaaactgtatagactgggatttagctgctgcattttgcctttcttaaataattatattttggaatgtaacccctgttctgtcttcattgacaggatttgcttgtgttgttaaaacactaacacaagagcttccagtgcctgggccgtgcctaggtgatgctatttcttctatatctcctgtcttctttatcccaaatcccactcagcatatcttcagacctaggttgtaagaccaactttggattggatctagccagtgaattattatttccatggttggttccctttctgttaactctggtaatcaacagattgaaaacggtggaagaacttctgaaaattgcagtgggagcaaattcttgttggttttgtgctgcttgcctttctagatctgctcatcagcacttaaccttccctcctctaaaggttactaaagaagcctgaagtaggtaaagagtgctcctcagcttcttatccttccactctttacccagcagatttcattcaatgccttagccaaggagtccagcacctgtctcccctgctaataattgtccttagagatgctagtactttaatccaggtatagcagtttcccgttattttcttgcttgtcgttcccctacatttcctcctgatttcccaagactctctttgtggcttttgagggtcagccaaggagcaggcaagtgagtgaacaatcctcaggaaaagaaggaccattttagcttaacacttccttttttttttttttttttttaagaagaatataggtaaacaggtaatgattcttgattggagataccatttgactcttgatgagagttgtacgaagatggaaatgagggatgattccaggcgttttagggggaaggctgcagataccattctaacccccaagatactgtgttctcaagacctcttagaactaggtgttgtcagggataatttgaggagggcttagtcttcagaacaatcctgcagtcttgacagaaatctaaaatctccaaaaactcctaccctttaaccttaccctagggggaactgatctatgaatattacatgtgtgattatgaaaggtgaagttgagtgagaggagttgaggaacgtggaagacagtgagctctcaccctaacactataagaagcatgatctcaatagaccaataattcacctttttatacatctgtaaataaatggaatgtttttaagaatataattatgtcagatttagcattttcttttatatattaaatatatatatctttccttttctgctttcgaaaagtgactatttttttagaaatctaagaacagaagtttggtgattgaaaggtagaatatataaacctgaaataaagcagttaaaacaattaaagcagaaaaaaaaaaaa

SEQ ID NO: 1382 - DNA, 2233 bp, HOMO SAPIENS; identical to SEQ ID NO: 305

SEQ ID NO: 1383 - DNA, 1098 bp, HOMO SAPIENS
gccactcctgctgggcagcccacagggtccctgggcggagggcaggagcatccagttggagttgacaacaggaggcagaggcatcatggagggtccccggggatggctggtgctctgtgtgctggccatatcgctggcctctatggtgaccgaggacttgtgccgagcaccagacgggaagaaaggggaggcaggaagacctggcagacgggggcggccaggcctcaagggggagcaaggggagccgggggcccctggcatccggacaggcatccaaggccttaaaggagaccagggggaacctgggccctctggaaaccccggcaaggtgggctacccagggcccagcggccccctcggagcccgtggcatcccgggaattaaaggcaccaagggcagcccaggaaacatcaaggaccagccgaggccagccttctccgccattcggcggaaccccccaatggggggcaacgtggtcatcttcgacacggtcatcaccaaccaggaagaaccgtaccagaaccactccggccgattcgtctgcactgtacccggctactactacttcaccttccaggtgctgtcccagtgggaaatctgcctgtccatcgtctcctcctcaaggggccaggtccgacgctccctgggcttctgtgacaccaccaacaaggggctcttccaggtggtgtcagggggcatggtgcttcagctgcagcagggtgaccaggtctgggttgaaaaagaccccaaaaagggtcacatttaccagggctctgaggccgacagcgtcttcagcggcttcctcatcttcccatctgcctgagccagggaaggaccccctcccccacccacctctctggcttccatgctccgcctgtaaaatgggggcgctattgcttcagctgctgaagggagggggctggctctgagagccccaggactggctgccccgtgacacatgctctaagaagctcgtttcttagacctcttcctggaataaacatctgtgtctgtgtctgctgaacatgagcttcagttgctactcggagcattgagagggaggcctaagaataataacaatccagtgcttaagagtca

SEQ ID NO: 1384 - DNA, 4959 bp, HOMO SAPIENS
cccccacacaccccagccgaggcccggaaggggccaggcgcgcttccgtctccgccggggatgcacggagggcggagctgcggcccgaggacgcgacgcgagcccagttccggcgaggaggccgcgccagtgacagcgatggcggcggagtcggcgctccaagttgtggagaagctgcaggcgcgcctggccgcgaacccggaccctaagaagctattgaaatatttgaagaaactctccaccctgcctattacagtagacattcttgcggagactggggttgggaaaacagtaaatagcttgcgaaaacacgagcatgttggaagctttgccagggacctagtggcccagtggaagaagctggttcctgtggaacgaaatgctgagcctgatgaacaggactttgagaagagcaattcccgaaagcgccctcgggatgccctgcagaaggaggaggagatggagggggactaccaagaaacctggaaagccacggggagccgatcctatagccctgaccacaggcagaagaaacataggaaactctcggagctcgagagacctcacaaagtgtctcacggtcatgagaggagagatgagagaaagaggtgtcacagaatgtcaccaacttactcttcagaccctgagtcttctgattatggccatgttcaatcccctccatcttgtaccagtcctcatcagatgtacgtcgaccactacagatccctggaggaggaccaggagcccattgtttcacaccagaagcctgggaaaggccacagcaatgcctttcaggacagactcggggccagccaagaacgacacctgggtgaaccccatgggaaaggggttgtgagtcaaaacaaggagcacaaatcttcccacaaggacaaacgccccgtggatgccaagagtgatgagaaggcctctgtggtgagcagagagaaatcacacaaggccctctccaaagaggagaaccgaaggccaccctcaggggacaatgcaagggagaaaccgccctctagtggcgtaaagaaagagaaggacagagagggcagcagcctgaagaagaagtgtttgcctccctcagaggccgcttcagacaaccacctgaaaaagccaaagcacagagacccagagaaagccaaattggacaaaagcaagcaaggtctggacagctttgacacaggaaaaggagcaggagacctgttgcccaaggtaaaagagaagggttctaacaacctaaagactccagaagggaaagtcaaaactaatttggatagaaagtcactgggctccctccctaaagttgaggagacagatatggaggatgaattcgagcagccaaccatgtcttttgaatcctacctcagctatgaccagccccggaagaaaaagaaaaagattgtgaaaacttcagccacggcacttggagataaaggacttaaaaaaaatgactctaaaagcactggtaaaaacttggactcagttcagaaattacccaaggtgaacaaaaccaagtcagagaagccggctggagctgatttagccaagctgagaaaggtgcctgatgtgttgccagtgttgccagacctcccgttacccgcgatacaggccaattaccgtccactgccttccctcgagctgatatcctccttccagccaaagcgaaaagcgttctcttcaccccaggaagaagaagaagctggatttactgggcgcagaatgaattccaagatgcaggtgtattctggttccaagtgtgcctatctccctaaaatgatgaccttgcaccagcaatgcatccgagtacttaaaaacaacatcgattcaatctttgaagtgggaggagtcccatactctgttcttgaacccgttttggagaggtgtacacctgatcagctgtatcgcatagaggaatacaatcatgtattaattgaagaaacagatcaattatggaaagttcattgtcaccgagactttaaggaagaaagacccgaagagtatgagtcgtggcgagagatgtacctgcggcttcaggacgcccgagagcagcggctacgagtactaacaaagaatatccagttcgcacatgccaataagcccaaaggccgacaagcaaagatggcctttgtcaactctgtggccaagccacctcgtgacgtccggaggaggcaggaaaagtttggaacgggaggagcagctgtccctgagaaaatcaagatcaagccagccccgtaccccatgggaagcagccatgcttccgccagtagcatcagctttaaccccagccctgaggagccggcctatgatggcccaagcaccagcagtgcccacttggcaccagtggtcagcagcactgtttcctatgatcctaggaaacccactgtgaagaaaattgccccaatgatggccaagacaattaaagctttcaagaacagattctcccgacgataaactgaggacttgccttggaaatggaatctggggaggcaggaatacaaggacagtgggggttggggaatggaattctacaggagactggagtcttgctttgtggatccttttggtctccgagtcctgcagtctgcaggtgctgcccctgggaacctgcgtgccacagccccgcctccctgcctggagcacactttagaattctgaagatgtgaagcctctgtctcactgaggattttaaaggtcaattatacttttgttgttcattagcatctttgtaaactataagacgtagttttaattaataaatattgcccccagattgtatttatattatcccccaggtttgtttttgttttttgtcctctaccacacatttagccttttatcttccaggtccttattaaaatcagatgaaagcctagtgaaagccagtctcctgccccagctcagctctgtgtggactctggtccagacagaggactgggcatctccagagcctgcacagtacctgctgcacgtagggcaaggaatgagcactagaccgcctgtccccaagggagcctcagtggggcgacagggtgctcggcggactccacctcaggccctccccactgttgctgtgcattcctgtgcaggtgcatctctttcttactaactggtatttattaagggaggtgctctgtaggtctggagcctttccctcatcctttttgcgagtccccacctttttgtttttttttttttctttgaggctcactagaggacgcagaaccttgggagattgatttgcacagaactccccacctcccacttttacaatttccagtttctgattgaaaattttagggtttctccccactgcccttccctatctttccttcccctcaacaccatgaaggaaaaacacacacggcagggctttttgtagccctgaaggcaactttagacatttaaaatccagcactttaatctcttgttctctgtgaatcactatgagaagtgaatggttttaaaggctgtaatgctatgttggaaattggtttgttttgccttttattgaaaaggtaagatcatgtgattggaagaacacaactgttggcttgggaagaggactttgctgctgaagtgttttctaccttctgagtgtgtttaaggcaggatttggagggaaggaccagcttagggagagtgtctgagccacagcgtcaggatgggggaaaccacatgggatccatcaagttccagttgaacaggagcaagatcagaacttaggagggcagtgtcagctcccttgttggctgtcaaggaacaccgatctagtagaaacccacttggttgtgacccaggtagaggtagatgccatacatttgagatatgcgtccttaaggaacctgacaagcagactgaagggatggtaagtgtgacagcctgataagttttctcaaagcccaggatacagagccagtgttttctgtaactggagacctcagttaggccaacttcgaattccagagcaacgtaggaagtctattcagcagaaactcgacattgttcagtgtgtattgctgtgcagggtgcctattgtgacaggacacaaatgttactatgttttaatttgctatatttttgaatgggtaaagcattactttacttctcttggttacttgtaccaccattccacccctatccctagcctgccccacaaatctaatattaggaagcctcttaactgaaaccaaatgaacatttgggtcaggtgccagatgtctgctgcctagaatagctttttctaggtgtctaccaccttgaatttatctcttaactgtgtgttcaagtctttgtcattgaaactagtttttcatatcttagattcagttgtgtatgatttaatgtcccttattaggagtctttaggcagggagggaagaaaaaacagatttgttcatagcaatgtcagtatccattttggcacataaagatttttgatgagccctgtttgcatagagccagatgttttcccctcccccaagagtatctacatcagggatgtgacttggtgcgaagagtcaggggaaagaggaaaaacccaatttctaaatgacctccttgcccagcttactaaaatggctgcagagcagacacaggatgaatttgaacctgacacaggatgaatttgaacctttggtctcatttatggaaaaacttgtgcaattttttttctgtgctacactacatacaaatcaccaaattacaaattacccttttgtgatccttggtgtactgagcagtttctttggggctttttctttctgggaagcgggagggaaaggagcaaggtgtcatcctgctcttcatttgtattttggtcccaaaatgtaaatacaattttctatgttacttttttgtggtaactaccgagatgaatattttaattagataagttatatgaaaaggaaaattccatgtctaaataaaaaacaaactccaaaaaaaaaaaaaaaaa

SEQ ID NO: 1385 - DNA, 360 bp, HOMO SAPIENS
gttagcaagtgccagcttgtaggctggttgaagtacagaactcagaggaaaaaagaaattaaattttagctttctggagagcagcccctctctggcaccatcaaacacttctttgtttcccttcaacttggaactcttcaaacatcaggggttgtgagggtttggccattcttttatcttgggtccatgtgagtgacagaaatggtgcggcctgggaaagatctccctcctttacattttctcttctccctcctcctccttattctaaaactgtgcctccaacagaggggcaggggctcttgtagagagatccctggcccaggacaggagatgccaaatctaatttatctcactgagggc

SEQ ID NO: 1386 - DNA, 5823 bp, HOMO SAPIENS
aagtcacgtgctgtgacagtagctggggtgaggccgtcgtcgccgcacgggctggttggggctgtgtctgtgggaggcgccggggtgatggcggtggagactctgtccccggactgggagtttgaccgcgttgacgacggctcgcagaaaattcatgccgaagtccaacttaagaattatgggaaatttcttgaggagtatacctctcaactgagaagaattgaggacgctctggatgactcaattggagatgtttgggatttcaatcttgatcctatagcattaaagcttttgccttatgaacagtcctctcttttggaactcataaagactgaaaacaaggtcttaaacaaagtcatcactgtttatgctgcactttgttgtgaaatcaagaaattaaaatatgaggctgaaactaaattttacaatggtctcttgttttatggagaaggagctacagatgccagcatggtggaaggtgattgccaaattcaaatggggagatttatttcattcttacaggaactgtcttgctttgttacgaggtgctatgaagtggtgatgaacgtagtccaccagttggctgccctctatatcagtaacaagattgcacccaaaattatagagacaactggagttcattttcagactatgtatgagcacttgggagaactgctaacagttttgctcaccctggatgaaattattgataatcatatcacactgaaagaccactggactatgtacaaaaggttactgaaatctgtccatcacaatccttcaaaatttggaattcaggaagaaaaattaaagccatttgaaaagttcttgctgaagctagaagggcaattactggatggaatgatattccaggcctgtatagaacaacaatttgattctctcaatggaggagtatctgtgtcaaaaaatagtacttttgctgaggaatttgcacatagtattcggtcaatttttgcaaatgtagaagccaaacttggagaaccttctgaaattgaccagagagacaagtatgttggaatttgtggactctttgtattgcactttcagatttttcgaactattgataaaaagttttataagtctttattggacatttgtaagaaggtaccagccatcactctaactgctaatattatttggtttcctgataattttctgatccagaaaataccagcagctgccaaactgctagacagaaaaagtcttcaagccattaaaatacacagggatacttttctacaacagaaagctcaatcacttaccaaagatgtacagtcttactacgtctttgtgagctcatggatgatgaaaatggaatctattttgtctaaagagcagagaatggataaatttgctgaagatctcaccaatagatgtaatgtttttatacagggcttcttgtatgcatatagtattagtaccattattaaaaccacaatgaatctctacatgtccatgcaaaagccaatgaccaaaacctcagttaaggcattgtgcaggcttgttgaacttctcaaggcaatagagcatatgttctacaggagaagcatggttgtggctgattcagtttcacatataacacagcaccttcaacatcaggctcttcattctatttctgtggccaagaaaagagtgatttctgacaaaaaatacagcgaacagcgtcttgatgtgctctctgctctagttttggctgaaaacactctaaatggaccaagcacaaagcaacggcgacttattgtttctttggcactaagtgttggcacacaaatgaaaacatttaaagatgaagaactctttccacttcaagtagtcatgaaaaaactggatcttattagtgaacttagagaacgagtccaaacacaatgtgactgttgttttttatactggcatcgagctgtcttcccaatttatttagatgatgtatatgaaaatgctgttgatgcagccagattacattacatgttcagtgctttgcgcgactgtgtacctgctatgatgcatgcaaggcatttagagtcctatgagatacttctggattgctatgacaaggaaattatggaaattttaaatgagcatttgctggacaaattatgcaaagaaatagagaaagatctgcgactttctgtgcatactcatttaaagctggatgaccgaaaccctttcaaagttggcatgaaagacctggctctttttttctctctgaatccaattcggtttttcaatcgtttcattgacattcgggcttacgtaactcactacctagacaagactttctacaatctaacaactgtagcccttcatgactgggccacttatagtgagatgagaaacttagctactcagcgttatggactggttatgacagaggcacatcttcccagtcagactttggaacagggccttgatgttttagaaattatgagaaacattcatatatttgtgtcccgatacctctataatctcaacaatcagatttttattgaacgaacaagcaataacaagcatttgaatactattaatattcggcatattgctaattcaattcgaacacatggcacgggaattatgaatacaactgttaatttcacctaccagtttttgaaaaagaagttctatatatttagccaatttatgtatgatgaacacatcaaatccagattgattaaagatattcgatttttcagggaaattaaggaccaaaatgatcataagtatccttttgatagagcagaaaaattcaatcgaggcatcagaaaacttggagtaacacctgagggacagagctaccttgatcaattcaggcaactcatcagccagattggtaatgctatgggctatgtacgaatgataagatctggtggtcttcattgtagcagcaatgccattagatttgttcctgatcttgaagatattgtaaattttgaagaactagtaaaagaagaaggtcttgcagaagaaacattaaaagcagcaaggcatttggattcagtcctcagtgatcacacacgaaattctgccgaaggcacagaatatttcaaaatgcttgtagacgtttttgctccagaatttcgaaggccaaagaatatacatctccgaaatttctatataattgttccccctctgaccctcaactttgtagagcattccattagttgcaaggaaaaattaaataaaaaaaataaaattggagctgcctttactgatgatggctttgccatgggtgtggcttacattctaaagcttttggatcagtatcgggagtttgattcacttcactggttccagtctgttagagagaaatacctgaaggagataagagcagttgctaagcaacagaatgtacagtcagccagtcaagatgaaaaactcttacaaaccatgaatctcactcagaagcgactggatgtctatctacaggaatttgaattgctgtatttctcactgagcagtgcaagaattttcttcagagcagacaagactgcggctgaagaaaaccaagaaaagaaagagaaggaagaagaaactaaaacaagcaatggagacctgtctgacagcactgtgtctgctgatcctgttgtgaaatgatacggatggtattcactgcacatatgatgaaatcatcagaattgttaaaacttttgccagtggaatggataaactattgatgaattgtttcctgggtcacatctctggaaaatagatgttacagttcttaaaggcagtgctttaaagtgaagttcattctgtttccaaaggctctactttcaaaggttaagaatgagattttaaaattggatttttgcctggacttgagggtacaagatgtttctatttgaagtgaagttataaaagggcaaatccagattcataaactatcacctcggatttcttgtaatctacatgtttgtaatttgtatttgcatagatctttgatctatagttatttcaagtcatgggaaattcaatgcatatactatatacagccagtaaatacatgcttaacaaaaggaatgagcctgaagttcataaagaatacatatcaatattcttataaaaggaatatatgaagatggctttgatactagaggtgaggcacaagtgttttatgtactctcagtgtacagtataactgatgatccttctttcattgttaatttcatgtgactcacaagagctgctgatgtctttgatgagacattttataactagtttacattgctttgagaacatttaacctccaacagctgctttaaatttaagatttacttaatactcagaaaattcagataaagccatagagtcctgtttgaagcttcacttctattttggttgaaggcatgatgtatgatgtcagaaaaaaaattgaatgaattatttctacatccaaactcaggtttcttctacattagattgaattgaaattttggtgatggtttgggtagactttttttttatatcaagtataatttaaaacatcagattaaataattacactgttcaggcttttaaaaaaataccactgtgagaataaagcgctagcaagatacatcacttactgattttaaaaatacagaaagattttgagtaaattttgtgcccagcaagctgttagttttatttttgtaaaggtatgtaagttattaaatggttaatcatggccttttaaaaataaaataaagtgatacctttacaatgaagacaaaagtttaaaactttctaatacaaacaccattttgggaaatgcttgatttttttctattgcatttgtctgctaaacatttctttggataaatcctgcaaatacttctaacattattctttgattccagcttttagaatgggtgtacaatgccctgtttgtacttactggttagggtcagggtaacttgccagcccaagataaatactttaattgttaaaagtcagaagagacagaatatgtaggaaatgttttttgtttattatgtaaacatggcttacagaattatgaacagtggatagattaaaggcatttaatatttgtaattcataataactgtagaaatggccctaaagcatgctgcataattaataatttatattttcattattataagtgtttatattaatgatcttgcatttgattatatcaaattcgtcatttcatagcaacagtattgttttctctgtttttcttctctaacttctctgaaatcatctcctattaagggatagaaattgttactagaagagaatcacatgttctgtgttcattatccctacacatgtaaattaattattttatcaatactagatagagttcacatgctgactccctggatacctacagttgagaagaaaatgacagacaattatttttcctttaggtcaaaataatgtcactgctatctggataaattataagttcatatatttgaaataagatcctggaaacgaatttaaatggtgtcaaactgcagagcaacagggcttcagtatattcacatctaataggttaatatgtacatttggatgatgatttttcttgataacattaacattaattttattttttcagacatactgtaatttaaaaattaatgtgagcgtttgttttaagttcacagaaaacttaataattcaaattctcaggaattaaggactcaccataacattgtcagttctaatgaaattttgtaaaagatggcaagtttgttacctcacttgagtggggttttccttttcccccaattctaagagaatataatgtgtatactaaaacattaataaacataattttgaaaaaaaaaaaaaaaaaaa

SEQ ID NO: 1387 - DNA, 527 bp, HOMO SAPIENS
acgcttgatccccggccgcggggccaggaagtcggagtttgagccccggaggcagagcggctgccatggccaagtacctggcccagatcattgtgatgggcgtgcaggtggtgggcagggcctttgcacgggccttgcggcaggagtttgcagccagccgggccgcagctgatgcccgaggacgcgctggacaccggtctgcagccgcttccaacctctccggcctcagcctccaggaggcacagcagattctcaacgtgtccaagctgagccctgaggaggtccagaagaactatgaacacttatttaaggtgaatgataaatccgtgggtggctccttctacctgcagtcaaaggtggtccgcgcaaaggagcgcctggatgaggaactcaaaatccaggcccaggaggacagagaaaaagggcagatgccccatacgtgactgctcggctccccccgcccaccccgccgcctctaatttatagcttggtaataaatttcttttctgcaaaaaaaaaaaaaaaaa

SEQ ID NO: 1388 - DNA, 1989 bp, HOMO SAPIENS
cagcggcgctgcggcggctcgcgggagacgctgcgcgcggggctagcgggcggcggagcggacggcgacggggcgctctcgggctgccggcggggccgagcgccgcgcgtcccgagcatggcaggctccctgcctccctgcgtggtggactgtggcaccgggtataccaagcttggctacgcaggcaacactgagccccagttcattattccttcatgtattgccatcagagagtcagcaaaggtagttgaccaagctcaaaggagagtgttgaggggagttgatgaccttgactttttcataggagatgaagccatcgataaacctacatatgctacaaagtggccgatacgacatggaatcattgaagactgggatcttatggaaaggttcatggagcaagtggtttttaaatatcttcgagctgaacctgaggaccattattttttaatgacagaacctccactcaatacaccagaaaacagagagtatcttgcagaaattatgtttgaatcatttaacgtaccaggactctacattgcagttcaggcagtgctggccttggcggcatcttggacatctcgacaagtgggtgaacgtacgttaacggggatagtcattgacagcggagatggagtcacccatgttatcccagtggcagaaggttatgtaattggaagctgcatcaaacacatcccgattgcaggtagagatattacgtatttcattcaacagctgctaagggagagggaggtgggaatccctcctgagcagtcactggagaccgcaaaagccattaaggagaaatactgttacatttgccccgatatagtcaaggaatttgccaagtatgatgtggatccccggaagtggatcaaacagtacacgggtatcaatgcgatcaaccagaagaagtttgttatagacgttggttacgaaagattcctgggacctgaaatattctttcacccggagtttgccaacccagactttatggagtccatctcagatgttgttgatgaagtaatacagaactgccccatcgatgtgcggcgcccgctgtataagcccgagttctttcaggtctgccacaccaagaaggactatgaagagtacgggcccagcatctgccgccacaaccccgtctttggagtcatgtcctagtgtctgcctgaacgcgtcgttcgatggtgtcacgttggggaacaagtgtccttcagaacccagagaaggccgccgttctgtaaatagcgacgtcggtgttgctgcccagcagcgtgcttgcattgccggtgcatgaggcgcggcgcgggcccttcagtaaaagccatttatccgtgtgccgaccgctgtctgccagcctcctccttctcccgccctcctcaccctcgctctccctcctcctcctcctccgagctgctagctgacaaatacaattctgaaggaatccaaatgtgactttgaaaattgttagagaaaacaacattagaaaatggcgcaaaatcgttaggtcccaggagagaatgtgggggcgcaaacccttttcctcccagcctatttttgtaaataaaatgtttaaacttgaaatacaaatcgatgtttatatttcctatcattttgtattttatggtatttggtacaactggctgatactaagcacgaatagatattgatgttatggagtgctgtaatccaaagtttttaattgtgaggcatgttctgatatgtttataggcaaacaaataaaacagcaaacttttttgccacatgtttgctagaaaatgattatactttattggagtgacatgaagtttgaacactaaacagtaatgtatgagaattactacagatacatgtatcttttagttttttttgtttgaactttctggagctgttttatagaagatgatggtttgttgtcggtgagtgttggatgaaatacttccttgcaccattgtaataaaagctgttagaatatttgtaaatatc

SEQ ID NO: 1389 - DNA, 6032 bp, HOMO SAPIENS
gtgcaggctgcggatccccgtaggcgagcgagcggctaggttcgtgatctggagagacgctcagattattaagttcctgcaacttaactgggaactgatcaagatttcaagctaaagatggtggtgatgaacagcctgagggtcattcttcaagcctctccaggcaaattgctgtggagaaagttccagattccgagattcatgccagcgaggccctgcagcctctatacttgtacttacaaaacccggaaccgagccttgcatccactctgggagagcgtggacctggttcctgggggcgatcgccagtcacccatcaacattcggtggagggacagtgtttatgatcccggcttaaaaccactgaccatctcttatgacccagccacctgcctccacgtctggaataatgggtactctttcctcgtggaatttgaagattctacagataaatcagtgatcaagggaggacccctggaacacaactaccgattgaagcagttccattttcactggggggccatcgatgcctggggttctgagcacaccgtggacagcaaatgcttcccagcagagctgcacttagtgcattggaacgcagtcagatttgaaaactttgaggatgcagcactggaagaaaatggtttggctgtgataggagtatttttaaagctaggcaaacatcataaggagctacagaaattagtggatactttgccgtcaattaagcataaggacgcccttgtggaatttgggtcatttgacccttcctgcctgatgcctacctgcccagattactggacctactcagggtctctgactaccccacccctctccgagtctgtcacctggatcattaagaagcaaccagtagaggttgatcatgatcagcttgagcaatttcggaccctgcttttcacttccgaaggggagaaagagaaaagaatggtggacaacttccgcccccttcagccactgatgaatcgcactgttcgttcatccttccggcatgattatgtgctgaatgtacaagcgaaacccaagccggccaccagccaagcaaccccctaaaacattcatatctaggcagtattttgcttttgctttaatatatactagcttactataaattgttaactagactattctaagtgcctgcatttgataatatttacagatgtgcatttcttagcatgagagtgcttcatcagtctttgaggaaggctattcggtaccagcaagagacacaagtttctcttacagatacctgttggtaattgtaatgccttttttttttctttaagagactaggtcttgctctgctgcccaggctagagtgcagtggccaaatgatagctcactgcagccttgaactcctaggctcaagcagtcctcctgccttagcctctagagtagctggggctacaggtgctggccgcctggcccagcttgtaatatctttttatgtctgacatttttgagctatctttttatgtttatccattagtggttctatagcactatacatagggattataatcaaaatttttaacatgtggtaaggcacagacactgaccagaactcaggccttgcagaaacagcctatgggcccagactggtacttcctggctgaatattggccatggttttagatgtattttattttataacatgaatgtgtattctttcataagggcttatcagtcagtatatttgccccagtgtttagttgttacaaggacatgatatgcttacttactatcagtttatgatgtagaaaatatattttgtaattataagaaaacaagacttttcctatacccagaaatccctttgcatttccgaagatcagatattttgcttaaaggtctgatcatataggaaatatatgcagaacattttaaagaaaatgcctggctgggcacagtggctcacacctgtaatcccagcactttgggaggctgaggcgggtagctcacttgaggtcaggagtttgagaccagcctggccaacatgatgaaaccctgtcactactacaaataaaaaattagccaggcatggtggtgagcacctgtaatgccagctactcgggaagctgaggctggagaatcgcttgaacccaggaggtggtggttgtagtgaaccaagatcacaccactgcactccagcctgggcaacagagtgagactctgtgtctaataaaaaaaaaaaaagaaaagaaaagaaaaaatgcttaaagtgcctagaacttagaattctttcattgcacatttccagaaatatttttcttttcttttttttttttttttttgagatggagtctcgctctgtcccccaggctggagtgcagtggcactatcttggctcactgcaacctccacctcccgggtttaagcgattctcctgcctcagcctcctgagtaactgggactacaggcacatgccaccacgcccagctaatttttgtatttttagtagagatggggtttcactatgttggccaggctggtcttgaactcctgacctcaggtgatccacccgccttggcctcccaaagtgctgggattacaggcgtgagccaccgtgcccggccttccagaaatatttttcaaaggactagtaatctaatagcctatagtttatattattattttgtattatttgcacgctgttacatagtatataatgataatgttttctacagtgaaagagctatcccgtcttccctttacaactgtctgaactttatttactcattagtcaaggttctttgcaaggcaggtgattaacttaaatatctcagtttatacagtggtttaaaagacttttgttatggtaatagggagagaaacttgtcagataggctaaaatctagataattctacatattctgaggaattcatgctcctgtggctcttgcttataaatatcttggaatgtttctgaatgcctctaagcctatgttcagactctgttgcgtcaatgactggtagtatttctttcattaatatgtttgtcatctggtctgcaagatagggttggatgaatatacttaacactactgaactgtacacttaaagatcgttaggaaggaaacgggactacatcaaacttaaaaatgtctgtgtgtcaaaggaagcaatcaacaaagtgaaaacgcaagctctagaatgagagaaaataattgcaaatcgtctatcttataaggagcccaaatccagaatatatgaggaacttctacaactcaacaacaaaaaaccaaataactcaatttttaaaaatgggcaaaggacttgcacagacatttctccaaagaagttatacaattggccaataagaacatgaaaatatgctcaacattgccaattattagggaaatgcaaatcaaaaccacaatgagatatcgtctcacgcccatcatgatggccactatcagaagaacaaaaaaataacaagtattggggaggatgcagagaagttgaaacccttgtgcactgttggtggtaatgtaaaacggtgcagtcattacggaaaacagtacacaggtttcccaaataactgaaaacagaattaccataagaattaccaccaaagcgggatctcaaagagatatttgtacacccatgttcatagcagcattattcacaatagccaagaggttctggaagcatcccaaatgtccatcaacagatgaatagataaaggaaatgtggtatatacagtcaatggaatattattcagcctttaaaaagaaggaaatcctgtcaaatgtacaatgtggatgaaccttgaaggcattatgccaagtgaaataagccagccaacaaaagaacaaatgctatatgattcctccatgtgaagtatgcaaagtagtcaaaatcatacaatagaaagtagaaaggtggttgccaagcaacggttgggggaaggggagagggtgaatttgtatttagtgggtacagagcttgtgttgcaagaattctagagatctgttgcaaaacaagtgtgattgtacttaacactactgaactgtatacgtataagtttgagaaatatctcttttaaaaagggggaaatgtgaaggcttttgcatgtatgccctaggaaatgcatagaattcttagaaaggtaaacatggtaaaaaaagaagtctttgttaactttctgcagttcacctgtttcaaagtatagttacctttaaaagggtaaacacacaagatatgcattttccaaagcatacaggctttcctcctagctgtcttgttttttatttttttttattttttttatttttttgagacagagtcgcgctgtcacccgggctggagtgcagtggcgcgatctcggctcactgcaagctccgcctcccgggttcacgccattctcctgcctcagcctcctgagtagctgggactacaggcgcccgccaccacacccggctattttttgtattttaagtagagacagggtttcaccgtgttaaccaggatggtctcgatctgacctcgtgatccacccgtcttggcctcccaaagtgctgggattacaggtgtgagccactgtgcctggccttcctagctgtcttgtgaaacgataagtcaaaaccctactgcagtgagttttccaaactgaagggagaagcaatgtacagaatgcctgacttgcccttacatcttatacctggtgttctggcatgattattaaccacactctttttcactttgaaccatgtcctggtttgcatggccagcttccctgcagaggtgatagaaactgacttgaggcagtttctttctccatgccttagttagatgaccctcaaaggggcacagcagatttccctggctactgatacaccttaacaagaagcttgtgttttttatgccctcaaaagtgttttacttatactttcctagacataaaggtggaaaatgggcctaaggtctgtcaaaggtcttggaaaagaagattgtattaaaattgctgtccgtcttcattaaataatactagatcgatacaatgctttctttacagtattagtggttggtgaaagacttccttcctattgttacagtatatgtatatatctgtaaaattaatgagatatcctttaacttgtagattagaaagcgactaaaaactcataggggatttactaaagaagcaacaatgggaagaagcagccgatcctcctcagtgcacctttttctgttgcacagtacagtgcacagtgtgctggcatcaccatatagggcaagctgtgaccgcctttctcctttcccagggctacatggtgccaagcaggttcagtgtacactggttaccaacctgtctgattccattgtgacagaacacactcacacccaatacattacatgaagcagatttattacttacagacaggaagcaagggacaaaagaggccctggctccattgtgagccagtcccccagggctcaagaaagctgcccagggcggggctgatggagtcttgattgtacgtgccccacttgcaccacagcctgccttgggttatataccataggagccacataactcattgggcaaagctttaaagtacatcctccttccaggggaaagaggaacacaacctcgctgtctcaaacagttccctaaatcaagatgttacattccctaggagggacaacaacaaggccaacctgtttcaggcagttcctccatatcaggatattgcattcccagtgcattctacagttattcttaagaactacaagcaaggaagaagggagaactgggtcagtccaaggccacctggagaactgtcttgtacatgggttagggtaaagttggctattctaaaactaagcatccgcccaaaagaagtcttggaagatgtctttccctgttaaattcagatgatggtaattatagtttggaagtggaattggcttttagagttacttcctgtaatgaaattaacaagcaattcaggcctatttctgaaaatgaattcagtggttaattgttaaaaataaatgtctaactccta

SEQ ID NO: 1390 - DNA, 2472 bp, HOMO SAPIENS
gaagagaccatatttgttcgcagaggaagccgttgctttctgggatctggctacgccagaaaagacatcggctccaacaggggtgttccacagggtagctgggagttggaagagccaagaacgcctccgagctctggatttgagcttctctgcccatgggtgaagcgcccatgctcagcttgtgagcttcttcccgggagagcagccatggcactgaggaatgtgccctttcgctcagaggtcctgggctgggaccccgacagccttgctgactatttcaagaagctcaactataaggactgtgagaaggcagtgaagaagtaccacatcgatggggctcgcttcttgaacctgacagaaaatgacatccagaagttccccaagctccgggtgccgattctcagtaagttaagtcaggaaatcaacaagaacgaagagaggaggagcatcttcacacgcaaaccccaagtcccgcggtttcctgaagagacagaaagccacgaagaggacaatgggggctggtcgtcctttgaagaagacgattatgaaagtcccaatgatgaccaggatggggaggatgatggagactatgagtcccccaatgaggaggaagaggcacccgtggaagatgacgcggattatgagccgccaccctccaatgacgaggaagctctgcagaactccatcctgcctgccaagcctttccccaactccaactccatgtacatcgaccggcccccctctgggaaaaccccccagcagcctcctgtgcccccccagagaccgatggccgccctcccgcccccaccagccggccggaatcactcgccactgcccccaccccagaccaaccacgaagaacccagcagaagcagaaaccacaaaacggcaaagctccctgctccttcaatagacagaagcacgaaacctcccctagatcgttcattagctccgtttgatagagaacccttcacactaggaaagaaaccaccattttctgacaagccctcgattccagcgggaaggtcactcggggagcatttacccaagattcaaaagcctcctttaccaccgaccacggaaagacatgaaaggagcagccccctgccagggaagaagccacctgtgccaaagcatggatggggaccagacagaagagagaatgatgaagatgatgtgcatcagagacctttgccccagccagcactacttcctatgagctccaacactttcccttcaagatctactaagccaagtcccatgaaccctctcccatcctctcacatgcctggagcattctcagaaagtaacagcagttttccacagagtgcctccctgccaccatacttctctcaaggccctagcaacagaccacctatcagagccgaaggcagaaacttccccttgccacttccaaacaaacctcggcccccatcccccgcggaggaagagaattcattaaatgaagagtggtacgtttcttatattacccgaccagaggcagaagctgctcttagaaagataaaccaggatggcacatttctggtcagagacagctctaaaaaaacaacaaccaatccatatgtcctcatggtgttgtacaaagataaagtttacaacatccagatccgttatcagaaggaaagtcaagtttacttgttgggaactggactccgagggaaagaggactttctgtctgtgtcagatattattgactacttcaggaaaatgccacttctgctcattgatgggaaaaaccgaggttccagataccagtgcacattaacgcatgctgcagggtacccatagcaagttatagccgagcaaatgaaccgtcctcctgcctctgttgccaacacgagatcaatcagccttggtcaatggacaaacacttaggactgaactgaacccctccccatgaacacaagggttttatcctttcctttaaaaacagtgtttgaaatgaagactgtcaactatcccataatttatttattcttcttcaatgtttgtaaagtgcatgagtcatgttcacacttgaagtctagtagtgcactgtaataattcattttttaaaagattatttaatgcccatttcaaaatacagtagtttacacagctacagaaacaatttggggcaagttttaaaacactgaaacagtaatagttattggtgtcacataaaactgatttgttttttacagccaaacctctgtcagtcagaggcattcattagttttatacatgtaatttgaaaatcactaaacctcgttttctcagcagcaataatttaagaggcttcaaaaatataatttcactcttatttagtattttttcctgggggcatttttacgtaatttttttatgaaaagacaaatgcatgttgagataacttctgggattaaaatagtcttttgctttaaaaaaaaaaaaaaaaaaaaaaaaaaaaaaaaaaaaaaaaaaaaaaaaaaa

SEQ ID NO: 1391 - DNA, 2300 bp, HOMO SAPIENS; identical to SEQ ID NO: 1273

SEQ ID NO: 1392 - DNA, 457 bp, HOMO SAPIENS
cctggcgtggtgcagaactctgagctgggcacagaaggcctccacctggttctcactctacagagcccactgcctgatgctgtccctcaggcaggagcctccttcaacacaacggcccctcccagaaggctctgtggtagtaactgctgtggccagcaagcactagacacattgaatgcctctgcaaaacaaaagaaaactctgttcttgggaatcggcctctggcacattccttcttaaaaactcccaagattgagacctgccacaatcgttttggccatggttttctccaaccaccagtgaaatatgggtttggttcattttagtttcagatagatggcttcaccaaagaactcttgaaagaatactgattagggaggggcagggaagtaggagcttatggtatattataaggctgggaaaaatctatgatgcaaaccctttccacatagtacta

SEQ ID NO: 1393 - DNA, 5771 bp, HOMO SAPIENS
gttttggcaagggattaaagtgctcccccctgtggcagcagtgacccagaaatgagtttgattcacatagtccttcctccataacaagccaaacgccagaccgagagtgcctccgtgcgcgagtgcccggtgtgtgcgcgccggcgagagcaggggcccgcccggctccccgcccgccgcggcccgaactcatgcagctccgagcgagcgagcggcgcccagcccagcgcctcggccgaacccctccgcagcaggctgcctgctgtttcccggggagatcatgaaacgaggtcgccttcccagcagcagtgaggattctgacgacaatggcagcctgtcaactacttggtcccagaattcccgatcccagcataggagaagctcctgctccagacatgaagatcgaaagccttcagaggtgtttaggacagacctgatcactgccatgaagttgcatgactcctaccagctgaatccggatgagtactatgtgttggcagatccctggagacaggaatgggagaaaggggtccaggtgcctgtgagcccggggaccatccctcagcctgtggccagggttgtgtctgaagagaaatccctcatgttcatcaggcccaagaagtacatcgtgtcatcaggctctgagcctcccgagttgggctatgtggacatccggacgctggctgacagcgtgtgtcgctatgacctcaatgacatggatgctgcatggctggaactgaccaatgaagaatttaaggagatgggaatgcctgaactagatgaatacaccatggagagggtcctagaggaatttgagcagcgatgctacgacaatatgaatcatgccatagagactgaggaaggcctggggatcgaatatgatgaagatgttgtctgtgatgtctgccagtctcctgatggtgaggacggcaatgagatggtgttctgtgacaaatgcaacatctgtgtgcaccaggcctgttatggaatcctcaaggtaccagagggcagctggctgtgccggacatgtgccctgggggttcagccaaaatgtctgctgtgtccgaagaagggtggagctatgaagcccacccgtagcggaaccaagtgggtccacgttagctgtgctctgtggatccctgaggtgagcattggcagcccagagaagatggagcccatcaccaaggtgtcacacattcccagcagccggtgggcgctagtgtgcagcctctgcaatgagaagtttggggcctctatacagtgctctgtgaagaactgccgcacagccttccatgtgacctgtgcttttgaccggggcctggagatgaagaccatcttagcagagaatgatgaagtcaagttcaagtcctattgcccaaagcacagctcacataggaaacccgaggagagtcttggcaagggggctgcacaggagaatggggcccctgagtgttccccccggaatccgctggagccctttgccagccttgagcagaaccgggaggaggcccaccgggtgagtgtccgtaagcagaagctgcagcagttggaggatgagttctacaccttcgtcaacctgctggatgttgccagggctctgcggctgcctgaggaagtagtggatttcctgtaccagtactggaagttgaagaggaaggtcaacttcaacaagcccctgatcaccccaaagaaagatgaagaggacaatctagccaagcgggagcaggatgtcttatttaggaggctgcagctgttcacgcacctgcggcaggacctggagagggttcggaacctcacttacatggtgacccgcagggaaaagattaaacggtctgtgtgcaaagtccaggaacagatattcaatctttacactaagcttttggagcaagaaagagtttcaggtgtgccttcttcctgctcctcctcctcactggaaaacatgcttttgtttaacagtccttctgttggccctgatgctcccaagatagaggacttgaagtggcattctgcattcttcagaaaacaaatgggtacttccttggttcattcgctgaaaaagccccataagcgagatcctttgcagaatagccctggaagtgaaggcaaaaccctgctgaagcagccagacctgtgtggtagaagggaggggatggtggtcccagagagctttttgggtttagaaaagacctttgcagaagcacgtctcatatcagcacaacagaaaaatggtgtggtgatgccagaccatgggaaaagaagagacaatcgttttcattgtgatctcattaaaggagacttaaaggacaaatcttttaaacagagtcacaagcctctcaggtccacagatgtgtcccagaggcatctggacaacacaagagctgccacctcccctggagtggggcagtcagcacctggcacaaggaaggagatagtgcccaagtgcaatggctccctaatcaaagtaaactataatcagactgcagtcaaagtgcctacaacacctgccagcccagtgaaaaactggggaggattccggattccaaagaagggggaacggcagcagcagggagaggcccacgatggggcctgccaccagcactcagactacccatatttgggcttaggccgagttccagccaaggaaagggcaaaaagcaaattaaaatccgacaatgagaatgacgggtatgtccccgatgtggaaatgagtgactcagagagtgaggcatcagaaaagaaatgtatacacaccagcagcactatcagcagaaggacagacattatcaggagaagcatcttggcttcttgatgcaacagagatgatgcggaagccctttgggctcgtcattgggtttgctagaggagagctctgatgtgggggagaagcagaaacccattaatcctgagctacacaaacacatttacttgcaattcagattaatttttttccagagtcatttttaaatcatttttgtgagaagtttgtgttatttgcaacttgttgaggaaacagaagagtagattgtaaccataagacactgctaagactagaacccgaactgaacactaaaataaaaatgaaatgttttaaagaaggcaaggcttaaataagcctcatgaatttttatagccctctgcattcttcccaaagcacaaactcatggttacctgaatatagggaaccagatatggttcttgagaaaccctcatggtaccattcacagcccataaagtttattttctaggactgtggtagatcttgaaatcatatttatatttggccctcaaggctatttttgttgcattatagcatataggcagcagctctgaagcttcagtaacactaagaaatttatgtgtaaatatagcagtcagggaagagaattttaaaaaaggtcattattgaagaagctgaggggacagggtagagctgctgcaatatggagatttagggtaatatggcaaggtcctgctgcttgaagcctgtgagtgggttgtggatatgggactggtggagagtgagactgttaggaaagttgtatctatgaataagggcagttgaagtagaatttttaccagtccacttgaccttcttcttccctaaccactggctcttgagccagcttgggatttccctggccattgccaatacctggccatctggcttccaatagtacagtggctactcaagttcaagcgaagaacttccagactctggtgactgttacttcccagagccaaccactagtgcatatgttagggaatctgggcttccaacatgaatggattccttaagaaaaaggaaaaaaaaaaaaaaaagaaaaaaagaaaaaaaaaagaaaaaagaaaaaaagagaaaaaagcgaaataggttatattttaaaaacaatagaaaggcaataagttgcgataagctcttactattgaccaaggttatacaggaaagagactgaagtgtacccttgaataggttttctgtagtcagagttctaaactctaatttgtaacttggactttctaattgcaaatggcaataactattaagttatcagcaataataaatttagcattaaatttgagtacaatgttttgtttttgcactccccatagtgcgtatgtattaagacagtggatagtgtttaggtcctgttaattttctttggaattcaatgtggttgtgaatcaaacttaaggaaggaacgtttaaatagcaatgagatacagaattatgggcctttggaacaagcccgacttcccctaaattctccttagtttgttaataccagtattcagattcctgattcatttatacatctgtttccatatggcagggacattatgatacttaatgaataatgctttgaggagttctgcagttaactttcaagtcttccagatgattgtcaacaacaaaaaaggcttattgaatcccatcttgctatgcaagttttatcagatgatcaaatagtagatctgatacatccccattgtatgtacgacattttcaaaccaagtcttaacttttcaaggacattttagtagctaattcaggggagggggaagaatgatgcaggtttttagattgactgactatttttgagttatggggctcattttgaaagactgctgtccagatcagcttgttgctgcagataatagaaggttcttatgaatccaagttgtatattcacttgtaggataatttaaaaattagattttttttgcatatgagcaaaaaccttttgctggatacaggagaaggttggactttatctacagttatcttttgattacagcaacagctctgggtgagagtagaatttatagagggataatttgtcaagccatagaaagaaaatctaaattaatctagtaagtgtatgacctctcaccattttaagaggtatcagattcatttgcactattaggaatgctagttttgtgcaaaaataatgccttacctgttttttccccacatttaggttgaaaagctttcaaatgttccaagttatgctgaaccaaaaaaaacaaaacaaaaacaaaacaaaaaatattaaaaaaaacccacacaaaaacaaaacacacaaaaataaaaagcccacactttttattcctgcttcgaaatgcaaatggatagagcacggtttctctgacagtataatgatagctttgtgagttagtttcatgtcatgctgggaactctctatgaggtggccataagcagcaaccagcccaaacacccacttgcgttctattagtatggaaccatttgcatttgttttttttaagctttatctttccttgtgcatcctgaccaagaaatatctttgattatgattaatgtattatgtcaaaatgtaggctagttaaacttttgtaaagttgcctggaatgtcatttgttaggttataaacacaagatctaaatgaagggttttatgtgttgtgtacaaatcttattttgaaatggacaaacttgtcattacatttgtaaccttgtacagaggatttttcactatgtgcctagcttggtgtccattcagctaaaattgaaaaaaaaaaaaaggtgcatgaagagttaaaaatcaaattaaagtatatgtagagatgactattttatattacatgacccaatcctgtatttatttctaccccctttttgaaagtatttataaaactagttgaggacagctgtatttttttgttgaactatttagtagaattgtgcctttttgtctgtatgtgaataaatgctgtacattttgcaataca

SEQ ID NO: 1394 - DNA, 360 bp, HOMO SAPIENS
  misc_feature (26)..(26): n is a, c, g, or t
  misc_feature (61)..(61): n is a, c, g, or t
  misc_feature (238)..(238): n is a, c, g, or t
tgaagagcattttgtcaatactcagngtctacagagggtgctgtctgagtgttgagaatgncaaaggaagcaactgacatggtctttgaccttgaattgtgtccctttcaacccaaaacaggacaggcagaagtattagagtagttgatgattcaattaactagatcttagctgactgatctcagaaggtttcatgaaagaagtgagaacaaatgctttaaacatcttgatctagcanaaagaaaagtgtctctaaattggtgagatgttatctgtggagacaaatgtaggatttagagagagagatgcaaaaggggaagtaagagggtttattcaagagagattatgactgggtgcagt

SEQ ID NO: 1395 - DNA, 547 bp, HOMO SAPIENS
  misc_feature (48)..(48): n is a, c, g, or t
  misc_feature (53)..(53): n is a, c, g, or t
  misc_feature (78)..(80): n is a, c, g, or t
ttcctgacccatcagatccattcagtggctcatgtgcagctttcatanaatanaataaacttgataagagtggaaaannntcttgtcttgtacagaaaaagttgttttttgaaacttttttcatgtatgtgactgtatgttctgagtcacagcataaagtgtaatttttactgtgggcaatacatatcggagaagttttaaaaaggatgctgaacaagatcatttcttcagcctcatgattctcagcatgtattgagtgcttaggggtatggaaaagtggggaaagtggagatgtgggttcaagtgccagctttgccattaacaggcgtaaggaagttgtgctgtctgctggcatctctacttcctcatctatgaaatggggcatgggatacatggttttaggtatgtaagttccgttagcccttgattccagcttttaaattgagaagttaaacacccatgactttccaccttacagattgtaaaactgatgttgaataagtttacataacctgaaacttcttacctccttcatcatgcaaaccaa

SEQ ID NO: 1396 - DNA, 2589 bp, HOMO SAPIENS
gacggacggggtcaggtcccatcatggcggctgaagaggcggatgtggatatcgaaggggacgtggtagcggcggcgggggcacagccaggaagtggtgaaaatacagcatcagttttacaaaaagatcactatcttgattcatcttggagaacagagaatggccttattccttggaccttggataacaccatcagtgaagagaacagagctgttattgagaaaatgttgttggaagaagaatattatttatctaaaaaatcacaaccggaaaaagtctggcttgatcaaaaggaagatgataaaaaatacatgaagagtctgcagaaaacagcaaaaatcatggtacactctcctacaaaaccagccagttactcagtaaagtggacgatagaagaaaaagagctgtttgaacaagggctggctaaatttggccgaagatggaccaaaatttcaaagctaattggaagccgcactgttttacaagtgaagagttatgcaagacagtattttaaaaataaggtcaaatgcggtctggataaagaaacaccaaatcagaagaccggccataatcttcaagttaaaaatgaagataaagggacaaaggcatggacaccatcatgtttaaggggacgtgctgatcccaacttgaatgctgtaaaaattgaaaagttatctgatgatgaagaagtagacatcacagatgaggtggacgagttgtcttctcaaacaccccagaagaattctagcagtgatctcttgttagactttcctaatagtaaaatgcatgaaaccaatcaaggagaattcattacttctgacagccaggaagctctcttttctaagtcttccaggggctgtcttcaaaatgaaaagcaagatgaaacactttcaagctcagaaattacactgtggactgagaaacagagcaatggtgacaaaaaatcaattgaattaaatgaccagaaatttaatgaattgattaaaaactgcaacaagcatgatggaaggggaataatagttgatgccaggcagttgccttctccagagccttgtgaaattcagaaaaatttgaatgataatgaaatgctttttcattcttgccaaatggtagaggaaagccatgaggaagaagagcttaagccaccagaacaggaaatagaaatagatagaaatatcattcaagaagaagaaaaacaagcaattcctgagttttttgaggggcgccaagctaaaacaccagaacgctatttgaaaattagaaattatattttggatcaatgggagatatgcaaaccaaaatacttaaataagacctcagtacgtcctggcctgaagaactgtggagatgttaattgtattggacggattcatacatacctcgaattgataggagcaatcaattttggatgtgaacaggctgtgtataataggccacaaacagttgacaaagtacgaatcagagacagaaaagatgcagtagaagcataccaacttgcccagcgtctgcagtctatgcgtacaaggagacgtagggtccgagacccatggggaaactggtgtgatgcaaaggacttagaaggacaaacgtttgagcatctctctgctgaggagttggcaaaaagaagagaagaggaaaaaggcagacctgttaaatctttaaaagtgccaagaccaacaaaaagctcgtttgatcccttccaactgataccttgtaatttttttagtgaagaaaagcaggagccatttcaggtgaaagtggcttcagaagcacttttaataatggatttgcatgctcatgtttctatggcagaagtgattggtctgttaggaggaagatactcagaagttgataaagtagttgaagtctgtgcagcagaaccatgtaacagtctgagtacaggactacagtgtgagatggatcctgtatcacaaacacaggcctcagaaaccttggctgttagaggcttcagtgttattggatggtatcattctcatcctgcttttgatcctaatccttccttacgagatattgacacacaagctaaataccagagttacttctccagaggaggtgcaaagttcattgggatgattgttagtccctataatcgaaataatcccttaccatattctcagattacctgcctggttataagtgaggaaattagcccagatggctcttatcgcttaccttacaaatttgaagtacagcagatgttagaagaacctcagtggggattagtatttgaaaagacaagatggataatagaaaaatacaggctctcccatagcagcgtccccatggataaaatctttcgccgggattctgacctgacttgtttgcagaaacttttggagtgtatgaggaagactctgagcaaagtgaccaattgctttatggctgaagaattcttgactgaaatagaaaatttgttcctttccaattataaaagcaaccaagagaatggagtaaccgaagagaactgtacaaaggaattgttaatgtgattattttaaagttaagacattttaatcttgacacagtagatcttactttcaaagttataaacttgaagtgattgtagtt

SEQ ID NO: 1397 - DNA, 16407 bp, HOMO SAPIENS
ctgcagccatgggtgccctatggagctggtggatactctgggctggagcaaccctcctgtggggattgacccaggaggcttcagtggacctcaagaacactggcagagaggaattcctcacagccttcctgcagaactatcagctggcctacagcaaggcctacccccgcctccttatctccagtctgtcagagagccccgcttcagtctccatcctcagccaggcagacaacacctcaaagaaggtcacagtgaggcccggggagtcggtcatggtcaacatcagtgccaaggctgagatgataggcagcaagatcttccagcatgcggtggtgatccattctgactatgccatctctgtgcaggcactaaatgccaagcctgacacagcggagctgacactgctgcggcccatccaggccctaggcaccgagtattttgtgctcacaccccccggcacctcagccaggaatgtcaaggagtttgccgtggtggccggtgccgcaggtgcctcggtcagtgtcacgctgaaggggtcagtgacattcaatggcaagttctatccagcaggcgatgtcctaagagtgactctacagccctacaatgtggcccagctacagagctcagtggatctctcggggtcaaaggtcacagctagtagccccgtggctgtcctctctggccacagctgtgcgcagaaacatacgacctgcaaccatgtggttgagcagctgctacccacgtctgcctggggcacccactatgtagtacccacgctggcctcccaatctcgctatgatttggccttcgttgtggccagccaggccacaaagctgacctacaaccatgggggtatcactggctcccgtgggctccaggcaggtgatgtggtagagtttgaggtccggccatcctggccactctacctgtctgcaaatgtgggcatccaggtcctgttgtttggcacaggtgccataaggaatgaagtgacttatgacccctacctggtcctgatcccagatgtggcggcctactgcccagcctatgtggtcaagagtgtaccaggctgtgagggcgtggccctggtagtggcacagacgaaggctatcagcgggctgaccatagatgggcatgcagtgggggccaagctcacctgggaggctgtgccaggcagtgagttctcgtatgctgaagtggagctcggcacagctgacatgatccacacggccgaggccaccaccaacttgggactgctcaccttcgggctggccaaggctataggctacgcaacagctgctgattgcggccggactgtactgtccccagtggagccctcctgcgaaggcatgcagtgcgcagccgggcagcgctgccaggtggtaggcgggaaggccgggtgtgtggcggagtccaccgctgtctgccgcgcccagggcgacccccattacaccaccttcgacggccgtcgctacgacatgatgggcacctgttcgtacacgatggtggagctgtgcagcgaggacgacaccctgcccgccttcagcgtggaggccaagaacgagcaccggggcagccgccgcgtctcctacgtgggcctcgtcactgtgcgcgcctacagccactctgtgtcgctgacccgcggtgaagttggcttcgtcctggttgacaaccagcgctcgcgcctgccagtctccctgagtgagggtcgcctgcgtgtgtaccagagcggaccacgggccgtggtggagctggtctttgggctggtggtcacttatgactgggactgccagctggcactcagcctgcctgcacgcttccaagaccaggtgtgcgggctgtgtggcaactataatggtgacccagcagacgacttcctcacgcctgacggggctctggctcctgacgctgtggagttcgcaagtagctggaagctggatgatggggactacctgtgtgaggatggctgccagaacaactgtcccgcctgcaccccaggccaggcccaacactatgagggcgaccgactctgtggcatgctgaccaagctcgatggccccttcgctgtctgccatgacaccctggaccccaggcccttcctggagcagtgtgtatatgacctgtgtgtggtcggtggggagcggctcagcctgtgccgtggcctcagcgcctatgcccaggcctgtctggagcttggcatctcggttggggactggagatcaccagccaactgccccctgtcctgccctgccaacagccgctatgagctctgcggccctgcttgcccgacctcctgcaacggggctgcggcgccgtccaactgctccgggcgcccctgcgtggagggctgcgtgtgcctcccaggcttcgtggccagcggcggcgcctgcgtgccggcctcgtcgtgtggctgcaccttccagggtctccagctcgctccgggccaggaagtgtgggcggacgagttgtgccaaaggcgctgcacctgcaacggcgccacccatcaggtcacctgccgcgacaagcagagctgcccggcgggtgagcgctgcagcgtccagaacggcctcctgggctgctaccccgatcgcttcgggacctgccaggggtccggggacccacactatgtgagcttcgacggccggcgcttcgacttcatgggcacctgcacgtacctgctggtcggctcatgcggccagaacgcagcgctgcctgccttccgggtgctggtggaaaacgagcatcggggcagccagactgtgagctacacgcgcgccgtgcgggtggaggcccgcggggtgaaggtggccgtgcgccgggagtaccccgggcaagtgctggtggatgacgtccttcagtatctgcccttccaagcagcagatgggcaggtgcaggtgttccgacagggcagggatgccgtcgtgcgcacggactttggcctgactgtcacttatgactggaatgcacgagtgactgccaaggtgcccagcagctatgctgaggccctgtgtggactctgtgggaacttcaacggggacccagctgatgacctggctctgcggggtgggggtcaagctgccaatgcactggcctttgggaacagctggcaagaagagacgaggcccggctgtggagcaactgaaccgggtgactgtcccaagctggactccctggtggcccagcagctgcagagcaagaatgagtgtggaatccttgccgaccccaaggggcccttccgggagtgccatagcaagctggacccccagggtgccgtgcgcgactgtgtctatgaccgctgcctgctgccaggccagtctgggccactgtgtgacgcactggccacctatgctgctgcatgccaggctgctggagccacagtgcacccctggaggagtgaagaactttgcccactgagctgcccaccccacagccactatgaggcgtgttcctacggctgcccgctgtcctgtggagacctcccagtgcccgggggctgtggctcagaatgccatgagggctgcgtgtgcgatgagggctttgcgctcagtggtgagtcctgcctgcccctggcctcctgtggctgcgtacaccagggcacctaccacccaccaggccagaccttctaccctggccccggatgtgattccctttgccactgccaggagggcggcctggtgtcctgtgagtcctccagctgcggaccgcacgaggcctgccagccatccggtggcagcttgggctgtgtggccgtgggctctagcacctgccaggcgtcaggagacccccactacaccaccttcgatggccgccgcttcgacttcatgggcacctgcgtgtatgtgctggctcagacctgcggcacccggcctggcctgcatcggtttgccgtcctgcaggagaacgtggcctggggtaatgggcgagtcagtgtgaccagggtgatcacggtccaggtggcaaacttcaccctgcggctggagcagagacagtggaaggtcacggtgaacggtgtggacatgaagctgcccgtggtgctggccaacggccagatccgtgcctcccagcatggttcagatgttgtgattgagaccgacttcggcctgcgtgtggcctacgaccttgtgtactatgtgcgggtcaccgtccccggaaactactaccagcagatgtgtggcctgtgtgggaactacaacggcgaccccaaggatgacttccagaagcccaatggctcacaggcaggcaacgccaatgagttcggcaactcctgggaggaggtggtgcccgactctccctgcctgccgcccaccccttgcccgccggggagcgaggactgtatccccagccacaagtgtcctcccgagctggagaagaagtatcagaaggaggagttctgtgggctcctctccagccccacagggccactgtcctcctgccacaagctggtggatccccagggtcccttgaaagattgcatctttgatctctgcctgggtggtgggaacctgagcattctctgcagcaacatccatgcctacgtgagtgcttgccaggcggctggaggccacgtggagccctggaggactgaaactttctgtcccatggagtgccctccgaacagtcactacgagctctgtgcggacacctgctccctgggctgctcagctctcagtgcccctccacagtgccaggatgggtgtgctgagggctgccagtgtgactccggcttcctctacaatggccaagcctgcgtgcccatccagcaatgcggctgctaccacaatggtgtctactatgagccggagcagacagtcctcattgacaactgtcggcagcagtgcacgtgccatgcgggtaaaggcatggtgtgccaggaacacagctgcaagccggggcaggtgtgccagccctccggaggcatcctgagctgcgtcaccaaagacccgtgccacggcgtgacatgccggccacaggagacatgcaaggagcagggtggccagggcgtgtgcctgcccaactatgaggccacgtgctggctgtggggcgacccacactaccactccttcgatggccggaagtttgacttccagggcacctgtaactatgtgctggcaacaactggctgcccgggggtcagcacccagggcctgacacccttcaccgtcaccaccaagaaccagaaccggggcaaccctgctgtgtcctacgtgagagtcgtcaccgtggctgccctcggcaccaacatctccatccacaaggacgagatcggcaaagtccgggtgaacggtgtgctcacagccttgcctgtctctgtggccgacgggcggatttcagtgacccagggtgcatcgaaggcactgctggtggctgactttggactgcaagtcagctatgactggaactggcgggtagacgtgacgctgcccagcagctatcatggcgcagtgtgcgggctctgcggtaacatggaccgcaaccccaacaatgaccaggtcttccctaatggcacactggctccctccatacccatctggggcggcagctggcgagccccaggctgggacccactgtgttgggacgaatgtcgggggtcctgcccaacgtgccctgaggaccggttggagcagtacgagggccctggcttctgcggacccctggcccccggcacagggggccctttcaccacctgccatgctcatgtgccacctgagagcttcttcaagggctgtgttctggacgtctgcatgggtggtggggaccgtgacattctttgcaaggctctggcttcctatgtggccgcctgccaggctgctggggttgtcatcgaagactggcgggcacaggttggctgtgagatcacctgcccagaaaacagccactatgaggtctgtggctcaccctgcccggccagctgtccgtcccctgcaccccttacgacgccagccgtatgtgagggcccctgtgtggagggctgccagtgcgacgcgggtttcgtgttaagtgctgaccgctgtgttcccctcaacaacggctgcggctgctgggccaatggcacctaccacgaggcgggcagtgagttttgggctgatggcacctgctcccagtggtgtcgctgcgggcctgggggtggctcgctggtctgcacacctgccagctgtgggctgggtgaagtgtgtggcctcctgccatccggccagcacggctgccagcccgtcagcacagctgagtgccaggcgtggggtgacccccattacgtcactctggatgggcaccgattcaatttccaaggcacctgcgagtacctgctgagtgcaccctgccacggaccacccttgggggctgagaacttcactgtcactgtagccaatgagcaccggggcagccaggctgtcagctacacccgcagtgtcaccctgcaaatctacaaccacagcctgacactgagtgcccgctggccccggaagctacaggtggacggcgtgttcgtcactctgcccttccagctggactcgctcctgcacgcacacctgagcggcgccgacgtggtggtgaccacaacctcagggctctcgctggctttcgacggggacagcttcgtgcgcctgcgcgtgccggcggcgtacgcgggctctctctgtggcttatgcgggaactacaaccaggaccccgcagacgacctgaaggcggtgggcgggaagcccgccggatggcaggtgggcggcgcccagggctgcggggaatgtgtgtccaagccatgcccgtcgccgtgcaccccagagcagcaagagtccttcggcggcccggacgcctgcggcgtgatctccgccaccgacggcccgctggcgccctgccacggccttgtgccgcccgcgcagtacttccagggctgcttgctggacgcctgccaagttcagggccatcctggaggcctctgtcctgcagtggccacctacgtggcagcctgtcaggccgctggggcccagctccgcgagtggaggcggccggacttctgtcccttccagtgccctgcccacagccactacgagctctgcggtgactcctgtcctgggagctgcccgagcctgtcggcacccgagggctgtgagtcggcctgccgtgaaggctgtgtctgcgatgctggcttcgtgctcagtggtgacacgtgtgtacctgtgggccagtgtggctgcctccacgatgaccgctactacccactgggccagaccttctaccctggccctgggtgtgattccctttgccgctgccgggagggcggtgaggtgtcctgtgagccctccagctgcggcccgcatgagacctgccggccatccggtggcagcttgggctgcgtggccgtgggctctaccacctgccaggcgtcgggagatccccactacaccaccttcgatggccgccgcttcgacttcatgggcacctgcgtgtatgtgctggctcagacctgcggcacccggcctggcctacatcggtttgccgtcctgcaggagaacgtggcctggggtaatgggcgagtcagtgtgaccagggtgatcacggtccaggtggcaaacttcaccctgcggctggagcagagacagtggaaggtcacggtgaacggtgtggacatgaagctgcccgtggtgctggccaacggccagatccgtgcctcccagcatggttcagatgttgtgattgagaccgacttcggcctgcgtgtggcctacgaccttgtgtactatgtgcgggtcaccgtccctggaaactactaccagctgatgtgtggcctgtgtgggaactacaacggcgaccccaaggatgacttccagaagcccaatggctcgcaggcaggcaacgccaatgagttcggcaactcctgggaggaggtggtgcccgactctccctgcctgccgccgcccacctgcccgccggggagcgagggctgtatccccagcgaggagtgtcctcccgagctggagaagaagtatcagaaggaggagttctgtgggctcctctccagccccacagggccactgtcctcttgccacaagctggtggatccccagggtcccttgaaagattgcatctttgatctctgcctgggtggtgggaacctgagcattctctgcagcaacatccatgcctacgtgagtgcttgccaggcagctggaggccaggtggagccctggaggaatgaaactttctgtcccatggaatgccctcagaacagtcactacgagctctgtgcggacacctgctccctgggctgctcggctctcagtgcccctctgcagtgcccagatgggtgtgctgagggctgccagtgtgactccggcttcctctacaacggccaagcctgcgtgcccatccagcaatgtggctgctaccacaatggtgcctactatgagccggagcagacagtcctcattgacaactgtcggcagcagtgcacgtgccatgtgggtaaagtcgtggtgtgccaggaacacagctgcaagccggggcaggtgtgccagccctccggaggcatcctgagctgcgtcaacaaagacccgtgccacggcgtgacatgccggccacaggagacatgcaaggagcagggtggccagggcgtgtgcctgcccaactatgaggccacgtgctggctgtggggcgacccacactaccactccttcgatggccggaagtttgacttccagggcacctgtaactatgtgctggcaacaactggctgcccgggggtcagcacccagggcctgacacccttcaccgtcaccaccaagaaccagaaccggggcaaccctgctgtgtcctacgtgagagtcgtcaccgtggctgccctcggcaccaacatctccatccacaaggacgagatcggcaaagtccgggtgaacggtgtgctcacagccttgcctgtctctgtggccgacgggcggatttcagtgacccagggtgcatcgaaggcactgctggtggctgactttggactgcaagtcagctatgactggaactggcgggtagacgtgacgctgcccagcagctatcatggcgcagtgtgcgggctctgcggtaacatggaccgcaaccccaacaatgaccaggtcttccctaatggcacactggctccctccatacccatctggggcggcagctggcgagccccaggctgggacccactgtgttgggacgaatgtcgggggtcctgcccaacgtgccctgaggaccggttggagcagtacgagggccctggcttctgcggacccctggcccccggcacagggggccctttcaccacctgccatgctcatgtgccacctgagagcttcttcaagggctgtgttctggacgtctgcatgggtggtggggaccgtgacattctttgcaaggctctggcttcctatgtggccgcctgccaggctgctggggttgtcatcgaagactggcgggcacaggttggctgtgagatcacctgcccagaaaacagccactatgaggtctgtggcccaccctgcccggccagctgtccgtcccctgcaccccttacgacgccagccgtatgtgagggcccctgtgtggagggctgccagtgcgacgcgggtttcgtgttaagtgctgaccgctgtgttcccctcaacaacggctgcggctgctgggccaatggcacctaccacgaggcgggcagtgagttttgggctgatggcacctgctcccagtggtgtcgctgcgggcctgggggtggctcgctggtctgcacacctgccagctgtgggctgggtgaagtgtgtggcctcctgccatccggccagcacggctgccagcccgtcagcacagctgagtgccaggcgtggggtgacccccattacgtcactctggatgggcaccgattcgatttccaaggcacctgcgagtacctgctgagtgcaccctgccacggaccacccttgggggctgagaacttcactgtcactgtagccaatgagcaccggggcagccaggctgtcagctacacccgcagtgtcaccctgcaaatctacaaccacagcctgacactgagtgcccgctggccccggaagctacaggtggacggcgtgttcgtcactctgcccttccagctggactcgctcctgcacgcacacctgagcggcgccgacgtggtggtgaccacaacctcagggctctcgctggctttcgatggggacagcttcgtgcgcctgcgcgtgccggcggcgtacgcgggctctctctgtggcttatgcgggaactacaaccaggaccccgcagacgacctgaaggcggtgggcgggaagcccgccggatggcaggtgggcggcgcccagggctgcggggaatgtgtgtccaagccatgcccgtcgccgtgcaccccagagcagcaagagtccttcggcggcccggacgcctgcggcgtgatctccgccaccgacggcccgctggcgccctgccacggccttgtgccgcccgcgcagtacttccagggctgcttgctggacgcctgccaagttcagggccatcctggaggcctctgtcctgcagtggccacctacgtggcagcctgtcaggccgctggggcccagctccgcgagtggaggcggccggacttctgtcccttccagtgccctgcccacagccactacgagctctgcggtgactcctgtcctgggagctgcccgagcctgtcggcacccgagggctgtgagtcggcctgccgtgaaggctgtgtctgcgatgctggcttcgtgctcagtggtgacacgtgtgtacctgtgggccagtgtggctgcctccacgatgaccgctactacccactgggccagaccttctaccctggccctgggtgtgattccctttgccgctgccgggagggcggtgaggtgtcctgtgagccctccagctgcggcccgcatgagacctgccggccatccggtggcagcttgggctgcgtggccgtgggctctaccacctgccaggcgtcgggagatccccactacaccaccttcgatggccaccgcttcgacttcatgggcacctgcgtgtatgtgctggctcagacctgcggcacccggcctggcctgcatcggtttgccgtcctgcaggagaacgtggcctggggtaatgggcgagtcagtgtgaccagggtgatcacggtccaggtggcaaacttcaccctgcggctggagcagagacagtggaaggtcacggtgaacggtgtggacatgaagctgcccgtggtgctggccaacggccagatccgtgcctcccagcatggttcagatgttgtgattgagaccgacttcggcctgcgtgtggcctacgaccttgtgtactatgtgcgggtcaccgtccctggaaactactaccagctgatgtgtggcctgtgtgggaactacaacggcgaccccaaggatgacttccagaagcccaatggctcgcaggcaggcaacgccaatgagttcggcaactcctgggaggaggtggtgcccgactctccctgcctgccgccgcccacctgcccgccggggagcgcgggctgtatccccagcgacaagtgtcctcccgagctggagaagaagtatcagaaggaggagttctgtgggctcctctccagccccacagggccactgtcctcctgccacaagctggtggatccccagggtcccttgaaagattgcatctttgatctctgcctgggtggtgggaacctgagcattctctgcagcaacatccatgcctacgtgagtgcttgccaggcggctggaggccacgtggagccctggaggaatgaaactttctgtcccatggaatgccctcagaacagtcactacgagctctgtgcggacacctgctccctgggctgctcggctctcagtgcccctctgcagtgcccagatgggtgtgctgagggctgccagtgtgactccggcttcctctacaacggccaagcctgcgtgcccatccagcaatgtggctgctaccacaatggtgtctactatgagccggagcagacagtcctcattgacaactgtcggcagcagtgcacgtgccatgtgggtaaagtcgtggtgtgccaggaacacagctgcaagccggggcaggtgtgccagccctccggaggcatcctgagctgcgtcaccaaagacccgtgccacggcgtgacatgccggccacaggagacatgcaaggagcagggtggccagggcgtgtgcctgcccaactatgaggccacgtgctggctgtggggcgacccacactaccactccttcgatggccggaagtttgacttccagggcacctgtaactatgtgctggcaacaactggctgcccgggggtcagcacccagggcctgacacccttcaccgtcaccaccaagaaccagaaccggggcaaccctgctgtgtcctacgtgagagtcgtcaccgtggctgccctcggcaccaacatctccatccacaaggacgagatcggcaaagtccgggtgaacggtgtgctcacagccttgcctgtctccgtggccgacgggcggatttcagtggcccagggtgcatcgaaggcactgctggtggctgactttggactgcaagtcagctatgactggaactggcgggtagacgtgacgctccccagcagctatcatggcgcagtgtgcgggctctgcggtaacatggaccgcaaccccaacaatgaccaggtcttccctaatggcacactggctccctccatacccatctggggcggcagctggcgagccccaggctgggacccactgtgttgggacgaatgtcgggggtcctgcccaacgtgccctgaggaccggttggagcagtacgagggccctggcttctgcggacccctttcatctggcacagggggccccttcaccacctgccatgctcatgtgccacctgagagcttcttcaagggctgtgttctggacgtctgcatgggtggtggggaccgtgacattctttgcaaggctctggcttcctacgtggccgcctgccaggccgctggggttgtcatcgaagactggcgggcacaggttggctgtgagatcacctgcccagaaaacagccactatgaggtctgtggcccaccctgcccagccagctgtccgtcccctgcaccccttacgacgccagccgtatgtgagggcccctgtgtggagggctgccagtgcgacgcgggtttcgtgttaagtgctgaccgctgtgttcccctcaacaacggctgcggctgctgggccaatggcacctaccacgaggcgggcagtgagttttgggctgatggcacctgctcccagtggtgtcgctgcgggcctgggggtggctcgctggtctgcacacctgccagctgtgggctgggtgaagtgtgtggcctcctgccatccggccagcacggctgccagcccgtcagcacagctgagtgccaggcgtggggtgacccccattacgtcactctggatgggcaccgattcgatttccaaggcacctgcgagtacctgctgagtgcaccctgccacggaccacccttgggggctgagaacttcactgtcactgtagccaatgagcaccggggcagccaggctgtcagctacacccgcagtgtcaccctgcaaatctacaaccacagcctgacactgagtgcccgctggccccggaagctacaggtcgacggcgtgttcgtggctctgcctttccagctggactcgctcctgcacgcacacctgagcggcgccgacgtggtggtgaccacaacctcagggctctcgctggctttcgatggggacagcttcgtgcgcctgcgcgtgccggcggcgtacgcggcctctctctgtggcttatgcgggaactacaaccaggaccccgcagacgacctcaaggctgtgggcgggaagcccgctggatggcaggtgggcggggcccagggctgcggggaatgtgtgtccaagccatgcccgtcgccgtgcaccccagagcagcaggagtccttcggcggcccggacgcctgcggcgtgatctccgccaccgacggcccgctggcaccctgccacggccttgtgccgcccgcgcagtacttccagggctgcttgctggacgcctgccaagttcagggccatcctggaggcctctgtcctgcagtggctacctacgtggcagcctgtcaggccgctggggcccagctcggcgagtggaggcggccggacttctgtcccttgcagtgccctgcccacagccactatgagctctgcggtgactcctgccctgtgagctgcccgagcctctcagcacccgagggctgtgagtcggcctgccgtgaaggctgtgtctgcgatgctggcttcgtactcagtggtgacacctgcgtacccgtgggccagtgtggctgcctccatgatggccgctactacccactgggcgaggtcttctacccgggccctgagtgtgagcggcgctgtgagtgtgggccaggtggccatgtcacctgccaggagggcgcagcctgtgggccccatgaggagtgccggttagaggatggtgtccaggcctgtcatgccacaggctgtggccgctgcctggccaacgggggcatccactacatcacccttgatggccgtgtctacgacctgcatggctcctgctcctatgtcttggcccaagtctgccacccaaagcctggggacgaggacttttccatcgtgcttgagaagaatgcagctggagatctccaacgcctcctggttactgtggctggccaggttgtgagcctagctcaggggcagcaggtcaccgtggacggcgaggctgtggccctgcctgtggctgtgggccgcgtgcgggtgaccgccgagggccgaaacatggttctgcagacgaccaaggggctgcggcttctctttgatggcgatgcccacctcctcatgtccatccccagccccttccgtggacggctctgtggcctctgtgggaacttcaatggcaactggagtgacgactttgtcctgcccaatggctcagcagcgtccagtgtggagaccttcggggctgcatggcgggcgcccggctcctccaagggctgtggcgagggctgcgggccccaaggctgcccagtgtgcttggcagaggagactgcaccctatgagagcaacgaggcctgcgggcagctccggaacccccagggccccttcgcgacctgccaggcggtgctgagtccctctgagtacttccgccaatgcgtatacgacctgtgcgcgcaaaagggtgacaaagccttcctgtgccgcagcctggcagcctacacggcggcctgtcaggcagctggcgtggccgtgaagccctggaggacagacagcttctgcccgctccattgccccgcccacagccactactccatctgcactcgcacctgccagggatcctgtgcggctctctccggcctcacgggctgcaccacccgctgttttgagggctgtgagtgcgacgaccgcttcctgctttcccagggtgtctgcatccctgtccaagattgtggctgcacccataatggccgatacttgccggtaaactcctccctgctgacctcagactgcagcgagcgctgttcctgttcctcaagctctggcctgacatgccaggcagctggctgcccaccaggccgtgtatgtgaggtcaaggctgaagcccggaactgctgggccacccgtggtctctgtgtcctgtctgtgggtgccaacctcaccacctttgatggggcccgtggtgccaccacctctcctggtgtctatgagctctcttcccgctgcccaggactacagaataccatcccctggtaccgtgtagttgccgaagtccagatctgccatggcaaaacggaggctgtgggccaggtccacatcttcttccaggatgggatggtgacgttgactccaaacaagggtgtgtgggtgaatggtctccgagtggatctcccagctgagaagttagcatctgtgtccgtgagtcgtacacctgatggctccctgctagtccgccagaaggcaggggtccaggtgtggcttggagccaatgggaaggtggctgtgattgtcagcaatgaccatgctgggaaactgtgtggggcctgtggaaactttgacggggaccagaccaatgattggcatgactcccaggagaagccagcgatggagaaatggagagcgcaggacttctccccatgttatggctgatcagtcatccaccaggaacgaagatttcctgaagaagacctggtccctctggaggttgcagtggctgaaggatgcatcatgtgctcctaccctgctctaccgcttttctgggtcacagaggccaaatgtgagagcattgaataaatatcttaagctaagctgcaaaaaaaaaaaaaaaaaa

SEQ ID NO: 1398 - DNA, 513 bp, HOMO SAPIENS
  misc_feature (138)..(140): n is a, c, g, or t
  misc_feature (283)..(283): n is a, c, g, or t
ggtctatgtttcattcatctgctttcaggctggatttataacaagcagaacttttaaaacggtatgattttaaaataaaattaaaaattaaacacgctgagatctttccatagctttggcttctgggagttgaaagcnnngcttcaggaaaaagaggaccttagaactgaaggagcaagattccaacatcacactgtttttgttagctgtgtgtgtgtgtttcctgtgtatccaaaagacagaggagatgaaaaagcaaaagaaaagaaacgaggaatcagantggaaagaaggtttctccaggacgtcacctgtatgaggtacacagtgtgatgacacactctgtgcttttcctacttgtgtccacgtgagtgtctggagctgcccttcaaggagagcaatagatgaatgattctgccttcccgctgagagggatgtgggtcctgcggatggtcggggtgaagcttcctctcctttctgctgacagcacttcctcattaaatgcagagatct

SEQ ID NO: 1399 - DNA, 4109 bp, HOMO SAPIENS
cgggccggggcggcgcgagcggctggagcaacgggccccgcggcagctgcgggcgacgcggtcgatggacatgggcacccagggatcggggcgcaagcggctccccaaccgggagcggctcacggcggaggacgacgcgctcaaccagatcgcgcgggaggcggaagcccggctcgctgcaaaacgggcggcccgcgcggaggctcgcgagatccgcatgaaggagctggagcggcagcagaaggagatctatcaggtccaaaagaaatattatgggctggatacaaaatggggtgacatcgagcagtggatggaagacagtgagcgctactctcgtagatccagaagaaacacatcggcttctgatgaagacgagcgcatgtcagtgggtagtcgtggaagcctgaggtcgcagcctgacttggagtatgggggtccttacgcctggacaaatggttatgatggagaattgtatggatcacagtccctgaatagaagatctggcaggccctcctgtctgtacagcgctgcccggccttcggggagttaccgggcgtctgtgttggatgaaggcagcttcggtgggacccgacggggcagcacctccggctcccgtgctccctcggagtacagcggccacctcaactccagctcccgcgcctcctccagggccagctcggcccgggccagccctgtggtagaagagagaccagaaaaagattttactgagaaggggtctcgtaacatgccgggcctgtctgcagccacgctggcctctctgggtgggacttcctctcggagaggcagcggagacacctccatctccatcgacaccgaggcatccatcagggaaatcaaggaactcaatgagttaaaggaccagattcaggatgtagaaggcaaatacatgcagggattgaaagagatgaaggactctctagcagaagttgaagagaaatataagaaggctatggtttccaatgctcagctagacaatgaaaagacaaacttcatgtaccaggttgataccctaaaagatatgttgctggagcttgaagaacagctggctgaatctaggcggcagtacgaagagaaaaacaaagaatttgaaagggaaaaacacgcccacagtatactgcaatttcagtttgctgaagtcaaggaggccctgaagcaaagagaggaaatgctcgaggaaatccgacagctacagcagaaacaggcgagttctatcagggagatttctgatcttcaggaaacaatagagtggaaagacaaaaagataggggcattagagaggcagaaagagttctttgattccgtaaggagtgaacgggatgatcttagagaagaagtagtcatgctgaaagaggaattaaagaaacatggaataatcctaaattcagaaatagctaccaatggagagacttccgacaccctcaataatgttggataccaaggtcctaccaagatgacaaaagaagagttaaatgccctcaagtcgacaggggatgggaccctagatattaggttgaaaaagctggttgatgaacgggaatgcttattggaacagattaagaaactcaaagggcagctggaggagagacagaagattggcaaactagacaatcttcgatctgaagatgatgtcttggaaaacgggacagacatgcatgtaatggacctacaaagggatgccaacagacagatcagcgacctcaaatttaaacttgcaaaatctgagcaagagataactgcattagaacaaaatgtaataaggttagagagtcaagtatcacgttacaaatcagcggctgaaaatgcagaaaaaatagaagatgaacttaaggcagaaaaacggaaactccaaagagagctccgctctgcattggataaaacagaagagctcgaggtgagcaacggccacttagtgaagcgtctggaaaaaatgaaagcaaatcggagtgcactcttgtcccagcagtaaattccagctctgatcaggcaactggttggtgactggagagcattgtttcataggcttttctctgtcctatctgggagcgctgcttcttcccctgccttccgagagacgaagaccgtggcgagcttggcgcttaggggctcccgtgccatggctcaccccagggagccccagcagccaccaggtgcctctgtctgcagacccctggcccgggctggcgccgacgctcagaacctgcaggtacttcataagcacacaggggcctcgagggagctctgtgtctgaccgcacagcagcctctgaatgccgctggaagtgatgatcaaagtaaagattcagttgggacttgagttttttttttttttcatgtgtcttgctgaagattaaggggaaatgttacagtgttgggacttcctttcatggcagaatctacaatttgagcgacttcagtagtatctcttagtctacgcttttcatacacaaaacactgtggaaccacaagccattaccaagcaaaactctttcactggaaacaagggggcagtctagaagtaaaagtgaccttaagaagactctttacaggcaacaaatgaagcttttctaagggatttttgcatcagttcagtcataagaatacttttttccagggtaattaggcaatagcttcactgaaaatgacagcttttcattgcattatttaatccttatatttggaattgaagtcgttaacttcttttaaagaatgtactattagaaaaattaaaaatgaaatgttgagagacttcagcaatgtggttctaatttttttccactgagaaagaagatctttaatttcatattaatggttctgtatattttgggtcatctttttattttttaagaatatcaagtcaattcatttttctttccctatttaaaaaaaaaggtgttttcacagaatgagtgcacttaaaaagtgaagtgaaggaggaggtaacagtagagacgatggcaatatcatcaaggacaaaagtaaaaacgtttagctacctgctgatttttagtgactgttcatatatgttgtatttcaagtatggctggtgaagccagtcagcttttcgggacgttagcaagtggaaactgagtcagtatcatccaaaaccatatctagtcttaacacatggagaatgctggagtgagggttgtgagttcagggtatataatcaagaaaacactcccagcataatgctaggggtcaccagtgtccatcccccagaactgtatggatctaggatatacacagctgcgttgcattaagaaagagatgaaatctctattaaaatacacaagatttttgtatctccttgtgcagaggatatttgccactgcccattgggaagcagacaagttatagggggctgggggccaacactggcaagtaggaaaccacgggtcggacaggtgagcaaaatgtgctggcaggtgggcaccactgggagacccacactgcacacccgggcaccgtatgaacaggaaagaggaaggaagctggacgaagcccctcagggaccctgtgctgaccatgctgggcccaccggcaaaagggagatattcagttccttgtctcatccttaaggtttcttccacaacatctgaatacaagcatgtttaactgggaaaatgtctatgtcatgcgtgaataacaccagcagcaaacactcacacatcacgcagacacggccggcagcatgctgacgcttttaggtatttttcactcatgcaattttcacatattttcactcatttcatttgcacggaaattctatgaggtagatgctgttatcaaatccacattacagatgagggacccagggtccaggaaggtgaactggcagaagtctcccagctggtagaacagggctgcaaggcatcgattcccaggtgtctcacagccctgagaagatggcgttttccctatcagtggctctgaggaagtcaagccttcagtctctacctctcccaccaattcttttggaaacagcaaaccaatgttacacacacttcctaatccagaggaagctagaacacgatttttaaatttatttagtaaaataaaactttttttgcagatgtaacgaaaaaaaaa

SEQ ID NO: 1400 - DNA, 1796 bp, HOMO SAPIENS
ggtcagctgagttcgccggcccagggcaggcggggcccgagcctagcggtaacccccgggcagggcggggccgctcgcagactccatatgagattcacctcgcaggtggttccctcattcgagtgctccggcgcacagacccgcgccccgccgtctgcgagcctcccgagagccgtcccttcgtccggccctggagcattgcgtttgtcgccggtgtcgcagtgcgaggatggcgccgcgggtgtagcggctctctgcgcaggccgagtgggcccagagaagcgaggaactccgcagctcgtcgacacgtctcgtctcctgtcccaattcagggcttggtgaggtgactcgcggtcgcgggtgactcgccggcaggacactgcctggaacgcctggagcgcctcccactgcagacgtctgtccgcctccagccgctctcctctgacgggtcctgcctcagttggcggaatggcggccacgggagccaatgcagagaaagctgaaagtcacaatgattgccccgtcagacttttaaatccaaacatagcaaaaatgaaagaagatattctctatcatttcaatctcaccactagcagacacaatttcccagccttgtttggagatgtgaagtttgtgtgtgttggtggaagcccctcccggatgaaagccttcatcaggtgcgttggtgcagagctgggccttgactgcccaggtagagactatcccaacatctgtgcgggaactgaccgctatgccatgtataaagtaggaccggtgctgtctgtcagtcatggtatgggcattccttctatctcaatcatgttgcatgagctcataaagctgctgtactatgcccggtgctccaacgtcactatcatccgcattggcacttctggtgggataggtctggagcccggcactgtggtcataacagagcaggcagtggatacctgcttcaaggcagagtttgagcagattgtcctggggaagcgggtcatccggaaaacggaccttaacaagaagctggtgcaggagctgttgctgtgttctgcagagctgagcgagttcaccacagtggtggggaacaccatgtgcaccttggacttctatgaagggcaaggccgtctggatggggctctctgctcctacacggagaaggacaagcaggcgtatctggaggcagcctatgcagccggcgtccgcaatatcgagatggagtcctcggtgtttgccgccatgtgcagcgcctgcggcctccaagcggccgtggtgtgtgtcaccctcctgaaccgcctggaaggggaccagatcagcagccctcgcaatgtgctcagcgagtaccagcagaggccgcagcggctggtgagctacttcatcaagaagaaactgagcaaggcctgagcgctgccctgcacctccgcagacctgctgtgatgacttgccattaaaagcattgtccaaaatcccctgttgtgtggactttgagcacactttacacaagaatctagaaaatcagatcgcgattaagagacagagaatcttggattaaccgcatgggagatgttcttccttttgaagtttcattggagcattttcaatgatgttagcctgatttggggtttcttcaagaacattctaccaaatttttgtactatttctagggaaatttttcagactttaaaattctaatggtagtcagatttcatgtcactaaacaagaaatctgacaatagtgccaggaaactaatttcctgatacattaaaaaaattccatgcaaaaaaaaaaaaaaaaaaaa

SEQ ID NO: 1401 - DNA, 3452 bp, HOMO SAPIENS
atgcaggcgcgctactccgtgtccagccccaactccctgggagtggtgccctacctcggcggcgagcagagctactaccgcgcggcggccgcggcggccgggggcggctacaccgccatgccggcccccatgagcgtgtactcgcaccctgcgcacgccgagcagtacccgggcggcatggcccgcgcctacgggccctacacgccgcagccgcagcccaaggacatggtgaagccgccctatagctacatcgcgctcatcaccatggccatccagaacgccccggacaagaagatcaccctgaacggcatctaccagttcatcatggaccgcttccccttctaccgggacaacaagcagggctggcagaacagcatccgccacaacctctcgctcaacgagtgcttcgtcaaggtgccgcgcgacgacaagaagccgggcaagggcagctactggacgctggacccggactcctacaacatgttcgagaacggcagcttcctgcggcggcggcggcgcttcaagaagaaggacgcggtgaaggacaaggaggagaaggacaggctgcacctcaaggagccgcccccgcccggccgccagcccccgcccgcgccgccggagcaggccgacggcaacgcgcccggtccgcagccgccgcccgtgcgcatccaggacatcaagaccgagaacggtacgtgcccctcgccgccccagcccctgtccccggccgccgccctgggcagcggcagcgccgccgcggtgcccaagatcgagagccccgacagcagcagcagcagcctgtccagcgggagcagccccccgggcagcctgccgtcggcgcggccgctcagcctggacggtgcggattccgcgccgccgccgcccgcgccctccgccccgccgccgcaccatagccagggcttcagcgtggacaacatcatgacgtcgctgcgggggtcgccgcagagcgcggccgcggagctcagctccggccttctggcctcggcggccgcgtcctcgcgcgcggggatcgcacccccgctggcgctcggcgcctactcgcccggccagagctccctctacagctccccctgcagccagacctccagcgcgggcagctcgggcggcggcggcggcggcgcgggggccgcggggggcgcgggcggcgccgggacctaccactgcaacctgcaagccatgagcctgtacgcggccggcgagcgcgggggccacttgcagggcgcgcccgggggcgcgggcggctcggccgtggacgaccccctgcccgactactctctgcctccggtcaccagcagcagctcgtcgtccctgagtcacggcggcggcggcggcggcggcgggggaggccaggaggccggccaccaccctgcggcccaccaaggccgcctcacctcgtggtacctgaaccaggcgggcggagacctgggccacttggcgagcgcggcggcggcggcggcggccgcaggctacccgggccagcagcagaacttccactcggtgcgggagatgttcgagtcacagaggatcggcttgaacaactctccagtgaacgggaatagtagctgtcaaatggccttcccttccagccagtctctgtaccgcacgtccggagctttcgtctacgactgtagcaagttttgacacaccctcaaagccgaactaaatcgaaccccaaagcaggaaaagctaaaggaacccatcaaggcaaaatcgaaactaaaaaaaaaaaatccaattaaaaaaaacccctgagaatattcaccacaccagcgaacagaatatccctccaaaaattcagctcaccagcaccagcacgaagaaaactctattttcttaaccgattaattcagagccacctccactttgccttgtctaaataaacaaacccgtaaactgttttatacagagacagcaaaatcttggtttattaaaggacagtgttactccagataacacgtaagtttcttcttgcttttcagagacctgctttcccctcctcccgtctcccctctcttgccttcttccttgcctctcacctgtaagatattattttatcctatgttgaagggagggggaaagtccccgtttatgaaagtcgctttctttttattcatggacttgttttaaaatgtaaattgcaacatagtaatttatttttaatttgtagttggatgtcgtggaccaaacgccagaaagtgttcccaaaacctgacgttaaattgcctgaaactttaaattgtgctttttttctcattataaaaagggaaactgtattaatcttattctatcctcttttctttctttttgttgaacatattcattgtttgtttattaataaattaccattcagtttgaatgagacctatatgtctggatactttaatagagctttaattattacgaaaaaagatttcagagataaaacactagaagttacctattctccacctaaatctctgaaaaatggagaaaccctctgactagtccatgtcaaattttactaaaagtctttttgtttagatttattttcctgcagcatcttctgcaaaatgtactatatagtcagcttgctttgaggctagtaaaaagatatttttctaaacagattggagttggcatataaacaaatacgttttctcactaatgacagtccatgattcggaaattttaagcccatgaatcagccgcggtcttaccacggtgatgcctgtgtgccgagagatgggactgtgcggccagatatgcacagataaatatttggcttgtgtattccatataaaattgcagtgcatattatacatccctgtgagccagatgctgaatagatattttcctattatttcagtcctttataaaaggaaaaataaaccagtttttaaatgtatgtatataattctcccccatttacaatccttcatgtattacatagaaggattgcttttttaaaaatatactgcgggttggaaagggatatttaatctttgagaaactattttagaaaatatgtttgtagaacaattatttttgaaaaagatttaaagcaataacaagaaggaaggcgagaggagcagaacattttggtctagggtggtttctttttaaaccattttttcttgttaatttacagttaaacctaggggacaatccggattggccctcccccttttgtaaataacccaggaaatgtaataaattcattatcttagggtgatctgccctgccaatcagactttggggagatggcgatttgattacagacgttcgggggggtggggggcttgcagtttgttttggagataatacagtttcctgctatctgccgctcctatctagaggcaacacttaagcagtaattgctgttgcttgttgtcaaaatttgatcattgttaaaggattgctgcaaataaatacactttaatttcagtcaaaaa

SEQ ID NO: 1402 - DNA, 261 bp, HOMO SAPIENS
  misc_feature (77)..(77): n is a, c, g, or t
  misc_feature (115)..(115): n is a, c, g, or t
  misc_feature (126)..(126): n is a, c, g, or t
  misc_feature (141)..(141): n is a, c, g, or t
  misc_feature (143)..(143): n is a, c, g, or t
  misc_feature (145)..(145): n is a, c, g, or t
  misc_feature (157)..(158): n is a, c, g, or t
  misc_feature (234)..(234): n is a, c, g, or t
agaggtgatggtagcagacagtgcttgtcactaagtcctctcttggggtgggggcagaggtggtgaggagcaccggnttaggggaaaaggcaggcaagtgaggagcaggccgaancctgggactgnggaggatgttcgctntngnttgcaggctganntgcggaaggtaaaaactccaggccaaaggattctagaaatatgggcacaggggtcatattttcatgaaaaaataanaataaaagcacagggtgggccgggcac

SEQ ID NO: 1403 - DNA, 3113 bp, HOMO SAPIENS
cgctcagcccgggcgggcgatgcgggcggcgcgggcggccccctcccccggcccgcgtctccgggacggctgcgggcggcccccccggcggccggagggctccctggccccgatctgacggcggcggcggcggcggccacagcggcgggagcggcgcggggaaggagcagcggctcgcagccctcggcccgcgcccccacccagcgccagcccgaggggggaggcgcagcgccggagggtggcggtcctcggccctcccaggtctccgcgccgggaagccgctccgagccggggctggagggttgttttgccgttgtgttgagcacgtcacccattaagagccctttaaagacctggattgattggaaggacaaaaattaaaagcaatctgatccagcctcatgcaggatccctgcggattttctccttatcccatttccatccactgtcacaatttgagaatctgcctgatttgatcagattcacctccaggggaggtgtgataccagggttaggaggacgtgaagttatgggcaactttctgatctgtccatcagcagtctgagaaacgctggctctgaattttccgtgtcggccttttggaaacaacaagttcctcgctgtttgcaaagcttcagtgctcgggtccctgggacaccccggccaccctcgcctggtagatgtggcatttccatgctgaggccgcgagtcccgcctgaccccgtcgctgcctctccagggcttctctgggccgcgcctctgcagactgcgcagccatgctgcatctgctggcgctcttcctgcactgcctccctctggcctctggggactatgacatctgcaaatcctgggtgaccacagatgagggccccacctgggagttctacgcctgccagcccaaggtgatgcgcctgaaggactacgtcaaggtgaaggtggagccctcaggcatcacatgtggagacccccctgagaggttctgctcccatgagaatccctacctatgcagcaacgagtgtgacgcctccaacccggacctggcccacccgcccaggctcatgttcgacaaggaggaggagggcctggccacctactggcagagcatcacctggagccgctaccccagcccgctggaagccaacatcaccctttcgtggaacaagaccgtggagctgaccgacgacgtggtgatgaccttcgagtacggccggcccacggtcatggtcctggagaagtccctggacaacgggcgcacctggcagccctaccagttctacgccgaggactgcatggaggccttcggtatgtccgcccgccgggcccgcgacatgtcatcctccagcgcgcaccgcgtgctctgcaccgaggagtactcgcgctgggcaggctccaagaaggagaagcacgtgcgcttcgaggtgcgggaccgcttcgccatctttgccggccccgacctgcgcaacatggacaacctctacacgcggctggagagcgccaagggcctcaaggagttcttcaccctcaccgacctgcgcatgcggctgctgcgcccggcgctgggcggcacctatgtgcagcgggagaacctctacaagtacttctacgccatctccaacatcgaggtcatcggcaggtgcaagtgcaacctgcacgccaacctgtgctccatgcgcgagggcagcctgcagtgcgagtgcgagcacaacaccaccggccccgactgcggcaagtgcaagaagaatttccgcacccggtcctggcgggccggctcctacctgccgctgccccatggctctcccaacgcctgtgccactgcaggttcctttggcaactgcgaatgctacggtcactccaaccgctgcagctacattgacttcctgaatgtggtgacctgcgtcagctgcaagcacaacacgcgaggtcagcactgccagcactgccggctgggctactaccgcaacggctcggcagagctggatgatgagaacgtctgcattgagtgtaactgcaaccagataggctccgtgcacgaccggtgcaacgagaccggcttctgcgagtgccgcgagggcgcggcgggccccaagtgcgacgactgcctccccacgcactactggcgccagggctgctaccccaacgtgtgcgacgacgaccagctgctgtgccagaacggaggcacctgcctgcagaaccagcgctgcgcctgcccgcgcggctacaccggcgtgcgctgcgagcagccccgctgcgaccccgccgacgatgacggcggtctggactgcgaccgcgcgcccggggccgccccgcgccccgccaccctgctcggctgcctgctgctgctggggctggccgcccgcctgggccgctgagccccgcccggaggacgctccccgcacccggaggccgggggtcccggggtcccggggcggggccggcgtccgaggccgggcggtgagaagggtgcggcccgaggtgctcccaggtgctactcagcagggccccccgcccggcccgcgctcccgcccgcactgccctccccccgcagcaggggcgccttgggactccggtccccgcgcctgcgatttggtttcgtttttcttttgtattatccgccgcccagttccttttttgtctttctctctctctctttttttttttttttttctggcggtgagccagagggtcgggagaaacgctgctcgccccacaccccgtcctgcctcccaccacacttacacacacgggactgtggccgacaccccctggcctgtgccaggctcacgggcggcggcggaccccgacctccagttgcctacaattccagtcgctgacttggtcctgttttctattctttatttttcctgcaacccaccagaccccaggcctcaccggaggcccggtgaccacggaactcaccgtctgggggaggaggagagaaggaaggggtggggggcctggaaacttcgttctgtagagaactatttttgtttgtattcactgtcccctgcaagggggacggggcgggagcactggtcaccgcgggggccgatggtggagaatccgaggagtaaagagtttgctcactgctgccaaaaaaaaaaaaaaaaaaaaaa

SEQ ID NO: 1404 - DNA, 4378 bp, HOMO SAPIENS
gtgcgctcttcaggacagcagaggtcggttggaggtctgcattctctgccgacttgggccccaacttccccatcaggtcactgctccctcctctgaggtctggacaaaggacaaggctgtagggacctagactgtcctagacggggaggacatctatcctcagtggtctttccagcagtttgtttggagctgctcatcctgatcttttggctgactctggcagagggaaagtcagatttgaggcctgagctctaacaggcatccagagaggaaggaagggcccaccccgtgacatcagtgaaacggaagcaccctgcaggtgacatcactgttgctcagggcaacgcctccaccctaaggcggacggggaggtgaaaaatcggcctcaagtgtgagacgcatgttgaagggaagggacatagaaggtgtaacgttcacaggaaagctccaaccatggccatggggctcttccgcgtgtgtctggtggtggtgacggccatcatcaaccacccgctgctgttcccgcgggagaacgccacagtccccgagaacgaggaggagatcatccgcaagatgcaggcgcaccaggagaagctgcagctggagcagttgcgcctggaggaggaggtggctcggctggcggccgaaaaggaggcactggagcaggtggcggaggagggcaggcagcagaacgagacacgcgtggcctgggacctctggagcaccctctgcatgatcctcttcctgatgatcgaggtgtggcggcaggaccaccaggaggggccctcacctgagtgcctgggcggtgaggaggatgagctgcctgggctggggggcgcccccttgcagggcctcaccctgcccaacaaggccacgcttggccacttttatgagcgctgcatccggggggccacggccgatgcagcccgtacccgggagttcctggaaggcttcgtggatgacttgctggaagccctgaggagcctctgcaaccgggacaccgacatggaggtggaggacttcattggcgtggacagcatgtacgagaactggcaggtggacaggccactgctgtgccaccttttcgtgcccttcacaccccccgagccctaccgcttccacccagagctctggtgctccggccgctcagtgcccctggatcgccagggctacggccagatcaaggtggtccgcgccgatggggacacattgagctgcatctgcggcaagaccaagctcggggaagacatgctgtgtctcctgcacggcaggaacagcatggcgcctccctgcggcgacatggagaacctgctgtgtgccacagattccctgtacctggacacgatgcaggtcatgaagtggttccagacggccctcaccagagcctggaagggcatcgcccacaagtacgagttcgacctggcctttggccagctggacagcccggggtccctgaagatcaagttccgttcagggaagttcatgcccttcaacctgattcctgtgatccagtgtgatgactcggacctgtactttgtctcccaccttcccagggagccctctgagggcaccccagcctccagcacagactggctcctgtcctttgctgtctatgagcgacacttcctcaggacgacactaaaggcactgcccgagggcgcctgccacctcagctgcctgcagatagcatccttcctgctctccaagcagagccgcctgaccggtcccagcgggctcagcagctaccacctgaagacggccctactgcacctcctactcctccggcaggccgccgactggaaggcggggcagctggacgctcgtctgcacgagttgctgtgcttcctggagaagagcttgctccagaagaagctccaccacttcttcatcggcaaccgcaaggtgcctgaggccatgggactccctgaggccgtgctcagggccgagcccctcaacctcttccggcccttcgtcctgcagcgaagcctttaccgtaagacactggactccttctatgagatgctcaagaatgccccagcgctcattagcgagtattccctacatgtcccctcagaccagcctaccccaaaaagctgacgtcttttacagaatgtgggatcctcgagctaagatgagggcatccctcacgttcacacccctggtggcatctgccagccctgttctggggacaaggcgggctttcgtgggagccgtgctcagcctgccaggaagccaagccctacagtgcagaggaaacagaatttcaacgggaagctggtttgcttcataccattgggatctgctggtaaagctgttatttgggtttagggactgatcccttgcagtttacttctggatcaccatgaatggccaagatggtggcagaacacgctgtggaccctgagttagagacaatgcaaatgttggattgggtgtaattctttttgaatcccagatccagtctgtacttgaatatgagcagaggatctacaagaatgctgacagggaaccgtgttaagacccagcacccctattcccaggagcttctggcctgaccatctgcagccaaagcactaacagggacagatatgggaatgtccacctttgatccgcatcctgcacaatagtggtcccaccatggctgccacttttttatactatttggagaaaagaccttgtataaattcgaggcccgaatgactaacgtctctgtcacacggaaatgggtacttggtggcatagagaaacacaattagccactttttcagctacacttctcactcagctgcaccctacacttctcactcaggtgcacccccttctgctgtcctttccccaacgtactgggtcccgagcgtggtgggtatttgccacactgggtgccagctcagcagccccccacctctctttattctctccaaagctggtctttctgactatcattgtggtagggggaggacagatgctaaaggtggaagctgacctggagaaagagacacacggggtgactgtggcaaaggacagctggaaaagaaactctatcacttcttcattggcaaccacaaggcacctgaggccatggcactcccagaggctgtgcgcagagccaagcctctcaacctcttctggccctgcgtcctgcagcgaagtctctgctgtaagacagtagactccttcgatgaggtgctcaaaaatgctacccggggtggtggtgtctggcttgcagtctggcccagttcagagaaagttgcagagatcaggggccaaggatgtcatagccccaggttgtcctcagggtcccaatcctagggcagggtgtgcatggaagcaagaactatggaaacctagctccagtctgcaggctctgagcccctagttcctcactccagcggggctccctcactgcacagaacccaccccttctgtgtgggcactgctgaccacacagatgacccagacccaaagagcctggcagaagctctgtggttggagctgggctccgtctccaggtctggttcagggggatcaggaaggctcttttccacctgtggcttcactggccctttgagatttcctatctcaccgttacttcagttacccttgcagggggccagggagtcaagaatataccgtgttcctccagggtttaagccggccatgccttcccgagagcataaccaacttgacaggggtgcccagttaccccacaaactgaaggaaggagatccttcccccatccccaggagtgctctcaaccagcctcagaaagcttgagaagatggaccctttgcccaccagggttaattcctggtggggcagctcggctgtgatcagggcaaccaaacctataggaagccttccagtgtgagctggaattagactgaacatgtgcttgggcctgcctctccctagacgcagttgcggggcactccagggaatgaaccagctcaagtgtgtccctaacagcagcctggagctacccccaatccctcacagcctgaccctcctcattccatcagatgcatttgtagaatcggggcaaatttccttatttatttatggcccatgcctttcgccctcttcatcctgatcccgttttgctttgaagagaccccagtaaccaaaaaacagcctccagaagccaaaaccatgcctggatctcccatagcttctcctttgcttccaggagaaagttcactgaaaaaaaaatatcttctggcttcttgtgtgtacagagacaacagaactcggtggggaaacgggaatcttttctgcaccaaagctgcttctaaagcagaaagcagtggggctcttggtgtttcatgctgccttatttatattaaaggaagaattaaatcttgcaaaaaaaaaaaaaaaa

SEQ ID NO: 1405 - DNA, 4292 bp, HOMO SAPIENS
ggctgagccggaccgagccgagaggacccgagtggggccgaggccagtagccccggggccctgagcagaggccgtagcttgcgccgcacccgcggccaggcggagccaaagatgccggcctctgctgcgcggccccgcccgggtcccgggcagcctacagcctcgcccttcccgctactgctgctggcggtgctgagcggcccggtatccggccgcgtcccccgctcggtgcccagaacctcgcttccaatctctgaggctgactcctgtctcacccggttcgcagtccctcacacatacaattactctgttctccttgtggatcctgcctcccacacactttatgttggcgcccgggacaccatcttcgctttatccctgcccttctcaggggagagaccccgcaggattgactggatggttcctgaggctcacagacagaactgtaggaagaaaggcaagaaagaggacgaatgtcacaattttgtccagattctcgccattgccaatgcctctcacctcctcacttgtggcaccttcgcttttgatccgaagtgcggggttattgatgtgtccaggttccagcaggttgaaagacttgagagtggccgggggaaatgtccttttgagccagctcagcggtcagcagctgtaatggctgggggggtcctctatgctgccactgtgaaaaactacctggggacggagccaattatcaccagagcagtgggtcgtgccgaggactggattcggacagataccttgccttcctggctgaacgccccagcctttgtcgcagccgtggccttgagcccagccgaatggggggatgaagatggagacgacgaaatctacttcttctttacggagacttcccgagcatttgactcatacgagcgcattaaagtcccacgggtggcccgtgtgtgtgcgggggacctcgggggccggaagaccctccagcagagatggacgacgtttttgaaagctgacctgctctgtccagggcctgagcatggccgggcctccagtgtcctgcaggatgttgctgtgcttcgacctgagcttggggcagggactcccatcttttatggcatcttttcttcccagtgggagggggctactatctctgctgtctgtgccttccgaccacaagacattcggacagtgctgaatggtcccttcagagaactaaaacatgactgcaacagaggactgcctgtcgtggacaatgatgtgccccagcccagacctggagagtgcatcaccaacaacatgaagctccggcactttggctcatctctctccctgcctgaccgcgtactcaccttcatccgggaccacccactcatggacaggccagtgtttccagctgatggccaccccctgctggtcactacagatacagcctatctcagagtcgtggcccacagggtgaccagcctctcagggaaagagtatgatgtgctctacctggggacagaggatggacacctccaccgagcagtgcggatcggagctcagctcagcgttcttgaagatctggccttattcccagagccacagccagttgagaacatgaaattgtaccacagctggctcctggttggctcccgtactgaggtgacacaagtgaatacaaccaactgtggccgtctccagagctgctcagagtgcatcctggcccaggacccagtctgtgcctggagcttccggctggatgagtgtgtggcccatgccggggagcaccgagggttggtccaagacatagagtcagcagatgtctcctctttgtgtcctaaagagcctggagaacgtccagtagtgtttgaagttcccgtggctacagctgcgcatgtggtcttgccatgttctccaagctcagcatgggcatcctgtgtgtggcaccagcccagtggagtgactgcactcaccccccggcgggatggactggaggtggtggtgaccccaggggccatgggcgcttatgcctgtgaatgtcaggagggtggggcagcccatgtggtagcagcttacagcttggtatggggcagccagcgagatgctccgagccgggcccacacagtgggggcgggactggctggcttcttcttggggattctcgcagcatccctgactctcattctgattggtcggcgtcagcagcgacggcgacagagggaacttctggctagagacaaggtgggcctggacctgggggctccaccttctgggaccacaagctacagccaagaccctccctccccctctcctgaagatgagcggttgccgctggccctggccaagaggggcagtggctttggtggattctcaccacccttcctgcttgatccttgcccaagcccagcccacattcggctaactggggctcctctagccacatgtgatgaaacatccatctagagctgggcaaatgaccactagtgtataagtgatcactggaacggagtgaccactgagatgctgggggtcactgggcctggaagaccatcccagcctctgagttctctttgagtatgagtgattacttggattttagtatctgttctctctgagcctggatgggcttggggccagacctttgcctgattcctgattcccatgagaaatcagaactgctttctgcagcaaatcagggcttccccctaacatctgaactcctgtaaaccttcatccctggccccctatcttgggcccattagttttggggatggggcacagggcatagctatgactttgctttctggttggagcctggccggaaggaagagccctggaggtggttgggggcaaatgtgccctgagtccttggggtggttctgcttattcttcaagtttatctgaatctgtggggagtgcatgatccccatgttgcaatatggagtctctgccctgagatcttccccatctcagttttccttccatgaaagagtacgtgtaaatacatagtgttcataagagacctggccacatgtgcatgaatgactgggccgatgcttaggaatatttatgagggatggggagggagacaattggaatgggggcgttgcctgcagaactttagaccctgtagccatagagggaatggcgttcctttctaaaaggaactgaaacactgcccctctccccattgccccacaaccttactctaaatttgagtagagaaaagctcctaaagtgaccttccgggtgggaagggcagcagtacacatgaccccatccttttctttgtttttaccccctggctgccaccactgccatgtcacagctgctttctctggctggagtgtaggctgtaccccatttccttggctcccattaaaaatcaacaacattctaatgattagggaacaacagaaggggaacagtcataggatatacgagcagtataaagatacgtttgcaatcagtgactactcagggtgacacccttgccctaaagcaggagtcccccctacctggggtccatggactccctgaaattgtatgcaaaatgttgtttgtacatgtgtgtctgtatgtctctgtggggaggttttatggcttttgtcagattttcaaggccttaacaaagttaaaggaccactgccctgaggttactgcactgaggccaagttaggatggcatcactctgtggcagctctccctggacttgccctgcctggaacagggtgatttgctggaatggagttaccactgagatgccaaaggttgctgggtctggaagactgttgtggcctctcagttctctttgagtctgactgactgtggccagtccctggactggtagctgctggaggccttcttgtttctccagtccctggaagctgagctctatgtgtatttgatgacattgtcagctcttaccaaacgtcaagacctcttcctgcttgaccactcgcacatggctctaggcttctcctgctgagtcctggtcttggcctgtgaatgtgcctcgttcatccctggtgcttgagcccctcaagctccagtcaatgatccagtccttcccctttgaagttttctgctctactttccttggcagcagcctgtgaactactcaaaagagtccccttgggtttggaattatcagtggctttgccactagtaaatgtgtgatcttcggcaagtaacctaacctagggacatcagtttactcatctgcgaagtggggataataaaacctacctcagggttgcttcaaggattaaatgagaaaatatgtcaacaataaagacctgtctgtaccaatgaaaaaaaaaaaaaaaaaa

SEQ ID NO: 1406 - DNA, 347 bp, HOMO SAPIENS
cccttgagccttacgcagaggtcttgtgtgttcctagttaagccctcccacgcccgaggccccatcgcttcctctccaccctctttacccaccaatattccaagcccagatcctaattccccaccgcattaccccgccctggatttggggaatgtttttctttattttaatatagctcaaggaaaaaatacgtatatcttgagagatttggggtggggaaaacaaaagccttgcggagtagaaaaaacaaaggcttatttttataaatgtttaatgttttcaccccctggatgctccgagacgccgtaattgtgacggcggggtacgtgtgccataaatcatttagt

SEQ ID NO: 1407 - DNA, 2650 bp, HOMO SAPIENS
acaatgcgccgtcgcggccccgcccccggacgccggacgcagaaactccgccctgccgcggtccttgcgtccttccggctccgtcgtggaagcaggactgcgccgcgtcttcctcaaggttgagaacaaaaacatgcacctggagtttccccggagccctctgcgtggttgagcttcggtggaatttcggggctcttggctgccagccgcgcttgcctggtagcaacagaaaccagtcctgctcgcctccgtggacatttcattaccatccagaagtgtctcccactgaaggcatccgtggttgtttttaagccacaaaaaagccacacccaagatcacctgacacccaccctgacaagtgtccatgatgctgggccctgagggaggtgaaggctttgtggtcaagctccgtggcctgccctggtcctgctctgttgaggacgtgcagaacttcctctctgactgcacgattcatgatggggccgcaggtgtccatttcatctacactagagagggcaggcagagtggtgaggcttttgttgaacttggatcagaagatgatgtaaaaatggccctgaaaaaagacagggaaagcatgggacaccggtacattgaggtgttcaagtcccacagaaccgagatggattgggtgttgaagcacagtggtcccaacagtgccgacagcgccaacgatggcttcgtgcggcttcgaggactcccatttggatgcacaaaggaagaaattgttcagttcttctcagggttggaaattgtgccaaacgggatcacattgcctgtggaccccgaaggcaagattacaggggaagcgttcgtgcagtttgcctcgcaggagttagctgagaaggctctagggaaacacaaggagaggatagggcacaggtacattgaggtgtttaagagcagccaggaggaagttaggtcatactcagatccccctctgaagttcatgtccgtgcagcggccagggccctatgaccggcccgggactgccaggaggtacattggcatcgtgaagcaggcaggcctggaaaggatgaggcctggtgcctacagcacaggctacgggggctacgaggagtacagtggcctcagtgatggctacggcttcaccaccgacctgttcgggagagacctcagctactgtctctccggaatgtatgaccacagatacggcgacagtgagttcacagtgcagagcaccacaggccactgtgtccacatgaggggcctgccgtacaaagcgaccgagaacgacatttacaacttcttctctcctctcaaccctgtgagagtccatattgagattggcccagatggaagagtgacgggtgaagcagatgttgagtttgctactcatgaagaagctgtggcagctatgtccaaagacagggccaatatgcagcacagatatatagaactcttcttgaattcaacaacaggggccagcaatggggcgtatagcagccaggtgatgcaaggcatgggggtgtctgctgcccaggccacttacagtggcctggagagccagtcagtgagtggctgttacggggccggctacagtgggcagaacagcatgggtggctatgactagttttgttaggaacatttgagttacttcaatcattttcacaggcagccaacaagcaattaagagcagttataatagaggaagctgggggacccattttgcaccatgagtttgtgaaaaatctggattaaaaaattacctcttcagtgttttctcatgcaaaattttcttctagcatgtgataatgagtaaactaaaactattttcagcttttctcaattaacattttggtagtatacttcagagtgatgttatctaagtttaagtagtttaagtatgttaaatgtggatcttttacaccacatcacagtgaacacactggggagacgtgcttttttggaaaactcaaaggtgctagctccctgattcaaagaaatatttctcatgtttgttcattctagtttatattttcatttaaaatcctttaggttaagtttaagctttttaaaagttagttttgagaattgagacacaatactaatactgtaggaattggtgaggccttgacttaaaactttctttgtactgtgatttccttttgggtgtattttgctaagtgaaacttgttaaattttttgttaactaaatttttttcttaaaataaagactttttcacaatgactggcacagattactcagcaaaagatagcaaaacgggtggttgaagataattcattttaatcgtaatgtattttagtgtgaatttaaaaatttcatacatcaaatctatgatctcccttatattcttatgatgaggctaaataaaagtctaataaaaatgttaaatatgtgaatggtggaaatggtgactagcagcacacattctgggaagcatcaaatagacacacggccccagccacctgcaacttatgtgcactgttgtaaaccattcagaattttcctgctaggcccttgatgctggagtcacatctgttgatagctggagaactttagtttcaagtactacattgtgaaagcaattattttgtttctagtttttataaaatgctgatttaaacttttaaaaaaaaaaaaaaaaaa

SEQ ID NO: 1408 - DNA, 1827 bp, HOMO SAPIENS
tagagctgagcagttgtccgcgtgcgcaggcggaagtcccggattgaggcgccgccatttttgctgcccggacgcggagcgagaggctgagagagtcggagacactatccgcttccatccgtcgcgcagaccctgccggagccgctgccgctatggatgatcgagaggatctggtgtaccaggcgaagctggccgagcaggctgagcgatacgacgaaatggtggagtcaatgaagaaagtagcagggatggatgtggagctgacagttgaagaaagaaacctcctatctgttgcatataagaatgtgattggagctagaagagcctcctggagaataatcagcagcattgaacagaaagaagaaaacaagggaggagaagacaagctaaaaatgattcgggaatatcggcaaatggttgagactgagctaaagttaatctgttgtgacattctggatgtactggacaaacacctcattccagcagctaacactggcgagtccaaggttttctattataaaatgaaaggggactaccacaggtatctggcagaatttgccacaggaaacgacaggaaggaggctgcggagaacagcctagtggcttataaagctgctagtgatattgcaatgacagaacttccaccaacgcatcctattcgcttaggtcttgctctcaatttttccgtattctactacgaaattcttaattcccctgaccgtgcctgcaggttggcaaaagcagcttttgatgatgcaattgcagaactggatacgctgagtgaagaaagctataaggactctacacttatcatgcagttgttacgtgataatctgacactatggacttcagacatgcagggtgacggtgaagagcagaataaagaagcgctgcaggacgtggaagacgaaaatcagtgagacataagccaacaagagaaaccatctctgaccaccccctcctccccatcccaccctttggaaactccccattgtcactgagaaccaccaaatctgacttttacatttggtctcagaatttaggttcctgccctgttggttttttttttttttttttaaacagttttcaaaagttcttaaaggcaagagtgaatttctgtggattttactggtcccagcttttaggttctttaagacactaacaggactacatagaggctttttcagcattactgtgtcgtctccgtgccagatgtggcaagatcaccattagcaaatggaaattacatttgaaagccattagacttataggtgatgcaagcatctaagagagaggttaatcacactatagaggcataagtggtatcagttttcatttttctaattgtttaaactgtgttttataccagtgtttgcaagtaattgggtgttagcttgagatggttaaaggtggtttggggagggacttcgttgtaatggttttgctgtaaaaaatgtttccaactccgctgaaatgttgctgaaaagcatggtgctggtaacagttcaacaatccgtggctgctcattcttgcctactttactctcccactgaagcaggttagcgttgaaggtggtatggaaaagcctgcatgcctgttcaattcttttgtttcttctccttccccctccccctacctccttcccctcactcctcccctccttcgctcgctcaacctcttttgttcagtatgtgtaacttgaagctaatttgtactactggatatctgactggagccacagatacagaatctgtattgttcttactgaaacacagcatggaattaacattaaacttaaataaaacaaacctaaattaaaaatgccaa

SEQ ID NO: 1409 - DNA, 5793 bp, HOMO SAPIENS
ggcagggccggaaggagtgcagcggctgccacggagctcgcagctgcggcttctgaggagtaagcggcgcggtagcgaaggccgccgaacctgcctggctagccggcgacttgagtgacgactcttttgaaacagatggtcaccatgtttagatattagcagtcccatatatgcatgtctgcatttgaaaatggaagagggaaacaacaatgaagaggtaattcacttgaacaactttcactgccatcggggacaagagtggatcaatctccgagatgggcccatcaccatatctgactcctcagatgaggaaaggattccaatgctggtcaccccagctcctcagcagcatgaagaagaggacctggatgatgatgtcatcctgacagaaacaaataaacctcagagatcacgacccaatctcatcaaaccagctgcccagtggcaagatctgaaaaggttgggagaagaaaggcctaaaaagtctagagcagcatttgaatcagataagagcagctatttttcagtgtgtaacaacccattgtttgattctggggcacaggatgattctgaggatgactacggtgaatttctggatcttgggcctcctggaatctctgaattcactaagccaagtggccaaacagaaagagaacccaagcctggaccgagtcataaccaagcagcaaatgacattgtcaaccccagatcagagcagaaagtcatcatcttggaagaaggtagccttctttacacagaaagcgatcctttggaaactcagaaccagtcatccgaagactcagagacagagctgttatcaaatctaggagagtcagctgctctagcagatgatcaggccatcgaagaagactgctggttagatcatccttacttccagtctctgaaccaacagccccgtgaaataacaaaccaggtcgttcctcaggaacggcagcctgaagcagaactgggccgcttgttgtttcagcatgaattcccagggcccgcttttccaaggccggaaccccagcaaggtgggatttcaggcccctcttctcctcagcctgcccatcctctaggagagtttgaagaccagcagttagcaagtgatgatgaagagccaggtccagcctttccaatgcaagaatctcaagagcccaatttggaaaacatttgggggcaagaagctgcagaggtagatcaagagctcgttgaactactagtgaaagaaacggaagcaagatttccagatgtagcaaatgggtttattgaggaaataattcattttaagaattattatgatctgaatgtactttgtaattttcttctggaaaacccagattatccaaagagagaagacagaatcattataaatcccagtagcagtctgctggccagccaagatgagacaaagttgcctaaaatagacttttttgactattctaaattgacccctcttgaccagcgctgcttcatccaagctgctgacctcctcatggccgacttcaaagtgctcagtagtcaggacatcaagtgggccctgcacgagctcaaaggacactatgcaatcacccgaaaggccttgtctgatgccattaaaaaatggcaggagctgtcaccagaaaccagtggaaaaaggaagaagagaaaacaaatgaaccagtattcttacattgatttcaagtttgaacaaggtgacataaaaatagaaaagaggatgttctttcttgaaaataagcgacgacattgtaggtcctatgaccgacgtgctctccttccagctgtgcaacaagagcaggagttctatgagcagaaaatcaaagagatggcagagcatgaagactttttgcttgccctacagatgaatgaagaacagtatcaaaaggatggccagctgattgagtgtcgctgctgctatggggaatttccattcgaggagctgacgcagtgcgcagatgctcacttgttctgcaaagagtgtctcatcagatatgcccaagaggcagtctttggatctggaaagttggagctcagctgcatggaaggcagctgcacgtgttcgttcccaaccagtgagctggagaaggtgctcccccagaccatcctgtataagtactatgagcgaaaagccgaggaggaggttgcggcagcctacgccgacgagcttgtcaggtgcccgtcctgtagctttccggctctgttggacagtgatgtgaagaggttcagctgtcctaatcctcactgccgaaaggaaacctgtaggaagtgtcagggactctggaaagaacataatggcctcacctgtgaagagctggctgaaaaagacgacatcaagtaccgtacctctattgaagaaaaaatgactgctgcccgcattagaaaatgccacaagtgtgggactggcctcatcaaatctgaaggctgcaaccgcatgtcttgccgctgtggtgcccagatgtgctacctctgtcgagtttctattaatggatatgaccatttctgccaacatccccgctcaccaggagccccttgccaggagtgttcaagatgctctctctggaccgatcccactgaagatgatgagaagcttattgaggaaatccagaaggaggctgaagaggaacagaaaagaaagaatggagagaacaccttcaaacgcattggacccccgctggagaagcctgtggagaaggtgcagagggtggaggccctcccgaggcccgttccgcagaacctgccacagccacagatgccaccctatgccttcgcgcacccacccttccccctgcctcccgtgcggcctgtgttcaacaacttcccactcaacatggggcctatcccagccccgtacgtgccccctctgcccaacgtgcgggtcaactatgacttcggtcccatccacatgcccctggagcacaacctgcccatgcactttggcccccagccgcggcatcgcttctgatggccccgaatccccattgagcagcacaaagcccgtttggggtaggagtgtggatggagaaccctcccccaaggctggtgtctgtaccattgcatcctaagtcagcttgaagggtaggctggttttcttcccacccctttcctagaagggctactgctcctggaagagtggacggatccataataaagacgtcccaaatggtggagttcggagagagctgcgatgtgaactgcccctcccctcgcatcccccaggccaccaacggcagtccttctgccttgtccatggcataggccatagaccaggtccctgctgctcacacctgggcctctcctcggagccgacccctgggtagcaaggcagccgagagcatctccctggaggggcccacggttgggccaagggcagagggggctgcacctgcgggcctgggaagcattgctcagggtggggggctgggaccatggcccgcagaggcactgccacagctgtgagggccaagatgctgtccccccatccaaaacccgtgcgccactgcagtgagtgttgagggcacctctcctcccctcttacacctactcagatgaggcagcagcagacccatctcgcggcgggggttttgttctgttgccgcctaactttctcatcctcggtctctggaaagtcaggctgagaaatcctttcccaggccaggccgctgcggtacactggatggttctgaagctggcccattgaaagagcctcttaaggcagctgggacagaggcctggtggccctgctgggcagcccaactgctgggggagacgtttctgccaccctgggtgatgagcagcttttcccccctggctttctgggggaggagtgggcctccttagggagacaggtgaccctgggtgccacccctgccccgtgtgtgccccgggtgttctcagtggttgctgaaggcaggtagagggtgctgtccagtatcccccatgtgaaggtcacttcccttctcatggagtcagctgagcatcagctcagccctgccatgtccccactcaccctcctcgcctcctgtccggccctgggtttctagcggtgcctgaggcatcactctggcccattgacagatgagaggtctgaagccttcctggccacaggcatcactttctcctcctcctcatgccctgccttgtccttgtcgtgttgccatggggttctgagaggctgggagttcacagacctcagacacagctgagtccgacaaccattggggtggggctgcatcagtctccggagtggcccgccacctcctgaagcagggcctggcccacccaaggtgcctggggcaggcgggcaccgtcattcgctgccattggcttctcagatgtatttcaaggactaaagtgggctctaagatctaagatggcccggcgcggtggctcccgcctgtaatcccagcactttgggaggccgaggcgggcggatgagttgaggtcgggagtttgagtccccgtctctactaaaaatacaaaattagccggacaaggtggcgcatgcctataatcccaggtactcaggaggctgaggcaggagaatcacttgaacctgggaggcagaggttgcagtgagccaagattgtgccactgcactccagcctgagcaacaaaagcaaaactctatctttaaaaaaaaaaaaaaaaaaactaagatacccattctttctgcctttgcccaggatggaggctttgaagacaggtggtcacctggacctggggtaagggtgcgcagggaggccgggcttgggggcagcctgctgctatgtccttgctggcgcccatacctgttggactgcctgaactttgctactagcctgaacgacagtgccttggaaaggcaggctccatgcggcagcaacaggattgtcttcggtaccttaaatatgctccctgtgcttccccagggaggatctctgggagcagagggcggctgtagacatcacagctgaagaggtgacctcaggccctgggagcctcagctccctctgccctgtaccctaggcacgtggctccagcaagagccccaggcaggacaaagggagcaggcagcagctgcagaaacagccctagacaggtgctggcctcaaccctggcaggggagggggagcccagagtgatgtttctcctaaggccaaaccccaggggtgggtcatttgagaggagttccagctgttctggccacactgggctggtggggaaggagcggcggcctctttccttggagggtccctgattcctgaggatcctccccgagccaggcacgggggaccacagggctgccgtgagcacccaccctggttctccaggcccctctgtccagaggcagggcctgaacctcgggctcctgcctggaccagtgacagcattggggagagaagcactgggggtcttcagaccagccagcaaggggccgtgccagtgcccagagagcaggtcagacaacaggcaaccctgaggcagctggctccctctctctgccctgcagggcttgccgcagggcgtgaggctccccagccacagccccctcttacttgccttaaaactggagagaggaatctagtatttgcacttagcaaaatatttaaaaactgaaaaaaatgtgcatgatctgtcactttgtataaaaacaagaaacgattagttcattaaactttttctttaccttctggtagtaaaaatagataaaataattccgtttcaactactgtgtgtaaaaagcctgtatcatatgtaactgggacttttgtaaataaatgtttgtgcgctctgctcaaaaaaaaaaaaaaaaaa

SEQ ID NO: 1410 - DNA, 344 bp, HOMO SAPIENS
gtggtttgggtggcattgtcacaccctcggctttctagattaacccagttaccttttagcagtgccccacttccccagtagcaatggttcaggggtaggcacctgacccagaccagactactgagataaagatgtttgcctaggctttttcaggagcaattgaagacatcttgttggagatagtgtgctgggaggagtcacattctgaacttgctgcagctcgtttttctaatataaaggaaccagcctgaggcagtaccagggtgagagggagtctattggagcccttgggaacttctggatcaaattggacctgaattgagatctatttctcagctttcact

SEQ ID NO: 1411 - DNA, 6312 bp, HOMO SAPIENS; identical to SEQ ID NO: 446

SEQ ID NO: 1412 - DNA, 1425 bp, HOMO SAPIENS
agtttaagagccatttcagttattattgtacctagtaacagtattcgttaacagcatttctgtataatgtgaagaagcaactgtatttgaattaaaaatcactgctaaagaatatatttgagtcatacagtttctaagggtacaacctgtgaagtcagacttcctgagttcagatctctcagccataactagctatctgaccttggccaagtatgctcaaagtcacaaaaccttagtttccttatgtgcatgatgattataataccttttgtacagttatgaggaaacttagacaatgcctgtgttgtatggtaagcgttttcataaatgctgcctacctgtaagtagcattatagtgtgtagttattggttaatttcctttttctttaccagaagtgtgggttttgcccagcctttatacaacttcagtatttctggttaatctgtctctctatggctctaaacttttcagagtggtgggggagttaccaacacttttgtaaaaggccagatagtaaatgttttatgctttatgtagtctctgttgcaagtactcaattctgtaattatagcgtgaaagcggccacagacttgtaaatgaatgagtacagctatgttctaataaaatttttatttacaaaaccatgtggtggactggatttggcctttgggccatattttgctgaccctgttttaaaccataagcttttctaagaattttttttttaatcccaataatgaagttacatagaaaatacttaatggtgtgtgaagagaatggtaatatgaaaatacagtcagtggctggtattttggcatctttttcttcagacaagctctttaaactcgcatatgttattcacacatgcctctttaacaattatgacaaaaatattcttcctggcttgcattctgtcacaatctgtgcagtatatagggcttaaggtattgtggaagagcttatgtagatcaatcatctgtgttaaaaaaaaaaaaaaacccaaaaaacaaacaaaaaaaacctttgacctcagcagacacatagaggcacaattaactgctagttttgcaggaatatggttttacttcctgttcagatttataatagactctacctccattagcttagactgtttttttgtcattgttggtcaggttagtatttcgattaatagtatcctgagtcttaactcttcatttcacactagttttgacactttagttgccctgtctttcatacttcttgtttttgttttgagacagagtctggccctgccgctcaggctggagtgcagtggcacgatcacggcacactgcagcctctacctcctgggcccaagcagtgctctcgactcaggcatgcccaactcagtagctgggactacaagtctcactatattgcccgggttggtcttgaacccctga

SEQ ID NO: 1413 - DNA, 2812 bp, HOMO SAPIENS
agcgagctcctcctccttcccctccccactctccccgagtctagggcccccggggcgtatgacgccggagccctctgaccgcacctctgaccacaacaaacccctactccacccgtcttgtttgtcccacccttggtgacgcagagccccagcccagaccccgcccaaagcactcatttaactggtattgcggagccacgaggcttctgcttactgcaactcgctccggccgctgggcgtagctgcgactcggcggagtcccggcggcgcgtccttgttctaacccggcgcgccatgaccgtcgcgcggccgagcgtgcccgcggcgctgcccctcctcggggagctgccccggctgctgctgctggtgctgttgtgcctgccggccgtgtggggtgactgtggccttcccccagatgtacctaatgcccagccagctttggaaggccgtacaagttttcccgaggatactgtaataacgtacaaatgtgaagaaagctttgtgaaaattcctggcgagaaggactcagtgatctgccttaagggcagtcaatggtcagatattgaagagttctgcaatcgtagctgcgaggtgccaacaaggctaaattctgcatccctcaaacagccttatatcactcagaattattttccagtcggtactgttgtggaatatgagtgccgtccaggttacagaagagaaccttctctatcaccaaaactaacttgccttcagaatttaaaatggtccacagcagtcgaattttgtaaaaagaaatcatgccctaatccgggagaaatacgaaatggtcagattgatgtaccaggtggcatattatttggtgcaaccatctccttctcatgtaacacagggtacaaattatttggctcgacttctagtttttgtcttatttcaggcagctctgtccagtggagtgacccgttgccagagtgcagagaaatttattgtccagcaccaccacaaattgacaatggaataattcaaggggaacgtgaccattatggatatagacagtctgtaacgtatgcatgtaataaaggattcaccatgattggagagcactctatttattgtactgtgaataatgatgaaggagagtggagtggcccaccacctgaatgcagaggaaaatctctaacttccaaggtcccaccaacagttcagaaacctaccacagtaaatgttccaactacagaagtctcaccaacttctcagaaaaccaccacaaaaaccaccacaccaaatgctcaagcaacacggagtacacctgtttccaggacaaccaagcattttcatgaaacaaccccaaataaaggaagtggaaccacttcaggtactacccgtcttctatctgggcacacgtgtttcacgttgacaggtttgcttgggacgctagtaaccatgggcttgctgacttagccaaagaagagttaagaagaaaatacacacaagtatacagactgttcctagtttcttagacttatctgcatattggataaaataaatgcaattgtgctcttcatttaggatgctttcattgtctttaagatgtgttaggaatgtcaacagagcaaggagaaaaaaggcagtcctggaatcacattcttagcacacctacacctcttgaaaatagaacaacttgcagaattgagagtgattcctttcctaaaagtgtaagaaagcatagagatttgttcgtatttagaatgggatcacgaggaaaagagaaggaaagtgatttttttccacaagatctgtaatgttatttccacttataaaggaaataaaaaatgaaaaacattatttggatatcaaaagcaaataaaaacccaattcagtctcttctaagcaaaattgctaaagagagatgaaccacattataaagtaatctttggctgtaaggcattttcatctttccttcgggttggcaaaatattttaaaggtaaaacatgctggtgaaccaggggtgttgatggtgataagggaggaatatagaatgaaagactgaatcttcctttgttgcacaaatagagtttggaaaaagcctgtgaaaggtgtcttctttgacttaatgtctttaaaagtatccagagatactacaatattaacataagaaaagattatatattatttctgaatcgagatgtccatagtcaaatttgtaaatcttattcttttgtaatatttatttatatttatttatgacagtgaacattctgattttacatgtaaaacaagaaaagttgaagaagatatgtgaagaaaaatgtatttttcctaaatagaaataaatgatcccattttttggtatcatgtagtatgtgaaatttattcttaaacgtgactactttatttctaaataagaaattccctacctgcttcctacaagcagttcagaatgccatgccttggttgtcctagtgtgaataattttcagctactttaaaattatattgtactttctcaagcatgtcatatcctttcctattagagtatctatattacttgttactgatttacctgaaggcaatctgattaatttctaggtttttaccatattcttgtcatcttgccaattacattttaagtgttagactagactaagatgtactagttgtatagaatataactagatttattatggcaatgtttattttgtcattttgcttcatctgttttgttgttgaagtactttaaatttcatacgttcatggcatttcactgtaaagactttaatgtgtatttcttaaaataaaactttttttcctccttaaaaaaaaaaaaaaaaaa

SEQ ID NO: 1414 - DNA, 1958 bp, HOMO SAPIENS
ggcgggagtcgccggggcttcttcctgtggtgcagcttcgggtctcggagtttggcccctactctgaccccaccccagctccgctccgccttgggttccggcagaacccgccttgcggtagccatggcagcaggctccgaggcgaccactcctgtgatcgttgcggctggggctggaggggaggaaggtgaacatgtcaaaccttttaagccagagaaagcaaaagaaattatcatgtctttacaacaacctgcaatcttctgtaacatggtgtttgattggccagcacgacactggaatgctaaatacctttcgcaggtccttcatggcaagcagatacgattcagaatggggatgaaaagcatgagcacagttcctcagtttgaaactacatgtaattacgtagaagctacactcgaagagtttctgacctggaactgtgaccagtctagtatttctggaccatttagagattatgaccattccaagttctgggcttatgctgactataaatattttgtcagtctatttgaagacaagacagatcttttccaggatgtgaaatggtctgacttcgggtttcctggaagaaatggacaggaaagtacattgtggattggctccttgggagcccacacaccctgtcatctggactcctatggttgtaacttggtattccaggtacaaggaaggaaacgatggcatctctttcctcctgaagatactcctttcctttatccaactagaatcccttatgaagaatctagtgtgttcagtaaaatcaatgttgtcaatcctgatttaaagcgttttcctcagttccggaaagctcaaagacatgcggttacactgagcccaggacaggttctctttgttcccagacactggtggcattacgtagaatccattgatcctgtcactgtcagtataaactcatggattgaactggaagaggatcacctagcccgggtagaagaggcaatcacccgtatgcttgtgtgtgccctgaaaactgcagagaatccacaaaataccagagcctggttaaaccccactgaggttgaggaaacgtcccatgcagtcaactgttgctacttaaatgcagctgtttctgcattttttgatcgctgcagaacatctgaggtagtagaaatccaagcactgagaacagatggagagcacatgaaaaaggaagaattaaatgtgtgcaaccacatggaggtgggccaaacaggtagccagaacttgaccacaggaacagacaaaccggaggcagcaagtccctttggccctgatctggtccctgtagcacagaggtccgaagaaccgccttcagaaagaggaggcatatttggaagtgatgggaaagactttgtggacaaggatggagaacactttggaaaattgcattgtgccaagagacaacaaataatgagcaacagtgaaaatgcaattgaggaacagattgcctcaaatactactacgactcctcaaacattcatttctacggatgacttgctggactgcttggtgaatccacaagtaaccaggatagtggcacaacttttgatacaaggaagaagtttatgattcaagtggaagatgacttttaaaataatattttttaaatatatatttttaagtagtatgactaaaataaagatgaaccagcaaaaggtcagtttgcacatttgtaaatgtatttatccttaccgaattacatgtcagtctgttgccaccttctttcatgcacattcctctttggccaaactggctgctctttgtttgtaagcttttgttcctctctcatcccatacttttagcctgtgtcaaatgtaagtcccaagtatttccagcaggaagtaatgtcttcctcagcctcaaccagggaccaaccggctgcttacttttgcaaataaaattttactagaacacgaacaaaaaaaaaaaaaaaaaaa

SEQ ID NO: 1415 - DNA, 3209 bp, HOMO SAPIENS
ggaagggaagggggaggtgccgaggctgcgcgccggctgctcctccccacccccagcctttgccctgaagggggctggatgggcaaggcggccgcgatggctcgagctcgggcggtggcggcggtggccggaggcggcggtgcctcctcctcctcgccccggcgccggcggtgatccgagcgagcggccgcggcccccgatgagactgctggcgggctggctgtgcctgagcctggcgtccgtgtggctggcgcggaggatgtggacgctgcggagcccgctcacccgctccctgtacgtgaacatgactagcggcccgggtgggccggcggcggccgcgggcggcaggaaggagaaccaccagtggtatgtgtgcaacagagagaaattatgcgaatcactccaggctgtctttgttcagagttaccttgatcaaggaacacagatcttcttaaacaacagcattgagaaatcgggctggctatttatccaattatatcattcttttgtgtcatctgtttttagcctgtttatgtctagaacatctatcaatgggttgctaggaagaggctcaatgtttgtgttttcaccagatcagtttcagagactgcttaaaattaatccagactggaaaacccacagacttcttgatttaggtgctggagatggagaagtcacaaaaatcatgagccctcattttgaagaaatctatgccactgagctttctgaaactatgatatggcagcttcagaaaaagaaatacagagtccttggtataaatgaatggcagaatacggggttccagtatgatgtcatcagctgcctgaacttgctggaccgctgtgatcagcccctgactttgttaaaagatatcagaagtgtcttggagccaactagaggcagggtcatccttgcccttgtcctcccctttcatccctatgtggaaaacggtggcaagtgggagaaaccatcagaaattttggaaatcaaaggacagaactgggaagaacaagtgaatagtctgcctgaagttttcagaaaagctggttttgttatcgaagctttcaccagactaccatacctgtgtgaaggcgacatgtataatgactactacgttctggatgacgctgtctttgttctcaaaccagtataaacacgtggaggtcgaagtcttcagagtccgcaccctccgggatgtgcccttggaagagggtctgtgttcacaattacgtgaagggaggacccttggggaccgccattctaaatatcatgtaggaatttaaaaagccaaaatactaattatttctttgtagtgtgtaaaggaatgtttttaaaagacaaaaacccaactctttgtggatttttatcaactctttactcagagccactctccaatgcaggtcacactccaattatgatggaagatattttttatacttaattgcagtagggactcattcccagacaaagcaatagtcacgacttcatggaaccaatcaatggattgttttttgaagactggcaataaagctgtccattcaattccaaatactggttttaaggtatagccactgatattctttcatgtttagaaattctttctgttattattcaagaaaatgtttttaatcatgctaataaacttttttggagatgactttggcatcatgtttgaattcatataaagctcccctagcattttttattggtttggcttcaggagtacccaaatagtagcattatgagaatgacgcagacaatttgaataggggggaaggaaggcttcagacttgggggaaggggagattattgcaaattgcagtgaacactgagtcagtaaaaaaaaaaaacagaaacaaaaacccagcctcattcagatacagaacttcagggacccctccccccacccccccagttaatgctgctgtgaaaaatgcaaaataacctggttctgactttgtgatcactcatgtcccatacactgaactttgtttttttctggacaatctcaggttctcagaattgaaacattcagttttgtctactgacaaaatgcaactaaaaatgttttaattcaacttcttactctacacttatatacctctctcccagagcttggctcttccctgaaatccttaaaggagtttattatttgccaagaatatggtttgatgaagaccgtgtcagactcatgcattctggaatccgtgagtgcctccaaccataaacccagaaatgctgccatagaggaacccattagcaagatcaataaccatcgtggatattccaaagagcagagcatttaacccagaatctgaaatctcagtaataacagaaatgtcaatatgagattgtggttattaacaatatgttatcctcactactttatttcttttttcatccaggtgtttcattaagtattctcatttatatgctcatagaagtcatcagatcaacacattcactccaacacctgggtataaaggcgaattaaaacctgaagaattactttattattcattaagaactgcattcccacatcctcacaccaatatcttccactgttactgtgcagtcataataagagttgggttatgtgatttatgcaaaattgttattggtgtgttctaatgatttttttccaggaattcaagtaagtgaagtacaaatacttagcaccatagattgtaaaaatagaaagaggaaatgagaaaacttaatgtcgttcttgtacagttgagttttgcttctttataaactgtctgttaaaatcaggggttgctgttagactgtcaagcagaagtgatggatgttcaaggaggcaggttgccccaaagtgttttctaactttcaagtagagaactttatgctctaataagaaaaatacaactcattcttaaccacccccccaaaacagagaaaacacatacatttatgcattttaaagataaaaagtagtttctcaaaaaaatctgaagttctctgaaaaccagcttattaaaagtgctgttttgtggtgaaaattgaaaccaaatccactcacatttcctatcgggtcttgaaattcttggtggtgtgtcaccattccactagatggcagtgttgcttactgagtgtcaatggcttttttccccgtaaatggaatcatgtttttctcccccaaagtacaataaagctgccttgtctgcaccaaaaaaaaaaaaaaaaaa

SEQ ID NO: 1416 - DNA, 2929 bp, HOMO SAPIENS
gcggcttgttgataatatggcggctggagctgcctgggcatcccgaggaggcggtggggcccactcccggaagaagggtcccttttcgcgctagtgcagcggcccctctggacccggaagtccgggccggttgctgaatgaggggagccgggccctccccgcgccagtccccccgcaccctccgtcccgacccgggccccgccatgtccttcttccggcggaaagtgaaaggcaaagaacaagagaagacctcagatgtgaagtccattaaagcttcaatatccgtacattccccacaaaaaagcactaaaaatcatgccttgctggaggctgcaggaccaagtcatgttgcaatcaatgccatttctgccaacatggactccttttcaagtagcaggacagccacacttaagaagcagccaagccacatggaggccgctcattttggtgacctgggcagatcttgtctggactaccagactcaagagaccaaatcaagcctttctaagacccttgaacaagtcttgcacgacactattgtcctcccttacttcattcaattcatggaacttcggcgaatggagcatttggtgaaattttggttagaggctgaaagttttcattcaacaacttggtcgcgaataagagcacacagtctaaacacagtgaagcagagctcactggctgagcctgtctctccatctaaaaagcatgaaactacagcgtcttttttaactgattctcttgataagagattggaggattctggctcagcacagttgtttatgactcattcagaaggaattgacctgaataatagaactaacagcactcagaatcacttgctgctttcccaggaatgtgacagtgcccattctctccgtcttgaaatggccagagcaggaactcaccaagtttccatggaaacccaagaatcttcctctacacttacagtagccagtagaaatagtcccgcttctccactaaaagaattgtcaggaaaactaatgaaaagtatagaacaagatgcagtgaatacttttaccaaatatatatctccagatgctgctaaaccaataccaattacagaagcaatgagaaatgacatcatagcaaggatttgtggagaagatggacaggtggatcccaactgtttcgttttggcacagtccatagtctttagtgcaatggagcaagagcactttagtgagtttctgcgaagtcaccatttctgtaaataccagattgaagtgctgaccagtggaactgtttacctggctgacattctcttctgtgagtcagccctcttttatttctctgagtacatggaaaaagaggatgcagtgaatatcttacaattctggttggcagcagataacttccagtctcagcttgctgccaaaaagggccaatatgatggacaggaggcacagaatgatgccatgattttatatgacaagtacttctccctccaagccacacatcctcttggatttgatgatgttgtacgattagaaattgaatccaatatctgcagggaaggtgggccactccccaactgtttcacaactccattacgtcaggcctggacaaccatggagaaggtctttttgcctggctttttgtccagcaatctttattataaatatttgaatgatctcatccattcggttcgaggagatgaatttctgggcgggaacgtgtcgctgactgctcctggctctgttggccctcctgatgagtctcacccagggagttctgacagctctgcgtctcagtccagtgtgaaaaaagccagtattaaaatactgaaaaattttgatgaagcgataattgtggatgcggcaagtctggatccagaatctttatatcaacggacatatgccgggaagatgacatttggaagagtcagtgacttggggcaattcatccgagaatctgagcctgaacctgatgtaaggaaatcaaaaggatccatgttctcacaagctatgaagaaatgggtgcaaggaaatactgatgaggcccaggaagagctagcttggaagattgctaaaatgatagtcagtgacattatgcagcaggctcagtatgatcaaccgttagagaaatctacaaagttatgactcaaaacttgagataaaggaaatctgcttgtgaaaaataagagaacttttttcccttggttggattcttcaacacagccaatgaaaacagcactatatttctgatctgtcactgttgtttccaggagagaatgggagacaatcctagacttccaccataatgcagttacctgtaggcataattgatgcacatgatgttcacacagtgagagtcttaaagatacaaaatggtattgtttacattactagaaaattattagttttccaatggcaataacccatttatgagagtgttttagcctactggaatagacagggaccacatcctctgggaagcagataagcatagaactgatacttgatgcacactcgtagtggtaactcatccctaatcagcattgtaaagcaggtgccagaggtggtttgctttgtccttccaaagcaggtgagtcagccccaccgagagccaggcagctttgagtggcagcgtggtgctagcagcttcagcggaacagggtgagagttaattatgcagtcttcttgacagcggcattaatttggaaggaaactgacaagtcatgggtcaagtttcagtgacttcctccttcctctgatggcagtatatagttttcacattttaattcctcctcctgagatgcactatacttaaaaccattctctcccctgctaacagaagggtgtgaatctggtttactttgagcattaggatttgcccctttggaattctgcactccagttacttaactttcccttcagaatacatgtggaaaaaaaaaaaaaaa

SEQ ID NO: 1417 - DNA, 11412 bp, HOMO SAPIENS
gacaggtcgaggcggggaggcggcggcggcggctgcagagccaggcgcccaagacggagaccccatggggaacgctccgagtcacagcagtgaagacgaagcggcagctgccggtggcgagggctggggcccacaccaggactgggccgcggtctcgggcacgacccccggcccgggcgtcgcggctccagcgctaccacccgccgcggcgctgctggagccggccaggctgcgagaggctgctgcagcgttgctgcccacacccccctgcgagtcgctggtgtcgaggcatcgcggcgcgttgtttcgctggctggaagagcggctgggccgcggcgaagagtctgtcactctggagcagttccgggagctgctggaggctcgcggcgccggctgctctagcgagcagttcgaggaggcctttgcccagtttgatgctgagggtgatgggacagttgatgccgagaacatgttggaggccctcaagaattccagtggagctaatcttcagggggagctgagccacatcatcagacaactacaggcctgctctctggttccaggtttcacagacatattttcagagtcgaaggagggccttgatattcactcgtcaatgatactgcgcttcctgcaccgcaatcggctctccagcgcggtgatgccctacccgatgctggagcactgcaataacatgtgcaccatgcggtcttccgtcctgaaggagtctctggatcagctggtacaaaaggaaaaggaaagccctggagatctaactagaagtccagagatggataaactcaagtcagtagcaaagtgctatgcttatatagaaacatcctccaactcggcagacattgacaagatgacaaatggagaaacctcatcctactggcagtcagatggcagtgcctgttcacactggattcgtttaaaaatgaagccagatgttgtgcttaggcacctgtccattgcagtggctgccactgaccagagctacatgccacagcaggtgacagtagctgtagggaggaatgccagcgatcttcaggaagtccgagatgtgcacatccccagcaatgtcactggctatgtgacgctgctggaaaatgccaacgtcagtcagctctatgtccagattaacataaagcgttgtcttagcgatggctgcgacactagaattcatggtctcagggctgttggctttcagagagttaagaagtctggggtctcagtctcagatgcttctgcaatatggtattggtctctgctgacatctctggtgacggcttctatggagacaaatcccgcctttgtccagacagtgctgcacaatactcagaaggcgctgcggcacatgcctccactctctctctcaccaggatctacagatttctcaactttcctctcccctaatgtgctggaagaagtggacagtttcctcataaggataactagctgctgttctaccccagaggtagaactgactcttctggcttttgctctcgcaagaggaagtgttgccaaagtcatgagctctctatgcaccatcactgaccatctggacacgcagtatgatgcctcatccctcatcttgtccatggcgtcagtcagacagaacctgctcctcaaatatggtaaacctctccagttgactcttcaggcatgtgatgtcaaaggaaaagaagataagtctggacccgaaaacctccttgttgaaccgtggacaagggatggttttcttacggaaactggaaaaaccagagccagcactattttttctaccggaactgaatctgccttccaagttacacagataagaattatggttcgacgtggtggcattggtgcccagtgtgggttggtgtttgcctataactcatcttcagataaattttgtgcggaagaacacttcaaaaggtttgaaaaatatgacaaatggaagcttcaggagctcaggcaatttgtaaaaagcaggattggttgctcatctgatgaccttggagaggatgatcctattggctggtttgaactggaagaagaatgggatgaagcagatgtgaagctgcaacagtgcagagttgccaaatatttgatggtgaagttcctctgcacccgtcaggagtcagcagagcgcttgggagtgcaaggcttgaccatcagtgggtacctccggcctgcaagagcagaagcagaacagagcgtcacctgtgcacactgcagaaaggacacagaggagagtgtctgtggggccacgttgctcctcaggacccttcagtttatccagcagctcgcccatgacctggtgcagcagaaggaaagtggcttaaaatataaatcttttctggacttcgcgggtcttgatttgcagatcttctggaatttttacagtaaattaaagcaaaacccgagggaagaatgcgtctctgcccaaaccctgcttctgcagctactccagagctgcttctctgtgctgcagggagatgtactggctgcttctgaggaggaaaaggctccaatccaaagccctaaaggagtagaggctgccaaggagctgtacacacacttgtgtgatgtggtggacaaggtggatggagactctgtgcccatggagatactaaaacaagaagtcaggaatacccttctcaatggggctgccatcttctttcctaatcgacagacccgacggaaccatctcttcaccatgatgaatgtcaccgagcaggagcacaagcagtccctgcagctcactttccgttcactgtgcacgtattttagtgacaaggatccaggcggccttcttcttttacctgagaagaacgacctggccaagatgaacatcagtgaagtcctggcggtcatggacactctcgtctctgttgctgctcgagagtgcgagctgttaatgctcagtggggccccaggggaggtgggctctgtgctcttctccctgttctggtccgtccaaggcagcctgctatcctggtgctacctgcagctgaagagcacggactctggagccaaagatcttgccgtggaccttattgaaaaatatgtgggccagtttctggcaagcatgagagcgattttggaatcccttttctcacagtacagtggaaaaaccatagtagaaagattatgtaactcagtgttttcaatggcagctcgtcaactggttatcttcctgctggacttctgcactttagacatcccacactgcgtgctcttgagagagttcagcgtcctcacagaactcctgaagaagctctgtagtggccccgaaggaggactgaggaagctggatgttgagacctggcaacaggaacagcctgtggtgttacatacgtggacgaaggaatctgcccacaactatgaaaataattgccatgaggtatccgtctttgttagcccaggggcaacctattttgaagtggaattcgatgacaggtgtgaaactgaaaaaaggtatgattatctggaatttaccgacgctagaggtcggaaaacacgctatgacacaaaagttggcactgataaatggcccaagaaagtgaccttcaaggccggtcctcggttgcagttcctctttcactctgacagcagtcacaacgaatggggctacaaattcactgtcactgcctgtgggctgcccgatgttgccgtgtcttgggggctggatttacagctcctcgtctcccggctgatgggacgcctggcttcccagtgcatggcgctcaagtctgtgcgccagttaggaagtaacatggtagtacctcaggcaaaaatggcattagtcctaagctccccactgtggaaacctgtcttcaggcatcaggtttgtccagagttggaattagaagcaagctggcccactcacccacaccggaatagtaaggaggttaagaacattcctgacgacccctgccgccattttcttcttgattttgcccagtcagagcctgctcagaacttctgtgggccatattcagaacttttcaaaggattcatacaggcatgtagaaaacaggccccaaagacagatatagttgctggttccactattgatcaagctgtgaacgccacctttgctgctctggtgtatcgcactccagatttatatgagaagctgcaaaaatatgtcaacagtgggggcaaaatagccctgagtgaagagtttgcccaggtttattccttggcagatgggattcgaatatggatgttagagatgaagcagaagtccctgatgagcctggggaatgaagcagaagaaaaacatagttcagaagctactgaggtgaaccctgagagcctggcaaaagagtgcattgagaagagtcttctattactaaaatttctgcccacgggcataagttcaaaagaaagctgcgaaaagttggagactgctgatgaaaccagtcatctccagccactcaacaagcgtcagaggacaagctctgtggtggaagagcatttccaagcctcagtatctcccactgaagccgcaccccctgccacaggagaccagagtcctggcctgggcacccagccaaagctgccatccagcagtggccttcctgctgcagacgtgtcccctgccacagctgaagagcccttgtcaccttccacacccacccgccggcctcccttcacccgagggcgactccggctgctctcctttcgatccatggaggaggccagactggtgcccacagtgaaagagaaataccctgtgctgaaggacgtcatggacttcattaaggatcagtcgctctcgcacaggagtgttgtgaaggttctttccctgaggaaagcccaggcccagagcatcctggaagtcctgaagataactcagcactgtgcagaatcccttgggcagccccactgcttccatccacctttcatacttttcctgttggaacttctgacctgtcagaaagattttaccaattattttggacacctggaaggctgtggtgctgatctacacaaagaaattcgagacacttactatcaacttgttctgtttttggtcaaagcagttaaaggatttagtagcctaaatgacaggtccttgctccctgccttatcctgtgttcagacagccctgcttcatcttttggatatgggctgggaacccaatgatctcgccttctttgttgatattcagttaccagatctcctcatgaaaatgtcacaggagaatataagtgtccatgacagtgtgatcagccaatggagtgaagaagatgagcttgctgatgccaagcagaattcagaatggatggatgagtgtcaggatggcatgtttgaggcctggtatgaaaaaatagcccaggaagatccagagaagcagaggaaaatgcacatgttcattgctcgctactgtgacctgttaaatgtggacatctcttgtgatgggtgtgatgagattgccccctggcatcgataccgctgtctgcagtgcagcgacatggatctctgcaaaacttgcttcctaggtggggtgaagcctgagggccacggagacgaccatgaaatggtcaacatggagtttacctgtgaccactgccagggtttgatcataggccggaggatgaactgcaatgtttgcgatgactttgatctttgctacggatgctatgcagcgaagaaatactcctacggccatttgcctacccacagcatcacggcccacccaatggtaaccattcggatcagtgaccggcagaggctcatccagccatatatccataactactcctggctgctctttgctgccctggctctctatagcgcccacctggccagtgcagaggatgtggatggggagaagctggacccccagacgcgcagcagtgccaccaccctgcggagccagtgcatgcagctcgtcggggactgtctgatgaaggctcatcagggaaaaggccttaaagctctagctttgctgggtgtattgccagatggggactcgagcctagaagatcaggccctaccagtcactgtgcccaccggagcgtcagaggagcagctagagaagaaagctgtccagggtgctgagctgtcagaagcaggcaatggaaagagagctgttcatgaggaaatcagacctgtagatttcaagcagagaaataaggcagataaaggtgtatcattatcgaaggatccttcatgccagacccaaatttcagattcacctgcagatgctagcccacctacaggacttccagatgctgaagattcagaagtgtcatctcagaagcccatagaggaaaaagcagttactccaagccctgagcaagtgtttgctgagtgttcccagaagaggattttgggattactagcagccatgttacctcccttaaagtcgggccccacggttcccctgatagacctggagcacgtccttccactcatgtttcaggttgtcatctcaaacgcaggccacctgaatgaaacctaccatctcaccctgggtcttctcggccagttaattatccgtcttttgccagcagaggtagacgccgcagtgatcaaagtcctctcagccaaacacaacctgtttgctgcaggggacagttccattgtgccagatggctggaaaaccacccacctgctctttagcctgggagctgtgtgtctggacagccgggtgggcttggactgggcgtgctccatggcagagatcctgcggtcactcaacagtgccccactgtggcgtgatgtcattgccaccttcacagaccactgcatcaagcagctgccattccagctgaagcacaccaacatcttcaccctgctcgtgctggttggcttcccccaggtcctctgtgtgggaacccgctgcgtttatatggataatgccaatgaaccccataatgtgatcatcttgaagcactttactgagaagaacagggctgtgattgttgatgtcaaaactcggaagaggaaaacagtgaaggactaccagctggtccagaagggaggaggacaagagtgtggtgactctcgggcccagctgagccagtactcccagcactttgcctttatcgccagtcaccttctgcaaagcagcatggacagccattgtcccgaggcagtagaagcaacttgggtcctgtccctggccctgaaaggattgtataaaacactaaaggctcacggttttgaggagatccgtgctactttccttcagaccgatttgctgaagttgctggtgaaaaagtgcagcaaagggactggctttagtaaaacgtggctcctccgggacctggaaattttgtccatcatgctgtactcctcaaaaaaggagatcaacgctttggctgagcacggagacctagagctggatgagcgaggggaccgagaggaagaggtggaacggccagtcagcagccctggcgacccagagcagaaaaagctggacccccttgagggcctggatgagcccaccagaatatgtttcttgatggctcatgatgccctcaatgcccctctgcacattctccgggccatatacgaactgcagatgaaaaagaccgattatttcttcctggaggttcagaagaggtttgatggtgatgagctcaccacagatgaaaggatacggtccctggctcagcggtggcagcccagtaagagtctgaggctggaagaacagagcgccaaagctgtggatacagacatgattatcctgccatgcttgtcccggcctgcacgctgtgaccaagccactgctgaatcgaaccctgtgacccagaagctgatctccagcacagagagcgaactgcagcagagctatgccaagcagcgccgtagcaagagcgccgccctcctgcacaaggagctgaactgcaagagtaagagggctgtccgggactacctcttccgagtgaacgaggccacagctgtcctgtacgcccgccacgtgcttgcatccctgctcgccgagtggcctagccacgtgccagtgagcgaggacatcctggagctcagtggccctgcccatatgacctacattttggatatgttcatgcagctggaagaaaagcatgagtgggagaagatcctgcagaaagtgctccagggctgccgagaggacatgctggggaccatggccctggctgcatgccagttcatggaggagccaggaatggaggtgcaagtgagggagtcgaaacacccgtataacaacaacaccaacttcgaggataaagttcacattcctggtgccatctacctctcaatcaaattcgactctcagtgcaacacagaggagggctgtgacgagttagccatgtccagcagcagtgacttccagcaagaccgacacagcttcagcgggtctcagcagaagtggaaagattttgaacttccaggagacactctgtattaccgcttcacctccgacatgagcaacaccgagtggggctacagattcaccgtgacggccggacacctggggcggttccagacaggattcgagattttgaagcagatgttgtcagaagaaagggtcgtgcctcatctcccattggcaaaaatttgggaatggctggtgggcgtggcctgtcgccagactggccatcaacgattaaaagccatccacttacttctgaggattgtgcgatgctgcggccacagtgacctgtgtgaccttgcgctgttgaagcccctgtggcagctctttacccacatggagtacggcctgtttgaggacgtgacgcagcccggcatcctccttcccctgcatcgtgccctcactgagctcttcttcgtcaccgagaaccgtgcccaggagcttggcgtgctgcaggattacctgctggccctaaccacggacgaccaccttctccgctgtgcggcacaggctctgcagaacattgctgccatcagcctggccatcaactacccaaacaaggccacccgcctctggaatgtggagtgttagcccttggtggggcgtgcatgggactagttcatctgccacagggattttagagcagacatctaacctcattcaggaaaactcctgtagcgccagtgcccagctctccttgagctgaccactccagttaggatgccaagcagccacgtctccaagagctcccgtgcgtaggctggacacaagcacaggctgtagcatggtgaaaataagccaagcagtgcagaatgcctcagaaagggtgggcagggggcccttaagaaggttcagagaccagccttctccagaggctgtcactgcaggagccgtgggcctgggaagacttggaagcggcctctctcaactggtttctgtctccgtggagctggaactgcctgcacttgccttcagagggaggcacagtccacccagatccacctttccagcaagacccccagtggctgcccagcctgggagcacctctttgcttttcacaccaaaccaaaactggcgagagcccctcctagccaccagtgatccccaagcatccagtacagaaccaggcatcgagctagctccctgcacggccgcaccctcccagagaactccttgaggagaacaagtgcccttggggacagccggcaggcgcccctgtacgtctgctcatgcaccaggcagcacagccgcagttcctcagttgttgttttgacatatttcagtttccacctcacgtttttagagcagaaccacactgtctccctggaggggctcgagggcatgaccggggactgaccattctgtgaaaggagcagaatgtgaggagcacgcgtgagcttatgtaccgtgaagatgatcagaggatatcttattttaagagtaaaaacccacataattttatttctgcttgatagtcatggtagtctgtcatacccacctctgggactctgcgtggctgtttggctgtcacttgtagcaataacgacattagttctagtcagtgctgttttacatttttcttttgatgggtttagtcttgccctggagtgccgatgatgattctccctccagagccacgcttgggaacatgaagcaagtctggcgtgtgggctgcgtgccggccttagtgggacccgtggggttggagcatgcctttaggggcagtgtctgggccgaagcacgtcccaccacacagtgccagagccagagaaggggccccaccaccaaggccaagcttgaccaggtcagcattgccatggcccagtgtgccccgtggcctctgaagatccctctgtgcagggtctgcagggatctggattgcaagggcccaagtctgcaggtctggaagcatcttcctataagagcactttcgccttctgggtcaggactccaaggtgcagcgggcttcacagccctacaattgggttctcagctaagccccagagttctggtagaaccatcccggggcgggtggagggtgggatttaagggagacgggaacacatggggcaggtcctggaacttggtggcctgaggactgaggccattgccctggtggaaaggcctggcctggttcctgtggcttgggacctgaataggcaggtgctgctggctccgtagaaacccttttcccatcttttgctctttgccaaacctaccttgctttgggagctgcctgcaccaccccagagaaggccccaccttcttcatccctcagacccgaggaggcctcccagtaaggagtttcccaagaggggactcacaggaaacaagtcttagtgcttgggagggaggccccgctgcgtgctcagactcacagccaacctggaaggtagacgagatagcgccacccacgcccctccacaccccagactccgagtaaagcgggcggtagggccggagtcacctcccctatggcagtggccgccgctgtactccatcctcccgtcaggaagatcagctgtaaataaacgctgggctccccagagcacctgtccgcccactgcccttgctgttctgggatcttcgctgcagttcacgggaaacaagcctgagtccgctcgcacccgcggctgctctcccggctcggcccggccgcctctgtctccggccaccgggtggcgctgccgagccagagccgccgcgtcccggcgctttccaggagccccaggcccggaggaggcgaagcccgcagagcaaaggtggaaacacgtgcctacgctgtaaagaaatcctgttccagagcatacctgttgtacaaacagacactgttcctaacgagaggagtgacgtattttcatcaccgtttttaatttgttttcttacgggtttacgattttgaatttttcttatttggttgaaagaattttgattctatcagcctgagtgagttcagcctgtaaaaaggatgttaagctgtgggtaaaatatgcaaacgaaaagaaatatattgtacaaattctatataataaggtaaaaaaaaaaaaaaaaaa

SEQ ID NO: 1418 - DNA, 9855 bp, HOMO SAPIENS
cgcactcctgggcccgcccagccgccatcttggtctaggagggagcgcgccgcacgcgtgagtaaacagccggagctgggaaagtcgagctctggcagcgtctgggtgctgaggggcagaggcggagagaaccctgtcctgatcttcctagggtggccgacatgacggccaggggtcagagccccctcgcgccgctgttggagactttggaagacccttctgcctcccatggagggcagactgacgcttacctgactctgaccagtcgtatgactggagaagaaggaaaagaagtaattacagaaattgagaaaaaacttcctcggctgtacaaagttttaaagactcacatttccagtcaaaactcggagctgagtagtgctgctctacaagccctggggttttgcttatataatcccaaaattacctcagaattatcagaggcaaatgctctagaattgctttcaaaattgaatgataccattaagaattcagacaaaaatgtacgtactagagcactttgggtgatatctaagcagacatttccctctgaagtggttggcaaaatggtatccagtataattgattcattagaaatactgtttaacaaaggagagacgcattctgctgttgttgattttgaagcattaaatgttatcgtaaggctaattgaacaagccccaattcaaatgggagaagaggcagtgaggtgggcaaaactggtcatacctttagtggttcattcagcacaaaaggtacatttgcggggagcaactgctctggagatgggaatgccattattgcttcagaaacagcaagaaatagcatctattacggagcagcttatgactactaaattaatctcagaacttcagaagctatttatgagtaaaaatgagacttacgtgttaaaattatggcctttgtttgtcaaactacttggaaggaccttgcatcgaagtgggagtttcatcaattctctcttgcaactagaagaacttggatttcgtagtggagcacccatgattaaaaagatagcttttattgcttggaagagtttaatagataattttgctttaaatccagatatactatgtagtgcaaaaagactcaagttgttaatgcagcctttgagttccatccatgtgagaacagaaactctagcattaacaaaactagaagtctggtggtatttactgatgagacttggacctcatcttcctgctaattttgaacaggtttgtgtgcctctgattcaaagtacaataagcattgattctaatgcctcacctcagggcaattcgtgtcatgtagctacatctccaggtttaaatcctatgactcctgtacacaaaggtgcttcctccccgtacggagccccgggaactccccgaatgaacctgagttcgaatttaggtggaatggccacaatcccatccattcaacttttgggacttgaaatgttgcttcatttcttgttgggtccagaagccttgagttttgctaagcaaaataaacttgtgctgagcttagagccattggaacatccgttaatcagcagcccttcctttttttccaaacatgcaaatacacttatcactgctgttcatgatagctttgttgcagttggaaaagatgcccccgatgtggttgtcagtgctatctggaaggagctaattagcttggtgaagtcagttactgaatcaggtaacaaaaaagagaaaccaggttctgaagttttgactctcttattaaagtctttggaaagcatagtaaagtctgaagtatttcctgtatcaaaaacgctggtcctcatggaaattacaattaaaggacttcctcagaaagtattaggttcaccagcatatcaggttgctaatatggatattcttaatggaactccagctttgttcttaattcaattaattttcaacaatttcttggaatgtggtgtatcagatgaaaggttctttctcagtttggaatcacttgtaggctgtgttctttctggtccaacttcaccactagctttcagtgactcagttttaaatgttattaatcaaaatgcaaagcagttggaaaataaggagcatctctggaaaatgtggagtgttatagtcaccccattaactgaattgattaatcagaccaatgaagtaaatcaaggtgatgccttagaacataattttagtgccatctatggtgcattgactttaccagtaaaccacattttttcagaacagagatttccagtggccaccatgaagactttgcttagaacttggtcagaattatatagagcatttgctcgttgtgctgctttggtggcaacagcagaagagaacttgtgctgtgaggaactttcttccaagataatgtccagtttggaagatgaaggcttttctaatttgttgttcgtggatagaattatttatattattactgtaatggttgattgcattgacttctcaccatataatattaaatatcagcccaaagttaaatcaccacagagaccttcagattggtccaaaaagaagaatgagcccctagggaaattgacttctttatttaaacttattgtgaaagtgatctattctttccacacactgagcttcaaggaagcacattctgataccctcttcactattggcaactcaatcaccggcattatttccagtgtacttgggcatatttctttgccttctatgatccgaaaaatatttgcaactttaacaagacctctggcattattttatgaaaactcaaagcttgatgaagttcctaaagtatatagttgtctgaacaacaagttagaaaagctactgggagaaattattgcttgtctgcaattcagctacaccggaacttatgatagtgaacttcttgaacaactctccccactattatgcataatatttctgcacaagaataaacagattcgaaaacagagtgctcagttctggaatgccacttttgccaaagtgatgatgttggtttatcctgaagagttaaaaccagtactaacacaagccaaacaaaaatttctgctcctgttgcctggtttggaaactgttgaaatgatggaggaatccagtggaccatattctgatggaacagaaaattcacaactaaatgtgaagataagtggcatggagagaaaatcaaatggaaaaagagattcatttttggcacaaacaaagaataaaaaagaaaatatgaaaccagcagccaaactgaaacttgaatcttcgtctttaaaagtaaagggtgaaattcttttggaagaggaaaagtctactgactttgtgtttatacctccagaaggaaaagatgcaaaggaaagaatattaactgatcatcaaaaagaagttctcaaaacaaagcggtgtgatattcctgccatgtataataatctggatgtttcccaagataccttatttactcagtatagtcaggaagagcctatggaaattcctactttaaccagaaaaccaaaggaggattctaagatgatgattacggaggagcaaatggacagtgacattgtcattcctcaagatgtcacggaagactgtggtatggctgaacatcttgaaaagtcctccctttcgaataatgagtgtggttctcttgacaaaaccagtccagaaatgtcaaacagtaataatgatgaaagaaaaaaagctttaatttcatcaaggaaaacatcaactgaatgtgcatctagtacagaaaattctttcgttgtcagcagtagttcagtttctaataccactgttgctggaactcccccataccctacaagtcggaggcaaacctttattactttggagaagtttgatggttcagaaaatagaccttttagtccatcccccttgaataatatttcatcaactgttacagtgaaaaataaccaggaaaccatgattaaaacagattttctaccaaaagcaaagcaaagagaagggactttttcaaaatctgattctgaaaaaatagtgaatggaactaagagatcaagccggagagctggtaaagctgaacaaacagggaataaaaggtctaagcccttaatgagatctgagccggagaaaaatactgaggaatctgttgaaggcattgtagtcttagaaaataacccacctggtttgcttaatcaaacagaatgtgtgtcagataatcaggttcatctttctgaatctacaatggagcatgacaatacaaagcttaaagcagcaacagtggaaaatgctgtattattggaaactaatactgtagaggagaaaaatgtagaaattaatttggaatccaaagagaatacacccccagtagtaatatcagcagatcaaatggtaaatgaggatagtcaggttcagataactccaaatcagaaaacccttagacggtcttcaaggcgacgttcagaagtagtagagtctaccactgaaagccaagataaggaaaatagtcatcaaaaaaaggaacgacgtaaggaagaagaaaaacctcttcagaagagtccattgcatataaaagatgatgtgttacctaaacaaaaactgattgctgaacaaactctacaggagaatttaattgagaaaggaagtaatttacatgagaagactcttggggaaactagtgctaatgcagaaactgaacaaaataaaaaaaaggcagaccctgagaacattaagtctgagggggatggtacccaggacattgtagataagtcctctgagaaactagtcagaggccgaacacggtatcaaactagaagagcatctcagggtttgctttccagcattgaaaactcagaatctgatagttcggaggcaaaagaagaaggttctaggaagaagagatctggaaaatggaaaaacaaaagcaatgaaagtgttgacattcaagatcaagaagagaaagtggtgaaacaggaatgtataaaagctgaaaatcagtcacatgattataaagcaacttctgaagaagatgtaagcataaaatctccgatttgcgaaaaacaagatgaaagtaatactgtaatatgtcaggattctacagtaacttcagatttgttgcaagttcctgatgatttaccaaatgtgtgtgaggaaaaaaatgaaactagcaaatatgcagaatattcctttacaagtctacctgtgccagaatcaaatctaaggactagaaatgccattaagagattacataagcgagactcttttgataattgtagtttgggagaatcctcaaaaatagggatatcagatatttcttcgctttcagaaaaaacttttcaaacacttgaatgccaacacaagagaagtaggagggtgaggagatctaaaggttgtgattgctgtggggaaaaatcacaacctcaggaaaagtcactcattgggttaaagaatacagaaaataatgacgtagagattagtgaaacaaaaaaggcagatgtgcaagcacctgtaagcccatcagaaacttctcaagctaatccatattctgaaggacaatttttagatgaacatcatagtgtgaattttcatttgggtctcaaagaggataatgatactattaatgattcattaattgtttctgaaaccaaatcaaaagaaaacactatgcaagaatctcttccttctggaatagtaaactttagagaggaaatttgtgatatggattctagtgaagcaatgtctcttgaaagccaggagtcacctaatgaaaattttaaaactgttggcccgtgtttaggagactcgaaaaatgtttcacaggaatctttggagacaaaagaagaaaaaccagaagaaaccccaaaaatggaactgagtctagagaatgttactgttgaaggaaatgcatgtaaagtaacagaatccaatctagagaaagcaaaaactatggaattgaatgtaggaaatgaagctagctttcatggacaagagagaaccaaaactggtatttctgaagaagcagcaatagaagaaaataaaagaaatgatgactctgaagcagacacagctaaactgaatgccaaagaagtagcaactgaggaatttaattcagatattagtctttctgataatactacacctgtaaaattgaatgctcaaactgagatttctgaacaaacagcagctggggaactagatggaggaaatgatgtatctgatctacactcatctgaagaaacgaataccaaaatgaaaaataatgaagaaatgatgatcggcgaggcaatggctgaaactggccatgatggtgaaacagagaatgagggcataactaccaaaacctcaaagcctgatgaagctgaaacaaacatgttgactgcagaaatggacaactttgtttgtgacacagttgaaatgagcactgaagaaggaatcattgacgctaataaaactgaaacaaatactgagtatagtaaatctgaagaaaaattagataacaatcaaatggtaatggaaagtgatattttacaggaagatcaccatacttcacagaaagtggaggaaccatcacagtgtctggcatctggaacagctatctctgagctaataatagaagacaataatgcatctcctcaaaaactaagggaacttgatccttcacttgtgtcagcaaatgacagtcctagtggcatgcagacacgctgtgtctggtctcctttggcttctccgtctacgagcattttaaagagaggactaaaaagatcccaagaagatgaaatctcatcacctgttaataaggttcgccgtgtctcctttgcagatccaatataccaagcaggattggcagatgacattgatagacggtgctctattgttaggtcccattcttccaatagttctcccataggaaaaagtgttaaaacttctcctactacacaatctaagcataataccacttcagccaaaggatttctgtccccaggatcacgtagccctaaatttaagagctcaaagaagtgtttaatttcagaaatggccaaagaatccataccatgcccaacagaaagtgtttacccaccattggtgaactgtgtggcaccagttgacatcattttacctcagattacatcaaacatgtgggcaagaggcctgggacaactcattagagctaagaatataaaaactattggtgatttgagtactcttacagcatctgaaataaaaactcttcctatccgttctccaaaagtgtccaatgtaaaaaaggctctcagaatatatcatgagcagcaggtgaagactcgtggactagaagagattccagtttttgatatttctgaaaaaacagtaaatggaatagaaaataaatctttgtcacctgatgaagaaagacttgtctcagatataattgatcctgttgctttagaaattccattatccaaaaaccttctggcacagattagtgctcttgctcttcagctggattcagaagatcttcataattattcaggaagccaactatttgaaatgcacgagaaactaagttgtatggcaaactctgtaataaaaaatctacagtcacgttggagatcaccatcccatgaaaattctatttagtattttcagagaaaattgaaggtttttttaaacatcactggatttcttgattgaggaaacaagttctgaaataatagcacaatttcaaagaagagactctttgcaaagttgataacatttcaaaccctgaaggacagtgacttattatgtaagttcaattttgtaagttcattatgtaagatccttttttttttcataatatgtattcttggctgctatgcgtggtttttcaggaaatttaattatcttactgagatgtgaaagcaaaactagtaacagaacttacattttatttcatgctttcttaaacccgtgcatattctggtgaaacatgtaaaatactttaagtaaaattgaacatttttatttgaatttttgctgaactgataaaggtgtttatatttttgtttgttggtttgtttaattcatgtttgttgggactgaggtttaggaagtttgttactggttaaaaacctcaaatgaaatgcgaaagaatttgaatttttcctgcatatgtcaactttggacagctttcaagaaaaatgagaaaagtttcaacttctggcggttaaaatattaatgcagaatttactaagattttattcatttgcattagcaaatattcatgcagcagcagttgactgaaaatttattcttatgagacgtatagtattcatttttaaatgcatgattgtacattatgtatagacgacaatgtttttaatttataaatttcattctttgttaattgcatgggtttttctgcagcttattgtgaataccttggttctgttcaatagaaacattttgtatatattaaatactgaaatatcagtatcgacggtggaagtgcttcatgggcttgctgcacatatttgtaggatactgtatctgcaaatgcaacaacaaatagttttgtacttggttaacagtcttagttaaaacatgagtttattttctaaaagtatccagaataagtaaaattatagaaataagaaaatgttacacaactttgctgttcatacccttaccttcttactacttttggtttggaggagggtatcaccactagaaagtgtgcctccttaagatttcttaaaggaaagttagtttcagtatttcacagcaagttggactacaaaatctagagttgatctgctttttaaaccttcatttaaaagcaaacttggaagaaatttgaaactgatgtttttaatatatgtctgtgttgcctaggttttctttttttaaagaggtatgtaattaaaacctttgtaaaatttgccaactaatattagtgcctgacttcccatatttgtttcatctttttaactgacagtatatctcacttcttctttgaatagaatgagtgagtgatctcagttttcacattttattcagaagctaatccctacttagcaaggcacacattctacagcaagtcatagaaagtttaatccttgtgcctccttagctctcgtatattcagggatctctataaaagttggtgtcttttttcatcatcataaattcatcataatcacagatatttttgggtctaagatattcatataccaaggatggttttgtaaagaattctgggatcattgaattaaggattgtggcttgaagtaactaaagaaaaatactaatttccttaaaaggaattataattatgatttacattttacatcattaatttcccaaattatatttaaccgtaaggaggtgcacatgagtttttagcaaacaggtatgaataagcagctatgtatatgtgtttggggcagaggggagcagattactttaacacacttcagaattaaaatcagttcgtttcatgactctgtgccttaacgtttgtgtgaactaaacttgctgattgaatgaaattcttgggaagccgaacagtaatagcagaaaatgtgaccaaatgagtatcatgtacttaaatcactgaattttatataagcacaagtattaattttaaaaacattatagtttaataaagctgcatttaaaaatatttgggagcaaagacaagcatgctaaatcttcattttgctatggctataagcatatatttttggcaacttatttgcaatattcttgccttaaagtttcctgcaaatttcccccttagtaattcccgaatagcaaaacattaatattccatgattagctctactgtgttgtctcactattaaaatggaattcgttttttcagatcttttctaatggttaataaaacaaatgtcagatcataataacactc

SEQ ID NO: 1419 - DNA, 561 bp, HOMO SAPIENS
  misc_feature (503)..(504): n is a, c, g, or t
  misc_feature (506)..(507): n is a, c, g, or t
  misc_feature (509)..(511): n is a, c, g, or t
  misc_feature (514)..(516): n is a, c, g, or t
gcttttgctaatgtgcttggtgccccactgaggctgctgagcagtgcttaccatgcgcccgatgtctcttctgtgtgcctctgagagcaaaagtggcctcagagtctgaaggagggcaaagtggccacagctgcagacacaaagtccagactagctcttgaccacatccaagtgcatcctgcattaagctcaggcacatcaaacctgcccaatcaaggtctgccaaaggaaggagtctgcaaatgacatttctcataatcaaacacactcttaatttgtttttatattattcactccattttttgattattataacttttaaaattatgtctagtagttttatcaattgctgagaagagtgttgaagtccaacttacaattgtggatttgttgatttcttctttcagctttattggttttggtttatgcattttaaggctctgctcttggtgtgtacacatgtaaaaccattttgtcttcatagtaaattaatttttaaaaannannannnaannnccctctttgctccagtaattctttgctctgaggtctactgtatta

SEQ ID NO: 1420 - DNA, 1617 bp, HOMO SAPIENS
cggccgccgagccgagcagcgccgcgcggggccgagtggagccgagcagctgccgcgccgcgtcgccggtttaagcgcagtgcaggccgcggccgggggcggcggtagtgagcccagcgctgcgctccagcccccttttccctccatggtttctctccgctcccgtgagtaacttggctccgggggctccgctcgcctgcccgcacgccgcccgccacccaggaccgcgccgccggcctccgccgctagcaaacccttccgacggccctcgctgcgcaagccgggacgcctctcccccctccgcccccgccgcggaaagttaagtttgaagaggggggaagaggggaacatggacatgaagaggaggatccacctggagctgaggaaccggaccccggcagctgttcgagaacttgtcttggacaattgcaaatcaaatgatggaaaaattgagggcttaacagctgaatttgtgaacttagagttcctcagtttaataaatgtaggcttgatctcagtttcaaatctccccaagctgcctaaattgaaaaagcttgaactcagtgaaaatagaatctttggaggtctggacatgttagctgaaaaacttccaaatctcacacatctaaacttaagtggaaataaactgaaagatatcagcaccttggaacctttgaaaaagttagaatgtctgaaaagcctggacctctttaactgtgaggttaccaacctgaatgactaccgagagagtgtcttcaagctcctgccccagcttacctacttggatggctatgaccgagaggaccaggaagcacctgactcagatgccgaggtggatggtgtggatgaagaggaggaggacgaagaaggagaagatgaggaagacgaggacgatgaggatggtgaagaagaggagtttgatgaagaagatgatgaagatgaagatgtagaaggggatgaggacgacgatgaagtcagtgaggaggaagaagaatttggacttgatgaagaagatgaagatgaggatgaggatgaagaggaggaagaaggtgggaaaggtgaaaagaggaagagagaaacagatgatgaaggagaagatgattaagaccccagatgacctgcagaaacagaactgttcagtattggttggactgctcatggattttgtagctgtttaaaaaaaaaaaaaaggtagctgtgatacaaaccccaggacacccacccacccaaagagccaaagaatagttcctgtgacattccgccttccttccatgtagtccctcttggtaatctaccaccaagcttgtggacttcaccccaacaaaattgtaagcgttgttaggtttttgtgtaagattcttgctgtagcgtggatagctgtgattggtgagtcaaccgtctgtggctaccagttacactgagattgtaacagcatttttactttctgtacaacaaaaaagctttgtaaataaaatcttaacattttgggtctgttttttcatgctttgctttttaattattattattattttttttacattaggacattttatgtgacaactgccaaaaaagtatttttaagaatttaagcgaaataaacagttactctttggtaaa

SEQ ID NO: 1421 - DNA, 1089 bp, HOMO SAPIENS
ggccaatgttcaaatgcgcagctcttagtcgcgggccgactggtgtttatccgtcactcgccgaggttccttgggtcatggtgccagcctgactgagaagaggacgctcccgggagacgaatgaggaaccacctcctcctactgttcaagtacaggggcctggtccgcaaagggaagaaaagcaaaagacgaaaatggctaaattcgtgatccgcccagccactgccgccgactgcagtgacatactgcggctgatcaaggagctggctaaatatgaatacatggaagaacaagtaatcttaactgaaaaagatctgctagaagatggttttggagagcaccccttttaccactgcctggttgcagaagtgccgaaagagcactggactccggaaggacacagcattgttggttttgccatgtactattttacctatgacccgtggattggcaagttattgtatcttgaggacttcttcgtgatgagtgattatagaggctttggcataggatcagaaattctgaagaatctaagccaggttgcaatgaggtgtcgctgcagcagcatgcacttcttggtagcagaatggaatgaaccatccatcaacttctataaaagaagaggtgcttctgatctgtccagtgaagagggttggagactgttcaagatcgacaaggagtacttgctaaaaatggcaacagaggagtgaggagtgctgctgtagatgacaacctccattctattttagaataaattcccaacttctcttgctttctatgctgtttgtagtgaaataatagaatgagcacccattccaaagctttattaccagtggcgttgttgcatgtttgaaatgaggtctgtttaaagtggcaatctcagatgcagtttggagagtcagatctttctccttgaatatctttcgataaacaacaaggtggtgtgatcttaatatatttgaaaaaaacttcattctcgtgagtcatttaaatgtgtacaatgtacacactggtacttagagtttctgtttgattcttttttaataaactactctttgatttaaaaaaaaaaaaaaaaaaaaaaaaaaa

SEQ ID NO: 1422 - DNA, 2062 bp, HOMO SAPIENS
agatgtgtgatcccgccacctccccggaccctggcggttgtcgctgagttggcgaccgcgggagacgctgctgaggcggcttcggttgcgggtcggaacggcgctgctctgcggggccggtccaggctggcagctgccggcgcttggcggtgagggcgggctcccgagtggccccccaccgaaggcggtgggaccagcggctgaggccaggatgccgtccaggcggcgcggcggctcctcactcatcccagatgttggttatctttctgaagtagactgtccatggcctgaacattttccgaaaatcattttgagcaaaatatctgtttaataacaagataaccacatcaagatggttggaaagctgaagcagaacttactattggcatgtctggtgattagttctgtgactgtgttttacctgggccagcatgccatggaatgccatcaccggatagaggaacgtagccagccagtcaaattggagagcacaaggaccactgtgagaactggcctggacctcaaagccaacaaaacctttgcctatcacaaagatatgcctttaatatttattggaggtgtgcctcggagtggaaccacactcatgagggccatgctggacgcacatcctgacattcgctgtggagaggaaaccagggtcattccccgaatcctggccctgaagcagatgtggtcacggtcaagtaaagagaagatccgcctggatgaggctggtgttactgatgaagtgctggattctgccatgcaagccttcttactagaaattatcgttaagcatggggagccagccccttatttatgtaataaagatccttttgccctgaaatctttaacttacctttctaggttattccccaatgccaaatttctcctgatggtccgagatggccgggcatcagtacattcaatgatttctcgaaaagttactatagctggatttgatctgaacagctatagggactgtttgacaaagtggaatcgtgctatagagaccatgtataaccagtgtatggaggttggttataaaaagtgcatgttggttcactatgaacaacttgtcttacatcctgaacggtggatgagaacactcttaaagttcctccagattccatggaaccactcagtattgcaccatgaagagatgattgggaaagctgggggagtgtctctgtcaaaagtggagagatctacagaccaagtaatcaagccagtcaatgtaggagctctatcaaaatgggttgggaagataccgccagatgttttacaagacatggcagtgattgctcctatgcttgccaagcttggatatgacccatatgccaacccacctaactacggaaaacctgatcccaaaattattgaaaacactcgaagggtctataagggagaattccaactacctgactttcttaaagaaaaaccacagactgagcaagtggagtagcagaaccaggagcctcttccatacatgaggaaagattgctgccttttcagcagaagggaaattcctaggattggctgtcccctgccaagcttggtggagcgtctgcaccttggctgcgccgcctgtgcatttgccagtttcctcccactgagaggatggaggtgtccgcacagctttgggcctcgtgagggatctgcctcctgagcaaagagctcttgatcccgatttcatgcacagccctgcagtaaggagcccagaaggaacatgtgtttcctgttaaaactcctcttgttctcttttcttacattatgacgtttgttttcaaggagagggtttaaaaatgggatcctgtaagcagacttgggcagtctccttttgaaataggttgtctgtacatgttctaatgttttgtagaacacgtgtgcctgtttaagtgtattgatgtgaataatattaaatatcctaattatttaattcattgtattgtttctgagaagttgggaaattaccattatacatttacaacctaatgacttttgtattttatttttcaaaataaaagctttcaatgtgaagcattctggtaaaaaaaaaaaa

SEQ ID NO: 1423 - DNA, 3388 bp, HOMO SAPIENS
agttggctctacgaccgccgttgccgctgccagagagggccagggcagggcagggacgcgcagcatcggggcgggcgtggggccggagaaaagggtgtcggggccacacacgcaccctcgctgcagtccagctcctcccgaagctcgcacgcccagagcgcacggagcgggggactgcccgcccagacgcccgcccgccaacccgcccacgagccggggccaaagcctgggagcctgcgaggggaggaggcccaggggggcggggtggggggcgggggtgggtgccgcgctgccgcggagctgctactcggcgcgttttgcatgaagatggcggctcccaccgccaacaaggcagcctccctgggctgtaacaacaagcctgcgttcccggagctggatttcaggtcgggagctcgggtggaggaattgaacaaactcatccaagaatttacgaagcacgaccagcgggaatacgacgaccagagagcgctggagattcacacagccaaggatttcatcttttccatgctgggaatggtgcaaaagctggaccaaaagcttccagtggctaatgaatacctgttgctctctggaggtgtccgggaaggcgtggtggacctggacttagatgagcttaatgtctatgcccggggtactgactatgatatggactttaccctcttggtgccagccctcaagctgcatgaccgtaatcagcctgtgacactcgacatgcgccactcagccttgtgccactcttggctgagccttcggctctttgatgaggggacaatcagtaaatggaaagactgctgcaccattgtagatcacatcaatggtgccaccaactacttcttctcacctaccaaagtggctgactggttctatgactctatcagcattgtcctatcagaaatacagaagaaaccccagcgagggatgccaaaggtagaaaaggtggaaaaaaatgggaccatcatctccatcattctgggtgtagggagtagtcgcatgttgtatgatattgtccctgtggtatctttcaaaggttggcctgcagtggcccagagctggctcatggagaaccacttttgggatgggaagattactgaggaagaggtcatcagtgggttttacttggtgcctgcttgctcctacaagggtaagaaggacaatgaatggcggctgtcctttgccaggagcgaggtgcagttgaagaagtgcatctccagcagcctcatgcaggcctatcaggcctgcaaagccatcatcattaaactgctgtcccggcccaaggctattagcccctatcacctgcggagcatgatgctctgggcctgcgacagacttcctgccaactacttggctcaagaagactatgcagcccactttttgctgggcctcatcgatgacctgcaacactgtctggtcaacaagatgtgccccaattatttcatccctcagtgcaacatgctggaacatctgtctgaggagacagtcatgcttcacgcccggaagctgtcctctgtgcgctcagacccggcagagcacttgcgcaccgccattgagcatgtcaaggcagccaaccggctgacactggagctccagaggcgaggtagcaccaccagcatcccctctccacagtctgacggaggggaccccaaccagcctgatgaccgtttggcaaaaaaactgcagcagctagtgactgagaacccgggaaagtcaatctctgtctttatcaatcctgacgatgtcacaaggccccatttcagaattgatgacaaatttttctgagtgttagctgacttttttttttcctgattcttaaactctgataatgtgtcgtgtggtttgtgatgctatctttctgttttttacatatccagcctagattggatttgttaagaacaaattttaagtttcctggttctgcaggatggtgcaggctctgaaacagtatattactatttcatattctgcctctgatttcgttgtttactttttgtagttattgtcatgctctttagtttgttggagttttttttctttttaaggagatcttaagccatagatgaaaatgcccatgaatcctcttgcttttttctgtttcatacttggtgcaaatttgttcatgggtatggggaaacaaatctctttctgatgcttaacgattctatcctattatttttattattttgtttttgtcttttttcttatgagctttcaccactactgatatttgagaatcatatgaacctgggaactacttggcatgttagctggatttatttattttggccagtgaccagagtagtttccccccttttccaccaaacaatgtaaactttgaaagtgataatactacaaattgtgttttggagcaacttcattgaatgtaattgtcctcaaatcagagaacactgggtggtttgaagggtgtctttgacagttttccaagcagaattaaggtttccaaatgttaattttagcatatgtaattatttgaagccttatttaaatcctattaaagaacataccattataattattatttgcactaatctttgccattgtcagaattgcaaagtgtgtttcaatataaattaacaaccactctcgaaattctatcattttttcattttgcccatttctatcagtgaaatgattctttgcatttgcttagttctccttcagttgtggggtcctgctttgccctctttgatattcctggttcctgtcttactgagagaagttgttaaagctttatacatgttgaccccatctaaagctggggaaaatatacacttgatgaagtaggtgtctttgtatttatttcttttggggtcatagaggtaagcttttttgtaaaatctctactcttcctgagagttttgagaaaaactggcaggaagaacttataatccccaaatagaagataccacgtctgttcaaaagcaggtattgctatagagcagcacccaggaaatatctgtgggtggcagccttggtatagaggtgtcctgtcttcatgagtgaagttacttgcctgattaggtgctggaaggtattggctccctgttttggtgtggactcatggcaagctggtgtttaagaggtcaggaggcctgctgatctttcaaaggacacccatgatgtctactcatagaaagggcaagtaacgtgttcattttggtcttgaatgtccaaactcaagggttggattttggccaattgaaatcagacatatgcgatcttgggtttttgcatggaaattaatgtaatgcttataaatgaaaaatgaaaacatttcaaccatctaagtcaaacacaaaaataataaaaaaagaaacatactggccttgaaaaaaaaaaaaaaaaaaaaaaa

SEQ ID NO: 1424 - DNA, 3458 bp, HOMO SAPIENS
cggtcttgcgcgctcaggccgggcaacgtccgtgcgttctttttgggtcctgaaccccggaagagaaactgcgttgtacccttttacgtgaggcggtgacggcggttcggaagtcgtctggcctccccgcggccgctcgcagcttgctggcctctcccgcgcctcacgtcggactccgtctccgcggcagggaagcagcatggaagctgaggacatccaggaggagttgacctgccccatctgcctggactatttccaggacccggtgtccatcgagtgcggccacaacttctgccgcggctgcctgcaccgcaactgggcgccgggcggcggcccgttcccctgccccgaatgtcggcacccatcggcgcccgccgcgctgcgacccaactgggccctggccaggctgactgagaagacgcagcgccggcgcctgggccccgtgcccccgggcctgtgcggccgccactgggagccgctgcggctcttctgcgaggacgaccagcggccagtgtgcctggtgtgcagggagtcccaggagcaccagactcacgccatggcacccatcgacgaggccttcgagagctaccggacaggtaactttgacatccacgtggatgaatggaagagaagactaattaggctgctcttgtaccattttaagcaggaggagaaacttcttaagtctcagcgtaatctcgtggccaagatgaagaaagtcatgcatttacaggatgtagaagtgaagaacgccacacagtggaaggataagataaagagtcagcgaatgagaatcagcacggagttttcaaagctgcacaacttcctggttgaagaagaggacctgtttcttcagagattgaacaaagaagaagaagagacgaagaagaagctgaatgagaacacgttaaaactcaatcaaactatcgcttcattgaagaagctcatcttagaggtgggggagaagagccaggctcccaccctggagctgcttcagaatccaaaagaagtgttgaccaggagtgagatccaggatgtgaactattctcttgaagctgtaaaggtgaagacagtgtgccagataccattgatgaaggaaatgctaaagcgattccaagtggctgtaaacctagctgaagacacagctcatcccaaactcgtcttctcccaggaagggagatacgtgaaaaatacagcatcagccagttcttggccagtgttttcttcagcatggaactactttgctggatggaggaatcctcagaagactgcttttgtagagagatttcagcacttaccctgtgttctgggaaaaaacgttttcacctcagggaaacattactgggaagttgagagtagagatagtctggaggttgctgttggggtgtgtcgggaggacgtcatgggaattactgatcgttcaaaaatgtccccagatgtgggcatctgggcgatttattggagtgctgctggctattggcccttgataggcttccctggaactcccacccagcaagagccagctctccaccgagtgggggtttacctggatcgtgggactgggaatgtctccttctacagcgctgtggacggagtgcacctgcacaccttttcttgttcttctgtctcacgcctccggccatttttttggttgagtccattagcatctttagtcattccaccagtgactgataggaaatgaggcttttcttcccctgaccaaaactccttccctgtagtccagctgagggacacacatccctgggccctcttctgcccttcatgtctctatcctggatggtccatcttctgggtctccctaacggtaccgtttggtatctgccctttgtgtgcttcacaagaggcagtcccatgggaggtgggtctggccaatggagatgggacaggaaattttccaagacgcttttgggaaatctttttgtagcttttaaagagatgtgcggggaagacatatggatgttagcagccatattggaactgagaacacaggaatggtggaaaggtagaagaaacagagtttttgttgccgttgtgaaattgttgaaatttccttcatgccaagcttcttgttatatgagataattacgcccttattgtataagacaattttagttgtatttggttacttgcagcctgaagtaccgtaactgcactaaagggacgtagtgtgaacatcccgcagtataggcttaagtcacttttgtgaaatttgacaaaggcatagaatctttttctatccagtcaggcattgcctattctttccagtaactactgattcccccacttttctgtcttagaaaattgtgggaatcccccctcactctgcctatgttgcactctctctcttcccaaccataactctgccctcagctattaactgtgctgtgtatttatcaagttggtatgttgtatgtacagtgttattcatgtcatcatgagaatgttgaacgcttgttaaatatcttttgctagcctcttcatatgctgttgcatatgactctcatcacaactcagtgagatggaaagtcaaatcctatttgtacaaatgagaaaactgaactctttagagtaactagctcagtattggccagctggtaaatggcagtgttgggattaaaatccagttcttatctactctccctttattcagaagcatttattggatgttgatctttgtttcaggttttgattttgttacttttttatactgtgtatattttcctcagtctacccttctgctctagattgtctggactcaggagattgtggcagttactggatagttatttttaagataatgattgcttttctctgtttatataagtcatgtgtacttattgtagaaagtttgtaagatgcaaaaagtataaaaattaaagttatgcactactaacatttcaatatattttctcccagattttcagtaaagactttcaggcagtgatttaacgaggattttattttaacttatattttagtttaaggggaacacgtgcaggtttgttctatagatcaattacatgtcacaggggtttggtgtacatattatttcattacccaggtaataagcatagtacccaatagatacttttttgataccccaccctcctccaccctctaccctcaagtagtccctggtgtctgttgttcccttttttgtgtccatgggtactcaatgtttagctctcccttatacgtgagaacatgtgatgtttggttttctgttcatgtgttggtttgcttagggtaatggcctccagctccatccatgttgctgcaaagacatgatctcattctttttttatggctgcatagtattccatggtgtatatgtactatgttttctttatccagtctactgttgatgggcatttaggttgattccatgtctttgctattgtgaatagtgctgcaatgaatatatacatgcatatgtc

SEQ ID NO: 1425 - DNA, 303 bp, HOMO SAPIENS
  misc_feature (171)..(171): n is a, c, g, or t
  misc_feature (251)..(251): n is a, c, g, or t
aactggaaaacatacgcagctttgaaaagctacaacatatttttggggatctagaagactttgcaaattcctagaaaggaaaacacctcattcaaataatcagctcccttctgcttcaccatgaagccctgcgtaagcaggaaatgaaaactaaggctgtcattttctganctttgaaggcatgccttcacacacaaatcactttgacaaagggtgggagatgtacaggcaagagatttagggaaatcttncaacaaatcactggctgaccactaaataatactgacccaggtatgccaagta

SEQ ID NO: 1426 - DNA, 6283 bp, HOMO SAPIENS
aatgggtccggacttccggcgccctctggtggcggccattttgattggtgttggatttatttgtaggagaggctcctgagcgctaggtccgcactgtggtgactgaacccagaagtcggggagcagttgtcctccgctgcacagaggctactctggagctctgtgacggcgcccagcgtgacccactcctgggccaggatacggaccgtcgtgcccatatctcctggctggtcgccctatcctcccgactctgcttaaaaccacgtggttcgatggctgccgcggctacgctgaggctctccgctcagggcacagtgacttttgaagatgtggctgtgaactttacctgggaggaatggaatctccttagtgaggctcagagatgcctgtaccgtgatgtgacgctggagaacctggcacttatatcctccctgggttgttggtgtggagtggaagatgaggcggcaccttctaagcagagtatttatatacaaagagagactcaggtcaggactcctatggcaggtgtgtctcccaagaaggcccacccctgtgagatgtgtggcccgatcttgggagacattttgcatgtggcagatcatcagggaacacatcacaagcagaaactgcacaggtgtgaggcctgggggaataaattgtatgacagtggaaactttcatcagcaccagaatgagcacattggagagaaaccctacagagggagtgttgaggaggcgttgtttgcaaagaggtgtaagttgcatgtgtcaggggagtcatctgtcttcagtgagagtgggaaggactttttgcccaggtcaggattactccagcaggaggccagtcacactggggagaagtcaaacagcaaaactgagtgtgtgtctcccattcagtgtgggggagctcactacagctgtggagaatccatgaaacattttagcaccaaacatatactcagtcagcaccagagactgctcactagagaagagtgttatgtgtgctgtgaatgtgggaagtcctttagcaaatatgctagcttgagtaatcatcagagagttcacactgaaaaaaaacatgaatgtggagaatgtgggaaatcctttagcaaatatgttagcttcagtaatcatcagagagttcacactgaaaaaaaacatgaatgtggagaatgtgggaaatcctttagcaaatatgttagcttcagtaatcatcagagagttcacactgggaaaagaccttatgaatgtggagaatgtgggaaatcgtttagcaaatatgctagcttcagtaatcatcagagagttcacactgaaaaaaaacattatgaatgtggagaatgtgggaaatcctttagcaaatatgttagcttcagtaatcatcagagagttcacactgggaaaagaccttatgaatgtggagaatgtgggaaatcgtttagcaaatatgctagcttcagtaatcatcagagagttcacactgacaaaaaacattatgaatgtggagaatgtgggaaatcctttagtcaaaagagcagcctcattcaacatcagcgatttcacactggagaaaaaccttatgggtgtgaagaatgtgggaaatcttttagttcagaaggacatcttaggagccatcaacgagttcacgccggagaaagacctttcaagtgtggagaatgtgtgaaatctttcagtcataagcgcagccttgttcaccatcagcgagttcacagtggagaaagaccttatcagtgtggagaatgtgggaaatctttcagtcaaaagggcaacctcgttctacaccagcgagttcacactggagcaagaccttatgagtgtggagaatgtgggaaatcatttagttcaaaaggacatcttaggaaccatcagcaaattcacactggggacagactttatgagtgtggagagtgtgggaaatcttttagtcataaaggcaccctcattctacatcagcgagttcaccctagagaaagatcttatgggtgtggagaatgtgggaaatcttttagttcaatcgggcaccttaggagccatcagcgcgttcatactggagagaggccttatgagtgtggagaatgtgggaaatcttttagtcataagcgcagccttgttcaccatcagcgcatgcacactggagaaagaccttacaagtgtggagactgtgggaaatcttttaatgaaaaaggacaccttaggaatcatcagcgagttcacactacagaaagaccttttaagtgtggggaatgtgggaaatgttttagtcacaagggtaacctcattctacaccagcatggccatactggagaaagaccttatgtatgtagggaatgtggaaaattatttaagaagaagtctcacctccttgtacaccagagaattcacaatggagaaaagccatatgcttgtgaagcttgtcagaaattttttagaaacaagtaccaactcattgcacatcagagagttcacactggagaaaggccttatgaatgcaatgattgtggaaaatcatttacccacagctctacattctgtgttcataagcgaattcacactggagaaaagccttatgagtgcagtgaatgtggaaaatctttcgctgaaagctccagtttcacaaaacacaaaagagttcacactggagaaaagccttatgagtgcagtgaatgtggaaaatcttttgctgaaagctccagtctcactaaacacaagagagttcacactggagaaaagccttataaatgtgagaaatgtgggaaattatttaacaagaagtctcacctccttgtacaccagagttcacactggagaaaagccatatgagtgtgaggattgtcagaaagtttttagcaagaaggaccacctcattgcacaccagagagttcacactggagaaaggccatatgaatgcagtgattgtgggaagtcatctacccacagctctgcattctgtgttcataagagagttcacactggtcacaccaccttatgagtgcagtgaatgtgggaaatcctttgctgaaactttcagtctcattaaacacaggagagttcacactggagtaaggtcttgtgattgcagcaaatgtgggaaaaaagttacctgaaggtcttttctccttgaatatcagagagttcacactagacaaataaaatacatttgggcaattttgtagccacacctctttgctccttcaagatcagagttaacactggatcagggccttaccagtgtgacatgtgagatatttatgtagaaatctagcttcataacacacaggagacttcccactgcagaaatgccttttgaatgtaatgaatgcaagaaagccttcagcctttttattggagcctcaaacattgacatgagaaaaacaccatagatgtatatggaatgttatttctttttcaatgtaaccctttgagagtgccacctacctagattgaatgtcatttattgagcatctgcaaaagttccaagtgtgtggcagctacagtgcatttttcactatacccaggtaccttgctagattttttttgagacaggttgtcactgtgtcgctcaggatggcgtgcagtggtgtgttcacatttcactgcacccttgatctgggcttaagtgattctgttgcctcggcctcctgagtagctgaaaccacaggcatgcactaccatgctccactaatttttttaagttttggagagacagggtctcaccatgttgcccaggctggtcttaaactcctggctcaagcgatccttccaccttggcctccaaacatgctgggattacaggtgtgagttactgtgcctggccttttttttttttttttttaacttttaatttctgatcgagtcacagaaggatttgttgagtagcttcagcacttcttcctttgtcatttttttctgtctgataagtcatgccatggacgttacccatttttatcccagaggcctcttacgttgacttgaaaagacggactatgtctttcagagatcttgtgggtatcacatcaatcttgacaaattttctaccctccaagtcatgatcctaagaacagcttgcctcccatttctccggtttgtgctattatgaaggccttattgtttcagccttcttcaatcttgagggttgttgtcactgtatgggtggttcagaaataagtaggtcctgttactatgaagggggtcacagcttttgttggcatagctaaactttgtggctcatggaacagtatgaatgcagaatgtagctttctccacttgtggactgctttgcatagctgccagaggcctccagagaagaccttcagggctttgtggtctttatctgtagcacggatactaaaatttgtgggttcataggtcagctggatacagggcattttttgtgacaatttctggcattttttgaacaagacaaaattcttttacgaggtatattgcattgtacttggtacggctgagggaagtctgttgcccagctcttgcaatgcagacacatgccctgatatccagaattctgtaggataacatcacagattgtaatgctatcaggtgaaattataattttatagaattactttatttataggcagtggaggagacagaataatgtaactgcaactcatgtcttttttttctttttttttctttttttttgaggcagagcctcaccctgttgcccaggctggagtgcagtggcataatcttggctcacggcaacctctgcctcccaggttcaaacgattctcctgcctcagcctcctgagtagctgggactacaggcacatgccaccacacccagctaatttttgtatttttagtagagatggggtttcaccatgttggccaggctggtctcgaactcctgaccttgtgatctgctggcctcagcctcccaaagtcctgggattacaggtgagccaccacgtgcagcgtaatgcatgtcttttaaaagggcatccacaatgatccagtcactacgtatatgatgaatatgcagatacaggaattatcaggacttccataatgatgaatattgtattgttgaggccattgtcagaggaaataatctaaaggttttgtgaattcctgtactcattctgggctgttctcctcaaggtcattcctgcattaacaggaggaagatgatagggagaagggagatctcagttcagtgatgtggcctttgtgaccagccagccacttaatcaggtggaaatggccttagtgccacatcaatatttgctaccgtggaggctagttttcccacttagggcatgagaagaattggtgtagtcagtatagagttgccaaacctgttttccaaaaataatggtaaatctatatttttcttttgaactgcatttttttaattattattattatttattttgagacggagtcttgctctgttgcccaggctggatggagtgcagtggcacgatctcggctcactgcaagctctgcctcctgggttcacaccattcttctgcctcagcctcccaagtagctgggactacaggtgcccgccaccatacccagctaattttttgtatctttactagagatggggtttcaccatgttaactaggatggtctcgatctcctgacctcgtgatccgcctgccttggcctcccaaagtgctgggattataggcatgagccaccgtgcccaaccttttttttttttttttgagacagagtctcactgtcagccaggctggagtgcagtggcatgaccttggctcattgcaacctctacctcctaggttcaagcaattctcctggctcagcctcccatgtaggtgggactggaagcatgtgccaccatgcccggccaagttttgtatttttagtagagacggagttttgccatgttggccaggctgatcttggactcctgacctcaggtgatatgcctgcctcagcctcccagagtggtgggaatacaggtgtgagccactgctgccagtctgaagtatattttaaagctgtgatgagttataaatgacattcagtaagctatgcatatttaagctgtagcatgtgataaatcttgagtttcatataatcccatgaaaccattaacatagtcacaataatgaacttaacacctttatatttacttggaacctttttataaaggctttctttctgttctccagacaaccaatgatttactttgctgtacagtagagtactttccattttctggaatgttagatgagtgatgtaataaagtgtttcctcttataatc

SEQ ID NO: 1427 - DNA, 564 bp, HOMO SAPIENS
acgtggtgtgcaaaggacccgtgaccttgagacatgtccatagaaactttccaaactgaagagcaaagaggaaaaaagagtgaagaaacagaacagaactgtggacaactacaataggtgaagcaggccaggcacggtggtcacgcctgtaatcctggcgctttgggaggctaaggtgggcagatcacctgaggtcaggagtttgagacaagactggccaacatggtgaaaccccgtctgtactgaaaatacaaaaaataaaaattttttttaaaaaaattagccaggtgtggtggcaggtgcctgtaatcccagctacttgggaggctgaggcacaagaatcccttgaagctgggaggcagaggttgcagtgagccaagatagcaccactgcactccaccctgggcagccagagtgaaaactccatctcaaaaaaaaaaaaaaaaaaaaaaggtaaaccatatatgcataatgaaaaaaacaaaagaagagagaagaaatatctccagtaaaagtggctatttccaaaattaatggcagatgccaaactacagatccaggaag

SEQ ID NO: 1428 - DNA, 337 bp, HOMO SAPIENS
  misc_feature (106)..(106): n is a, c, g, or t
  misc_feature (108)..(108): n is a, c, g, or t
  misc_feature (168)..(168): n is a, c, g, or t
  misc_feature (298)..(298): n is a, c, g, or t
cttcccagccttcggaactatggagcccgcactctccagttcatcaccaccccagcatccctactcttgcatctaacagtttccgctattttgcaccacctgcctngnccttatgggcaactcaaggaagaaaggaaagaagagatagaggaaaaatggattcaacanatgaaagtgttctttctgactactgctgtgtttacaaacattttaatcatcaaaacatgctttatttgatagaaagatcaaatctgcctttgtaaaacaagagactattttaatcattaagacaacacanatgtttgatttggaggcgtgttctcattcaaaaccttgc

SEQ ID NO: 1429 - DNA, 358 bp, HOMO SAPIENS
  misc_feature (224)..(227): n is a, c, g, or t
gtaatcataggacagtgtctgtaataaaacactggaaacaacctcaatgtttaaagtattaaataaattagagtacattcatattcagactatatagctgttacggtagatcttggtgtggaaatgggatgatgtcaagtatttattaagtgagggagaaacgcaaattacaaaacagtacctctaattgctccatgtatatgattaatatatatatatatatnnnngtcttttcctatatgtatatatataaggaaactgccttatttttgaagttgctggttgggatttctctgttctttcagcccctgggggacacctcagttaaagcaagatcagtctgttggccgagagtggt

SEQ ID NO: 1430 - DNA, 537 bp, HOMO SAPIENS
  misc_feature (118)..(119): n is a, c, g, or t
  misc_feature (355)..(355): n is a, c, g, or t
  misc_feature (357)..(359): n is a, c, g, or t
  misc_feature (361)..(362): n is a, c, g, or t
  misc_feature (364)..(364): n is a, c, g, or t
  misc_feature (367)..(368): n is a, c, g, or t
  misc_feature (371)..(372): n is a, c, g, or t
  misc_feature (374)..(377): n is a, c, g, or t
  misc_feature (379)..(387): n is a, c, g, or t
  misc_feature (391)..(392): n is a, c, g, or t
  misc_feature (396)..(405): n is a, c, g, or t
  misc_feature (407)..(407): n is a, c, g, or t
  misc_feature (410)..(415): n is a, c, g, or t
  misc_feature (492)..(492): n is a, c, g, or t
  misc_feature (509)..(509): n is a, c, g, or t
cccctccagctgaagtatcttcaagagtatttaaagggccagcaccaattgcccccctctttcatttttctctttttccccttttgggagccagacattaaaagactaggaaattcannaacaactatggggaaaataagaaaatttagaaaattagacagtgactgcatgctcagggaaaggtacagctcaaaaaagatctggaaagaccttaaatttccatcttgggttgatcctctgcacagaaacagcctgcaacaatcaaaacaagaacaataaataaaaataacaaaaacagcaaacctagggcaaggggaggaagaatctaatttctagagttaccacattattagantnnncnngnccnntgnncnnnnannnnnnnnnagannaaannnnnnnnnntncannnnnncaggaaaatatggccatttaaagggaaaacaaaatcagcagaaactatccctaaaagaaaggccagatgatagatcntactagacagagactcntaaaacatctgccttaaagatgctgaga

SEQ ID NO: 1431 - DNA, 3027 bp, HOMO SAPIENS
attctggcaaagtggtttgctcttttcactctgctttgggtgttgaaggaagacgagcttctcacggagcctctcttgagcctcttggcagtttccccctctgtgcccctcacgtttccaccagaaacgtgaaggcagaggccacagattctccctgagccacctcacttggaagcaccatgtccggatgagatcgcacttcctgcagtgggcattagccacgtccagaaataaagaccagatcaccaacatcttttccgggtttgcgggactcctcgccatcctcctggtcgttgcggttttctgcatcttgtggaattggaataaacggaagaagcgacaagttccttacctccgagttaccgtcatgcccttgctgactttgccacaaaccagacaaagagccaaaaatatttatgacatcttgccttggcgacaggaagacctggggagacatgagtcgaggagtatgcgcattttcagtactgagagcctcctctccagaaattctgagagcccggagcatgtgccctcccaagcaggcaatgccttccaggagcatacagcccacatccatgccacagagtacgcggtgggtatctatgacaacgccatggtcccccagatgtgtgggaacctcactccctcggcacactgcatcaatgtcagagcttccagagactgcgcaagcatttcttcagaggattcgcatgattatgtcaatgtccccacagcagaagagattgctgagactctagcttctaccaaaagcccttccagaaatctctttgttcttcccagtacccagaagctggagtttactgaggaaagagatgagggctgtggagatgctggtgactgcaccagtttgtattctccaggagctgaggacagtgattcactcagcaatggagaaggttcttctcagatctcaaatgactatgtcaacatgacagggttggatctcagtgccatccaggaaaggcagctctgggtggcttttcagtgctgcagagactatgaaaatgttccagcagcagatcccagtggaagccagcagcaggctgagaaagatgtgccatcctcaaacataggtcatgtcgaggacaagacagatgatcccgggacccatgtccaatgtgtcaaaaggacattccttgcttcaggggattatgcagactttcagccattcacacagagtgaggacagtcagatgaaacatagagaagagatgtcaaatgaggactccagtgactatgaaaatgtgctaactgccaagttaggaggcagggactctgagcaggggcctggcactcagctccttcctgatgaatgaagacccaggtacccagccataaagccacattgagtagtctatcccataggattgactactgcagagtctagtgcagacccgtgatcaccttagtgcttcagtggattcactggttagattaaaaagaggctgagatgagcagtgaactaagaggccacacaaaagcagaggtttgggaattccagaagggaattcttctcaagcagagtgtggttatctcctgtaccagcctaagaatgtttgctgaaactgcttcctagaactgtgaagaaagcaggaaagtagtgcacagtagtctaagattattaccttcattaataccaacaggctgcaaagcaagagtatagattattgtataatccagtcagaggtcaaaaggaaggaagaagttggagtggagtggggtgggcaatttccattttaaagagtgtaggcaggccaggtgcagtggctcatgcctgtaatcccagcattttggtaggccgaggagggcagatcacttggtgccaggagttctagaccagcctggccaacatgacccatctttactaaaaatacaaaaattagccaggcgtggtggtgtgcccctgtaatcccagctactcaggaggctgaagcaggagaatcgcttgaacccgggaggtggaggttgcagcaagccgagattgtgccactgtactccagcctggtgacagagcgagactccctctcaaaaaaaaaaacaaacaaaaaagaagtgtgggcaaccaaatgtaggtaaggatgaagaagaacaggaactctcactggtggctgatgggattgcaaagcgtcagggcagctttgaaaaacttttcagcagtttcttataagcataacttatcatatggcccagccatttcactactagaaattgacgcaagtgaactgaaaacttatgttcacacaaaaactcgcacatgactgtttatagcagcttcattcataattaccaaaaactagaaataacccagatatccttcaacaggtgattggataagctgttgatatccattccttgagtttatccatactcaacagtaaaaaatgaactcttggttcacacaataatatagacatatcttaaatccattttgctaagtgaaagaagctaggcctaaaagtctacatgttgggcgattctatttatatgacattctggaaaaggcaaaactatagggatgaagaacagatcagttgttgtcaggtttgagaaaaggagggaagtttgctacaaaggggctgcaaagggaataggctgatggagctgttctgtatggtactgtgtggtggatacatgacaatatccatttgcaaacacaagaactatacacatggccaggcgcggtggctcacacccgtaatcccagcactttgcggggccgaggcaggggaacacaaggtcaggagatcaagactgtcctggacaacatggtgaaaccctgtctctactgtctctaacatttgtaaacctgtctctaatttgtaatttgtaaaccctgtctctcatatttgtaaaactacaaaaattagcttggcatggtggtgtgcgcctgtagtcccagctactaggaggctgaggcaggagaatcacttgaaccaggaaggcggactgcattccagcctgggcaacagagaaagactctgtctcaaaaaaaaaaaaaaaaaaaaaa

SEQ ID NO: 1432 - DNA, 2237 bp, HOMO SAPIENS
ccctcggcggctgctgcgccgcgctcccggcgcactcggagcccggcggggaccgggaggcagagacggggcggccgtggctccgagggcgggagctgagccgggccccgggaccgaagtttggcggcggctccgggaggcagagcgggctccccgggcgacttccaggcccctctcgcgtcctcgccccggacccgtgggcagccggggggaacggaagccgcggccgggccaactccgaggcggggacgccgcgacgggaacttgaggcccgagagggatgtgaaggcccaaaatgaccctcttaccgggagacaattctgactacgactacagcgcgctgagctgcacctcggacgcctccttccacccggccttcctcccgcagcgccaggccatcaagggcgcgttctaccgccgggcgcagcggctgcggccgcaggatgagccccgccagggctgtcagcccgaggaccgccgccgtcggatcatcatcaacgtaggcggcatcaagtactcgctgccctggaccacgctggacgagttcccgctgacgcgcctgggccagctcaaggcctgcaccaacttcgacgacatcctcaacgtgtgcgatgactacgacgtcacctgcaacgagttcttcttcgaccgcaacccgggggccttcggcactatcctgaccttcctgcgcgcgggcaagctgcggctgctgcgcgagatgtgcgcgctgtccttccaggaggagctgctgtactggggcatcgcggaggaccacctggacggctgctgcaagcgccgctacctgcagaagattgaggagttcgcggagatggtggagcgggaggaagaggacgacgcgctggacagcgagggccgcgacagcgagggcccggccgagggcgagggccgcctggggcgctgcatgcggcgactgcgcgacatggtggagaggccgcactcggggctgcctggcaaggtgttcgcctgcctgtcggtgctcttcgtgaccgtcaccgccgtcaacctctccgtcagcaccttgcccagcctgagggaggaggaggagcagggccactgttcccagatgtgccacaacgtcttcatcgtggagtcggtgtgcgtgggctggttctccctggagttcctcctgcggctcattcaggcgcccagcaagttcgccttcctgcggagcccgctgacgctgatcgacctggtggccatcctgccctactacatcacgctgctggtggacggcgccgccgcaggccgtcgcaagcccggcgcgggcaacagctacctggacaaggtggggctggtgctgcgcgtgctgcgggcgctgcgcatcctgtacgtgatgcgcctggcgcgccactccctggggctgcagacgctggggctcacggcccgccgctgcacccgcgagttcgggctcctgctgctcttcctctgcgtggccatcgccctcttcgcgcccctgctctacgtcatcgagaacgagatggccgacagccccgagttcaccagcatccctgcctgctactggtgggctgtcatcaccatgacgacggtgggctatggcgacatggtccccaggagcaccccgggccaggtagtggccctgagcagcatcctgagcggcatcctgctcatggccttcccagtcacctccatcttccacaccttctcccgctcctacctggagctcaagcaggagcaagagagggtgatgttccggagggcgcagttcctcatcaaaaccaagtcgcagctgagcgtgtcccaggacagtgacatcttgttcggaagtgcctcctcggacaccagagacaataactgagcgcggaggacacgcctgccctgcctgccatctgtggcccgaagccattgccatccactgcagacgcctggagagggacaggccgcttccgagtgcagtcctggcgcagcaccgactcccacgcacccggggaaggacaccctcactcccacaccccgggaagaacactagaacatcagcagaggggccctgcccctccgcctgcagccgtgaaaggaagctgggtcatcagcccagccccgcccaccccagcccctatgtgtgtttccctcaataaggagatgccttgttcttttcaccatgcaaataacatgcccagcaaaaacttgctttatgggtctgcctggagaaaaaaaaaaaaaatacaaacagcagaaacagcaaaaaaaaaaaaaaaaaa

SEQ ID NO: 1433 - DNA, 332 bp, HOMO SAPIENS
atccttaaaactggccaggctctggagctgagttcaatttgacatgtctaaactttcttcttgagtaaccagattttcccttacagtcttttgtcacttaagagaactcataggcaatcgtccatccaaaacaagtctttctccttcagggaggacccatctttggaaactccagctggtttcctgtgcagtgcttatggtgccacctctcgttatatttagaaaaatggtctcacgtaacttgagaaaaaacatttcagtgaccaaagccgggtaccattggaacaccaaggtaatttacttgtttgctcaattggaaaacgctggctcta

SEQ ID NO: 1434 - DNA, 4501 bp, HOMO SAPIENS
gtcggtgcctgcagggctctccgtggccgctcgggagaggtgctcttcgctcaggctcccccggagacttgagggggtgcgcgctggcgtgcatggggcctgttctgtccttggtttggggatgctcctaaggggggagaaagggatacctcgggtgcttggaggtcgagagacggatacgtaagtgcgcaagggccactgattagggcacgggaagggctcgctagaatgagctcttaaactggttgggtgtaagcggttttgggctagtctaaaccaaacaactgagaataaacgcggggttcctgcaggttgagagagtacctgtctgcaaatgtccagtagtgatggattgccttgtaggccccagagcaatcggggaagttagcattcttgttcaagaagctgctggttcacttagagctataaaagaatgttgtgagtttggattttcttccaaacgttcaggattgaggttagggctggtggtgagggatcatgtaaagaggtttgagtggctcagccttaggtcccggtgtggaaagcttattcttttggtgtcatcacgtggccgtgggaattatttagaatgtgatctgccctcatgagaagaaaggagctctgaagccgttgcagttcttcctccctatgtggaaaatcgaatttctggaaacatcctccgtattgggagattttgcctatgtaaaggctatccttattggctagcggcactaattactttaaaagtaggatggaagtacaagtatctcaagcatcattgggtttcgagctcacttctgtggaaaagagtttaagggagtggtctagactttccagggaagttattgcctggctgtgtccctctagtcctaattttatacttaactttcccccacctccttcagcctcatctgtttcaatggtgcaactcttttcatccccttttggttaccagtcaccttcaggccattcagaggaggaaagagaggggaatatgaagtcagccaagccccaagtgaaccacagtcagcatggggaaagccagcgggccttgagccccctgcagtctactctgagttctgctgcatctccttcccaagcgtatgagacctatattgaaaatggactcatatgccttaaacacaaaattagaaacatcgagaaaaagaagctcaaactggaggattataaggatcgcctgaaaagtggagagcatcttaatccagaccagttggaagctgtagagaaatatgaagaagtgctacataatttggaatttgccaaggagcttcaaaaaaccttttctgggttgagcctagatctactaaaagcgcaaaagaaggcccagagaagggagcacatgctaaaacttgaggctgagaagaaaaagcttcgaactatacttcaagttcagtatgtattgcagaacttgacacaggagcacgtacaaaaagacttcaaagggggtttgaatggtgcagtgtatttgccttcaaaagaacttgactacctcattaagttttcaaaactgacctgccctgaaagaaatgaaagtctgagtgttgaagaccagatggagcagtcatccttgtacttttgggaccttttggaaggtagtgagaaagcagtggtaggaacgacatacaaacacttgaaggatctactgtctaaattgctgaactcaggctattttgaaagtatcccagttcccaaaaatgccaaggaaaaggaagtaccactggaggaagaaatgctaatacaatcagagaaaaaaacacaattatcgaagactgaatctgtcaaagagtcagagtctctaatggaatttgcccagccagagatacaaccacaagagtttcttaacagacgctatatgacagaagtagattattcaaacaaacaaggcgaagagcaaccttgggaagcagattatgctagaaaaccaaatctcccaaaacgttgggatatgcttactgaaccagatggtcaagagaagaaacaggagtcctttaagtcctgggaggcttctggtaagcaccaggaggtatccaagcctgcagtttccttagaacagaggaaacaagacacctcaaaactcaggtctactctgccggaagagcagaagaagcaggagatctccaaatccaagccatctcctagccagtggaagcaagatacacctaaatccaaagcagggtatgttcaagaggaacaaaagaaacaggagacaccaaagctgtggccagttcagctgcagaaagaacaagatccaaagaagcaaactccaaagtcttggacaccttccatgcagagcgaacagaacaccaccaagtcatggaccactcccatgtgtgaagaacaggattcaaaacagccagagactccaaaatcctgggaaaacaatgttgagagtcaaaaacactctttaacatcacagtcacagatttctccaaagtcctggggagtagctacagcaagcctcataccaaatgaccagctgctgcccaggaagttgaacacagaacccaaagatgtgcctaagcctgtgcatcagcctgtaggttcttcctctacccttccgaaggatccagtattgaggaaagaaaaactgcaggatctgatgactcagattcaaggaacttgtaactttatgcaagagtctgttcttgactttgacaaaccttcaagtgcaattccaacgtcacaaccgccttcagctactccaggtagccccgtagcatctaaagaacaaaatctgtccagtcaaagtgattttcttcaagagccgttacaggctacttcttctccagttacttgtagctcaaatgcttgcttggttactaccgatcaggcttcttctggatctgaaacagagtttatgacctcagagactcctgaggcagcaattcccccaggcaagcaaccgtcttcactagcttctccaaatcctcccatggcaaagggctctgaacagggcttccagtcacctccagcaagtagtagttcagtaaccattaacacagcaccctttcaagccatgcagacagtatttaacgttaatgcacctctgcctccacgaaaagaacaagaaataaaagaatccccttattcacctggctacaatcaaagttttaccacagcaagtacacaaacaccaccccagtgccaactgccatctatacatgtagaacaaactgtccattctcaagagactgcagcaaattatcatcctgatggaactattcaagtaagcaatggtagccttgccttttacccagcacagacgaatgtgtttcccagacctactcagccatttgtcaatagccggggatctgttagaggatgtactcgtggtgggagattaataaccaattcctatcggtcccctggtggttataaaggttttgatacttatagaggactcccttcaatttccaatggaaattatagccagctgcagttccaagctagagagtattctggagcaccttattcccaaagggataatttccagcagtgttataagcgaggagggacatctggtggtccacgagcaaattcgagagcagggtggagtgattcttctcaggtgagcagcccagaaagagacaacgaaacctttaacagtggtgactctggacaaggagactcccgtagcatgacccctgtggatgtgccagtgacaaatccagcagccaccatactgccagtacacgtctaccctctgcctcagcagatgcgagttgccttctcagcagccagaacctctaatctggcccctggaactttagaccaacctattgtgtttgatcttcttctgaacaacttaggagaaacttttgatcttcagcttggtagatttaattgcccagtgaatggcacttacgttttcatttttcacatgctaaagctggcagtgaatgtgccactgtatgtcaacctcatgaagaatgaagaggtcttggtatcagcctatgccaatgatggtgctccagaccatgaaactgctagcaatcatgcaattcttcagctcttccagggagaccagatatggttacgtctgcacaggggagcaatttatggaagtagctggaaatattctacgttttcaggctatcttctttatcaagattgaaagtcagtacagtattgacaataaaaggatggtgttctaattagtgggattgaaggaaaagtagtctttgccctcatgactgattggtttaggaaaatgtttttgttcctagagggaggaggtccttacttttttgttttccttcctgaggtgaaaaatcaagctgaatgacaattagcactaatctggcactttataaattgtgatgtagcctcgctagtcaagctgtgaatgtatattgtttgcacttaatccttaactgtattaacgttcagcttactaaactgactgcctcaagtccaggcaagttacaatgccttgttgtgcctcaataaaaaagttacatgcacaaaaaaaaaaaaaaaa

SEQ ID NO: 1435 - DNA, 683 bp, HOMO SAPIENS
ctgcgcagatgaggggagactcgtcaccaggcgtgcagtgggcactgctgggctcccccatcccgtcctaacccggaacagccccgggcaggaggcgtggaaagtcgagggggtaaaccgcgaatgtgcgttgtgtaagccacggcgcagggtggggcgcgggcgggacttgggcgggcggggtgggcttggccgagctggcctccggggcaccgaccgctataaggccagtcggactgcgacacagcccatcccctcgaccgctcgcgtcgcatttggccgcctccctaccgctccaagcccagccctcagccatggcatgccccctggatcaggccattggcctcctcgtggccatcttccacaagtactccggcagggagggtgacaagcacaccctgagcaagaaggagctgaaggagctgatccagaaggagctcaccattggctcgaagctgcaggatgctgaaattgcaaggctgatggaagacttggaccggaacaaggaccaggaggtgaacttccaggagtatgtcaccttcctgggggccttggctttgatctacaatgaagccctcaagggctgaaaataaatagggaagatggagacaccctctgggggtcctctctgagtcaaatccagtggtgggtaattgtacaataaattttttttggtcaaattt

SEQ ID NO: 1436 - DNA, 6194 bp, HOMO SAPIENS
aagggggcaaagcctcggtcttcatagaaaaggagaggaggcaaacgcagcccaaactggggggtttctcttcaaagccagctggtctggctttattctgcaggaatttttttacctgtcagggtttggacaacaaagccctcagcaggtgctgacgggtacaacttcctggagaagcagaaaggcactggtgccaaagaagagttgcaaactgtgaagtaacttctatgaagagatgaagtaaagaacggaaggcaaatgattgtggcagtaaagaagtgtatgtgcaggaacgaatgcaggaatttgggaactgagctgtgcaagtgctgaagaaggagatttgtttggaggaaacaggaaagagaaagaaaaggaaggaaaaaatacataatttcagggacgagagagagaagaaaaacggggactatggggagaaaaaagattcagattacgaggattatggatgaacgtaacagacaggtgacatttacaaagaggaaatttgggttgatgaagaaggcttatgagctgagcgtgctgtgtgactgtgagattgcgctgatcatcttcaacagcaccaacaagctgttccagtatgccagcaccgacatggacaaagtgcttctcaagtacacggagtacaacgagccgcatgagagccggacaaactcagacatcgtggaggcattgaacaagaaagaaaacaaaggctgtgaaagccccgatcccgactcctcttatgcactcaccccacgcactgaagaaaaatacaaaaaaattaatgaagaatttgataatatgatcaagagtcataaaattcctgctgttccacctcccaacttcgagatgccagtctccatcccagtgtccagccacaacagtttggtgtacagcaaccctgtcagctcactgggaaaccccaacctattgccactggctcacccttctctgcagaggaatagtatgtctcctggtgtaacacatcgacctccaagtgcaggtaacacaggtggtctgatgggtggagacctcacgtctggtgcaggcaccagtgcagggaacgggtatggcaatccccgaaactcaccaggtctgctggtctcacctggtaacttgaacaagaatatgcaagcaaaatctcctcccccaatgaatttaggaatgaataaccgtaaaccagatctccgagttcttattccaccaggcagcaagaatacgatgccatcagtgaatcaaaggataaataactcccagtcggctcagtcattggctaccccagtggtttccgtagcaactcctactttaccaggacaaggaatgggaggatatccatcagccatttcaacaacatatggtaccgagtactctctgagtagtgcagacctgtcatctctgtctgggtttaacaccgccagcgctcttcaccttggttcagtaactggctggcaacagcaacacctacataacatgccaccatctgccctcagtcagttgggagcttgcactagcactcatttatctcagagttcaaatctctccctgccttctactcaaagcctcaacatcaagtcagaacctgtttctcctcctagagaccgtaccaccaccccttcgagatacccacaacacacgcgccacgaggcggggagatctcctgttgacagcttgagcagctgtagcagttcgtacgacgggagcgaccgagaggatcaccggaacgaattccactcccccattggactcaccagaccttcgccggacgaaagggaaagtccctcagtcaagcgcatgcgactttctgaaggatgggcaacatgatcagattattacttactagtttttttttttttcttgcagtgtgtgtgtgtgctataccttaatggggaaggggggtcgatatgcattatatgtgccgtgtgtggaaaaaaaaaaagtcaggtactctgttttgtaaaagtacttttaaattgcctcagtgatacagtataaagataaacagaaatgctgagataagcttagcacttgagttgtacaacagaacacttgtacaaaatagattttaaggctaacttcttttcactgttgtgctcctttgcaaaatgtatgttacaatagatagtgtcatgttgcaggttcaacgttatttacatgtaaatagacaaaaggaaacatttgccaaaagcggcagatctttactgaaagagagagcagctgttatgcaacatatagaaaaatgtatagatgcttggacagacccggtaatgggtggccattggtaaatgttaggaacacaccaggtcacctgacatcccaagaatgctcacaaacctgcaggcatatcattggcgtatggcactcattaaaaaggatcagagaccattaaaagaggaccatacctattaaaaaaaaatgtggagttggagggctaacatatttaattaaataaataaataaatctgggtctgcatctcttattaaataaaaatataaaaatatgtacattacattttgcttattttcatataaaaggtaagacagagtttgcaaagcatttgtggctttttgtagtttacttaagccaaaatgtgtttttttccccttgatagcttcgctaatattttaaacagtcctgtaaaaaaccaaaaaggactttttgtatagaaagcactaccctaagccatgaagaactccatgctttgctaaccaagataactgttttctctttgtagaagttttgtttttgaaatgtgtatttctaattatataaaatattaagaatcttttaaaaaaatctgtgaaattaacatgcttgtgtatagctttctaatatatataatattatggtaatagcagaagttttgttatcttaatagcgggaggggggtatatttgtgcagttgcacatttgagtaactattttctttctgttttcttttactctgcttacattttataagtttaaggtcagctgtcaaaaggataacctgtggggttagaacatatcacattgcaacaccctaaattgtttttaatacattagcaatctattgggtcaactgacatccattgtatatactagtttctttcatgctatttttattttgttttttgcatttttatcaaatgcagggcccctttctgatctcaccatttcaccatgcatcttggaattcagtaagtgcatatcctaacttgcccatattctaaatcatctggttggttttcagcctagaatttgatacgctttttagaaatatgcccagaatagaaaagctatgttggggcacatgtcctgcaaatatggccctagaaacaagtgatatggaatttacttggtgaataagttataaattcccacagaagaaaaatgtgaaagactgggtgctagacaagaaggaagcaggtaaagggatagttgctttgtcatccgtttttaattattttaactgacccttgacaatcttgtcagcaatataggactgttgaacaatcccggtgtgtcaggacccccaaatgtcacttctgcataaagcatgtatgtcatctattttttcttcaataaagagatttaatagccatttcaagaaatcccataaagaacctctctatgtccctttttttaatttaaaaaaaatgactcttgtctaatattcgtctataagggattaattttcagaccctttaataagtgagtgccataagaaagtcaatatatattgtttaaaagatatttcagtctaggaaagattttccttctcttggaatgtgaagatctgtcgattcatctccaatcatatgcattgacatacacagcaaagaagatataggcagtaatatcaacactgctatatcatgtgtaggacatttcttatccattttttctcttttacttgcatagttgctatgtgtttctcattgtaaaaggctgccgctgggtggcagaagccaagagaccttattaactaggctatatttttcttaacttgatctgaaatccacaattagaccacaatgcacctttggttgtatccataaaggatgctagcctgccttgtactaatgttttatatattaaaaaaaaaaaatctatcaaccatttcatatatatcccactactcaaggtatccatggaacatgaaagaataacatttatgcagaggaaaaacaaaaacatccctgaaaatatacacactcatacacacacacgcacaggggaataaaataagaaaatcattttcctcaccatagacttgatcccatccttacaacccatccttctaacttgatgtgtataaaatatgcaaacatttcacaaatgttctttgtcatttcaaaatactttagtatatcaatatcagtagataccagtgggtgggaaagggtcattacatgaaaatatgaagaaatagccatattagttttttaacctgcaatttgcctcagcaacaaagaaaaagtgaatttttaatgctgaagataaagtaagctaaagtaccagcagaagccttggctatttatagcagttctgacaatagttttataagaacatgaagagaacagaatcacttgaaaatggatgccagtcatctcttgttcccactactgaattcttataaagtggtggcaagatagggaagggataatctgagaatttttaaaagatgatttaatgagaagaagcacaattttgattttgatgagtcactttctgtaaacaatcttggtctatctttacccttataccttatctgtaatttaccatttattgtatttgcaaagctagtatggtttttaatcacagtaaatcctttgtattccagactttagggcagagccctgagggagtattattttacataacccgtcctagagtaacattttaggcaacattcttcattgcaagtaaaagatccataagtggcattttacacggctgcgagtattgttatatctaatcctattttaaaagatttttggtaatatgaagcttgaatactggtaacagtgatgcaatatacgcaagctgcacaacctgtatattgtatgcattgctgcgtggaggctgtttatttcaacctttttaaaaattgtgttttttagtaaaatggcttattttttcccaaaggtggaatttagcattttgtaatgatgaatataaaaatacctgtcatccccagatcatttaaaagttaactaaagtgagaatgaaaaaacaaaattccaagacactttttaaaagaatgtctgccctcacacacttttatggatttgtttttcttacatacccatcttttaacttagagatagcattttttgccctctttattttgttgtttgtttctccagagagtaaacgctttgtagttctttctttaaaaaacattttttttaaagaagaagaagccacttgaaccctcaataaaggctgttgcctaagcatggcatacttcatctgttctcatttgtgccatctgccgtgatgtcgtcacttttatggcgttaatttcctgccactacagatcttttgaagattgctggaatactggtgtctgttagaatgcttcagactacagatgtaattaaaggcttttcttaatatgttttaaccaaagatgtggagcaatccaagccacatatcttctacatcaaatttttccattttggttattttcataatctggtattgcattttgccttccctgttcatacctcaaattgattcatacctcagtttaattcagagaggtcagttaagtgacggattctgttgtggtttgaatgcagtaccagtgttctcttcgagcaaagtagacctgggtcactgtaggcataggacttggattgcttcagatggtttgctgtatcatttttcttctttttcttttcctggggacttgtttccattaaatgagagtaattaaaatcgcttgtaaatgagggcatacaagcatttgcaacaaatattcaaatagaggctcacagcggcataagctggactttgtcgccactagatgacaagatgttataactaagttaaaccacatctgtgtatctcaagggacttaattcagctgtctgtagtgaataaaagtgggaaattttcaaaagtttctcctgctggaaataaggtataatttgtattttgcagacaattcagtaaagttactggctttcttagtgaaaaaaaaaaa

SEQ ID NO: 1437 - DNA, 4811 bp, HOMO SAPIENS
ctccacctggcaggaccaaagttggggcagtagccgaagcaccgccccccgggccccgcaggagtgtgcagtcacccagttaggcctatcttggcctgcccatcactcctggcctgcggtctcctaaccctgtggcagcagcagcattccctgaatggatcgaaggctgccatggtgtcgtccgctgaattgctataggagtcagcccagggctgctcatgtgcacctcaggttgctgatggcagctctagttatttggggatggaagtttggggagagtgggccttggtccaccctgtgcgaaagggaattccacagccccccgggcgcccgcccccgcccccgccccgccccctccccgccccttccccgccgggccccgggccccgcccccgctctccatagttaccgcgctgtggaggcggcggccatcttggcggcggagcgatgagcgggtctaacccgaaggctgcggccgcggcgtcggcggctgggcccggggggctggtggctggcaaggaggagaagaagaaggcgggcggcggcgtcctgaaccgcctgaaggcgcggcggcaggcgccccaccacgcggccgacgacggcgtcggggcagcggtcacggagcaggagctgctggcgctggacaccatccggcccgagcacgtcctgcgcctcagccgggtcaccgagaattatttatgtaaacccgaagacaacatctacagtattgatttcacccgcttcaaaattcgagatttggagacagggacagtactttttgagattgccaaaccttgcgtttcagaccaggaggaggatgaggaggagggaggtggagacgtggacatcagcgcaggacgttttgtccgctatcagttcacaccggcatttctccgcctccggacagtcggggctacggtggagttcacagtgggagacaaacctgtttcaaacttccggatgatcgaacggcactatttccgggaacacttgctgaaaaactttgactttgattttggcttctgcatccccagcagtaggaacacttgtgaacatatctatgagtttccccagctttcggaggatgtcattcgtctaatgattgaaaatccttacgagacccgctctgacagcttctactttgttgacaacaagctgataatgcacaacaaggctgattatgcctataatggaggccagtaagtgctgcaagagtagataggggaggtgctttgccgcggccacaagatcctggcacacggagatgatcgaagctgcagtttgtcaacacacatctggaacctggccccaggaagccaaggctggggtggcagtttcctgcgcgccaaaggagctgccaaacagtgctgtgttttcttccccagtattttttcttccctttttttcctgccccgtaggttgcagaggtactatagtaaagtaaaaggttaggataagggtcctggaatccagataaaaaagtttattttccgtagttctggctgcctgttggttgtcttgacgaccaggcatagctgtgcctggtgagaaggctctggccaggcccaccagcaggtcagcagctcttaaggttcctgggtgctgtgggaagctgaaaggtaggcctcttccaggtagctcctcctctcacctccggcattgccatcagcgcagtctgccctcggtctgtgtgaagtcttaaaccaactggaagacacttgaaagggtggggagggagggaggtgccaagagtggaggcaccaaggaatgggtgatgctgccaagctgaagggtctgctttgtggagaggctgctgctctgtctgacttccagggtctcagccagccctcctgggaatagaccaagttttcagcctggcagtgccttctgttcccattttggaggacagacaagcttgctccacatctcctggctcctcccttctgagtctcatgaaatagaatgagtcagctctgctcatggaacagtagtatctcttgaggccagagcaggtcttgtattttgtttttttatttccagacttctttcggggaggttttataaaatgacagtggtgttcccagcatatgtgatatgtggttagacttctgatagtatcagcttccaggggctaatctggcttatgttgggaggatatgcttacgaatcagcagcagctttctaaaggagagatttgacttttctctgcactgcacagcctggaggattggcttttgatggggatttgcctccgaagctctttgtacatttcttgtttaggagggttttcctatctacctttctactgaagtagtttctggaactttcctggtggatcagagttacgtaatgcagtctgagccttcagactgctagttagaattgttttaggtgttcagaaagggcaaaataggctgatgtggcctgtcagagtgatgtgttctcaaaaaagttcacttgcacatctgtgggctgcttttgtcctcagacccttagtggacagactccacaaaccctctgatgagacgattgatgtggccagggtccagttagcatcagtagaaggatgtcactaggaaaggcccaggtatctggtaagtgactgtgaggtgtcacagtacctgtgacaggagagtgtcctgatgtgcttgggagaaaggccgtatgggggccagggatggaagagacagtgtgtggccacagaaattcctgtccatccaccaccagtgctgctccctgtgtgggctttagggcgagtggccccgaaccttggcccagtgctttgtcccaggccagagtcttggcaatgccacatgctggcagctttctcactgagaaggtcctagcttacccctgtgtgctggccttggattcagccccgagagaggggagagaccattcctcctgtggagtgggttccttatcaccagaccggccactctcagaactggcgtccactgtaaatccaggtgccttacgtgtggctctgtcccttatgctgcaggggaaagctgcattgccattgttcccacctcctcactggcagaaagatgccagggctgttagcactgtctcctcaccttctgtttctcattgtggctcctcaaatgggatttgcatgttcctgtcaagcgtaacaacaatcccttctctctttgacagaggcccaggtgggacagtttctactatttgatatttgagtattatctgggatgtggttctggagctgcccagagctgtgcttagtagagtgtgtcttggaaacatgcccctgggcacactgtatctgctacattagtgggctatctcttatctgcagtgttcgcttttgctagaaagaggatgtggaggaaggaggaggtgggcaatctggcttgagttgtgctgtatcctcttccttgttagcttgccttagtctcactggagaccatttgcggatagtgcttggtccatgcccagcaggacagggctttgctgcttctgaaagtctggtgttctgtatctggggctgtgggttcctgtgtctagctgctcaggaaatcttgagaagcattccactctggggtgtaaaccagtatgagtttgaaattcaagcgtttgtacctgagttggggagagaattgcaaggcatactttctctgaaagtaacagaaccattcaggctgccatgttattaaggaatctgaactgttgatagcagttaccttgtgggtgatacaatgggaggcggcaaaaaaactacctgcataggagaccctgccctttgtcaagagctgggagcacatttcatcagagtagcaggcccacctggtgccagagggcctgcccctcctgcttctgttcctttgccttgcagtctcctggagagagcctctcttttcctgtacagcctttgggccaaaatgcccttctagcttctccaaagaagatccgagtttatttcattctatgttttaagaggtaaaaggacataacaagtgaaagaagttttgggctaaagtaggctatgtctccttatgtattactcaatactgttttgcagagaaaacatttttcaagcatgtgcttcctgaagacacctcagtctttgggccatttgatttccaatacatagggtggaagaatgtgattttggggctgaccataaactggaaatttgtgaaatggcagtgattgggcaatcttcagtttattttttcagttgaagtggaactcatttctggaatggatttaataggctgtgtctaatgtacaaactgggtgagtcctgccttagtgtgtcctgccccaccggtacgcttccaggatactcttttcccctctgtaaagtcactttcttctgatggccagtgtcactatgatgtcagtgaggtctggggatgaggacagtgtgtcctgaaattcacaggactgactcctcaccccagtgcacgaggattcctgtggcatcaggtgctgctgtacctggtgtaggagcctaatcattgaaccattgtgttactcacattccatgtcacagaacatatcagcctcaagaaggatttggtggaggtggatttaccactggttttacaaaggaccgtgtaaagtcattgaagttgtgaaagtctattttttttcctgtaaatctattttttacagaatataagaaacatcaatgacctgatctgtccttcctcctccttcccgcttcccccaaaatcacattccagtttttattgtctttgtgtccaaagtaaactaggtgacttatttgtataaaatgttattttgccacatgagacagtaataaaagaaagattttcacagta

SEQ ID NO: 1438 - DNA, 2581 bp, HOMO SAPIENS
aatgaatgaatgaatgaatgagtgaatgaatcaacgaaggagtgagtcaaggcccgggaaccacagactccaagcctacgcagagcccgggaagggggattccggaggggcggggcctctttccggaagcgcccgccgggggcggggagggggcggggccatccgcgtgaggcgaccctgttggtccggaggggcggggcgaggaggaggacccgcttgggcggttcggctgcccacagtaaccgctgggtggacctggccagcgctccgaaccttgtcctcgctgcgcgccggcccctcggagccccacagcccgggaaggaggccgccgcgggccgggcgcccgctctgccaagcggacccgcaacccggaaaggcggcgcggcggagcctggagccggatcctgctcagaccgggccccggccggccagagccgcgggcatgtcggaggcgcggaaggggccggacgaggcggaggagagccagtacgactctggcattgagtctctgcgctctctgcgctccctacccgagtccacctcggctccagcctccgggccctcggacggcagcccccagccctgcacccatcctccgggacccgtcaaggaaccacaggagaaggaagacgcggatggggagcgggctgattccacctatggctcctcctcgctcacctacaccctgtccttgctggggggccccgaggctgaggacccggccccacgcctgccactcccccacgtgggggcgctgagccctcagcagctggaagcactcacttacatctccgaggacggagacacgctggtccacctggcagtgattcatgaggccccagcggtgctgctctgttgcctggctttgctgccccaggaggtcctggacattcaaaataacctttaccagacagcactccatctggctgtacatctggaccaaccgggcgcagttcgggcactggtgctgaagggggccagccgggcactacaggaccggcatggtgacacagcccttcatgtggcctgccagcgccagcacttggcctgtgcccgctgcctgctggaagggcggccagagccaggcagaggaacatctcactctctggacctccagctgcaaaactggcaaggtctggcttgtctccacattgccacccttcagaagaaccaaccactcatggaattgctgcttcggaatggagctgacattgatgtgcaggagggcaccagtggtaagacagcgctgcacctggctgtggaaacccaagagcggggcctggtacagttcctgctccaggctggtgcccaggtagatgcccgcatgctgaacgggtgcacacccctgcacctggcagctggccggggtctcatgggcatctcatccactctgtgcaaggcgggtgctgactccctgctgcggaatgtggaggatgagacgccccaggacctgactgaggaatcccttgtccttttgccctttgatgacctgaagatctcagggaaactgctgctgtgtaccgactgaagccaggcagggtctgggatcctcagggctccacctctccatctggaagccggagccataactgctgcagtttgggcccaggctatgtgctcttctggtgccctagggactgctgtggccagagcctggggccagccagtacagtcctgagccgaggaggagggactgcaagtggaagagagccagtctggaaggaagagctttccaggtggacagggcttcttggaagacccccaaagccccaggtatcctgggtgaagcctgtttgcctctcttgaaaatggcaggtgctcttgttttacccatgttgggtcagcctgaaactgccaaccagtaggaagcatggactctcctgagtgagaagagactgaaataggagcaagcagaaccctgagaggtgtcccatcttattgctgttgaggaccctgaaacaccgttgtttaaagacttcacacagaaggctctgaactgagccactggggaagggaagtttcagtaacatgacactaaaatggcagagacgttaaaaaaagtttttcccttctagagctgttttgcgcgcatgcatgtctgtgtgcattggggctttttagacaggcctgccctgtgactttgtggtagaggcagagagaaggaaattgtcccctgagcacggtagggccttgctgggtggggtcagaggccagtagttccaggcctttctctgtgtccagcacagacccttgtccttgctgtggaaatgatgagggatggagggacaagaggaagaatgagaggacacacgccctggagccctcaccactgccctgggggttgccatctggaggagcctggggataagggtaacccagggaggctgggcacgagggagctgactccacgtttttccccccgttcctcaccttcgagggccctgctaggtcacccctatgctggcatgaagagcatggggcaataaaccagcacagtctctgaccacttggagcgtctcatccagtgagagagacagccgttaaaagcataaacatccaaataaagatgcctttccaagtt

SEQ ID NO: 1439 - DNA, 492 bp, HOMO SAPIENS
gggttcaagaatttcatgacattccatgagaaggtgtttaaggtatatgtgtcttgggaagatttaattatggatgttcttggaacatttgggttgcagtactccaagttggggttctttcagtggttcctgtgggaatgtaggtaaattacctttaggggtacaggaacagtactagcccttacatttactagaaaattttaagttagacatctaaacaaacttgaagaatcttttttgagcattgtatgtttaatatgtaaaaggttgtggagttgattagaaaaattttttattttttttagtgatggggtttcaccatgtcgcttaggctgcacttgaactccttgctcaggagcacttgaactcctgggctcaagtaatctgcccacctcggcctcccaaagtgctgggattataggcataagccaccctgcctggcctataagaaaaattttgattttattattgccgccatatctctagagtatc

SEQ ID NO: 1440 - DNA, 6927 bp, HOMO SAPIENS; identical to SEQ ID NO: 261

SEQ ID NO: 1441 - DNA, 3958 bp, HOMO SAPIENS
ttttttttttttttttgcttaaaaaaaagccatgacggctctcccacaattcatcttccctgcgccatctttgtattatttctaatttattttggatgtcaaaaggcactgatgaagatattttctctggagtctccttctttctaacccggctctcccgatgtgaaccgagccgtcgtccgcccgccgccgccgccgccgccgccgccgcccgccccgcagcccaccatgtctcgccgcaagcaaggcaaaccccagcacttaagcaaacgggaattctcgcccgagcctcttgaagccattcttacagatgatgaaccagaccacggcccgttgggagctccagaaggggatcatgacctcctcacctgtgggcagtgccagatgaacttcccattgggggacattcttatttttatcgagcacaaacggaaacaatgcaatggcagcctctgcttagaaaaagctgtggataagccaccttccccttcaccaatcgagatgaaaaaagcatccaatcccgtggaggttggcatccaggtcacgccagaggatgacgattgtttatcaacgtcatctagaggaatttgccccaaacaggaacacatagcagataaacttctgcactggaggggcctctcctcccctcgttctgcacatggagctctaatccccacgcctgggatgagtgcagaatatgccccgcagggtatttgtaaagatgagcccagcagctacacatgtacaacttgcaaacagccattcaccagtgcatggtttctcttgcaacacgcacagaacactcatggattaagaatctacttagaaagcgaacacggaagtcccctgaccccgcgggttggtatcccttcaggactaggtgcagaatgtccttcccagccacctctccatgggattcatattgcagacaataacccctttaacctgctaagaataccaggatcagtatcgagagaggcttccggcctggcagaagggcgctttccacccactccccccctgtttagtccaccaccgagacatcacttggacccccaccgcatagagcgcctgggggcggaagagatggccctggccacccatcacccgagtgcctttgacagggtgctgcggttgaatccaatggctatggagcctcccgccatggatttctctaggagacttagagagctggcagggaacacgtctagcccaccgctgtccccaggccggcccagccctatgcaaaggttactgcaaccattccagccaggtagcaagccgcccttcctggcgacgccccccctccctcctctgcaatccgcccctcctccctcccagcccccggtcaagtccaagtcatgcgagttctgcggcaagacgttcaaatttcagagcaacctggtggtgcaccggcgcagccacacgggcgagaagccctacaagtgcaacctgtgcgaccacgcgtgcacccaggccagcaagctgaagcgccacatgaagacgcacatgcacaaatcgtcccccatgacggtcaagtccgacgacggtctctccaccgccagctccccggaacccggcaccagcgacttggtgggcagcgccagcagcgcgctcaagtccgtggtggccaagttcaagagcgagaacgaccccaacctgatcccggagaacggggacgaggaggaagaggaggacgacgaggaagaggaagaagaggaggaagaggaggaggaggagctgacggagagcgagagggtggactacggcttcgggctgagcctggaggcggcgcgccaccacgagaacagctcgcggggcgcggtcgtgggcgtgggcgacgagagccgcgccctgcccgacgtcatgcagggcatggtgctcagctccatgcagcacttcagcgaggccttccaccaggtcctgggcgagaagcataagcgcggccacctggccgaggccgagggccacagggacacttgcgacgaagactcggtggccggcgagtcggaccgcatagacgatggcactgttaatggccgcggctgctccccgggcgagtcggcctcggggggcctgtccaaaaagctgctgctgggcagccccagctcgctgagccccttctctaagcgcatcaagctcgagaaggagttcgacctgcccccggccgcgatgcccaacacggagaacgtgtactcgcagtggctcgccggctacgcggcctccaggcagctcaaagatcccttccttagcttcggagactccagacaatcgccttttgcctcctcgtcggagcactcctcggagaacgggagtttgcgcttctccacaccgcccggggagctggacggagggatctcggggcgcagcggcacgggaagtggagggagcacgccccatattagtggtccgggcccgggcaggcccagctcaaaagagggcagacgcagcgacacttgttcttcacacacccccattcggcgtagtacccagagagctcaagatgtgtggcagttttcggatggaagctcgagagcccttaagttctgagaaaatttgaagcccccaggggtggggtggacgcgtgccgcccagtcgacgtcagcgtggtctgtcatcctgctagtttgtgatgttttctgacagtagcctccaagaagccgttgtgcgaagacagagtcctgcagagtccttccagcctaggcctgcagcgccattttatttatattttttaataaaaagtaaaaacaaaaaaacagacccacattggaacagtgaatcagtcccatagagagggcccgtggaccatcgctgtcatgagtgatgccctggcccttctgaaaccagccaacctaattacctgtattgtggaaatgcgcatgagtccccaaccccttgtttctatacattctatgttgtcttttaaaaagtgtgcttaacattgacacaataaatgttggagctttaggtggtgtttgcttgttctttaatttttaatgcttataagacaatgaggctgcttatgattttgtacttctgtacctgtttcctacagacacccatcgggtgggtaggaggaacagatttgagaaatgggcaggagatgtaggaggggaactaggttaccgcttatcagatggcataaattttcaaggagaatcaaaatgcaaaacttgggaataaatcatagcaatatcataattaatgtagtagtaatattgctgtttattaatgctgaagtgtggttttcctaactgtctgacttataatttgcataccattaaataatgcataatatggcacgccgaatcctgtttttcaaatatatgcttttggtggctaccatgcaggatttgaatttgtcttttaatttagcttaggaaagaacatcactgggcgagcggtaaatcctaaagaaggtgataaatgtcagtagtttcttattaaatattctaattttaggttcccaaaccttcaggaaatatatcttaatgcagacaaacaaacataaaacttctttagtacttacatcaggaaatttggggcagattttagaggggggaaattataggaggaaagaagttcacatcagaacagacaatcacagcaatgctctattccttagaaattagtgccacaaataagttacatctacaaacaggtggtaaaaattctttctggcccagttaatttgcacagaacttttctcagtttggtattttttactgcttggagatccagaagagaattagaaacaacatagcaaattaaaataggtttgtcaataatagagctcagacacctgtgtgctgtagattcacatacaggccgtgaacctaagtggggaaaatcctacctatccaccttctggctagattacctagcttagtgaaaagatagccaaataattggcatgtgaattatttcctgcttattcataataaataatgactgtcta

SEQ ID NO: 1442 - DNA, 367 bp, HOMO SAPIENS
  misc_feature (274)..(275): n is a, c, g, or t
agttctctaaggctactcgattctttctcctttatatgcaaattaaatgttatattttaatcacagaaaaccatcttagaactcggaggaaagtaactaaatattattatccctatttaacattctaggcattcagtaaacatttaataatgagccctttgctgattcattgtgcatattgcttttgctttatcctctcaacttgcatggagaaacatgacaagaaataactttttaaaaatcataaatgggccaggcgtggtggctcatgccnntaatctcaacactttgggaggtcgaggcgggcagatcacctgaggtcaggagttcaagacccgcctgaccaatatcgtgataccccgtctgt

SEQ ID NO: 1443 - DNA, 2495 bp, HOMO SAPIENS
gcggctgcggggttcctggtgctgaggacggacgccattggagttcccgagaagcatggctgagggaagcttcagcgtgcaatcggaaagctacagtgttgaagacatggatgagggtagcgacgaagtcggggaggaagagatggttgaaggcaacgactatgaagaattcggtgcgtttggtggctatggcaccctcaccagctttgacatccatatcctcagagccttcggaagcttgggtccaggccttcgcatcttatcgaatgagccctgggaactggaaaaccctgtgctggcccagaccctggtggaggcattgcagctggatccggaaacacttgccaatgagacggccgcccgtgctgccaacgtagcccgcgccgccgcctccaaccgtgcggctcgggccgctgccgccgctgcccgtaccgccttcagtcaggtggtcgctagccaccgggtggccacgccgcaggtctcaggagaggatacccagcccacgacctacgccgccgaggctcaggggcccacccctgagccaccccttgcttctccgcagacctcccagatgttagtcaccagtaagatggctgcccccgaggctccggcaacctccgcacagtcccagacaggctccccggcccaggaggctgctactgagggccctagtagcgcctgtgctttctctcaggctccgtgtgccagggaggtggacgccaaccggcccagcacagccttcctgggccagaatgatgtcttcgatttcactcagccggcaggtgtcagtggcatggccttcccgcgccccaagagacctgccccagcccaagaggctgccacagagggccccagtgctgcctctggtgtgccccagacgggacctggcagggaggtggcagccacccggcccaagaccaccaagtcggggaaggcgctggccaagactcggtgggtggagcctcagaatgttgtggcagcagctgctgccaaggccaagatggccacgagcatccctgagccggagggtgcagctgctgccactgctcagcacagtgctgagccctgggccaggatgggaggcaagaggaccaagaagtccaagcacctggatgatgagtatgagagcagcgaggaggagagagagactcccgcggtcccacccacctggagagcatcacagccctcattgacggtgcgggctcagttggcccctcggcccccgatggccccgaggtcccagataccctcaaggcacgtactgtgcctgcccccccgcaacgtgacccttctgcaggagagggcaaataagttggtgaaatacctgatgattaaggactacaagaagatccccatcaagcgcgcagacatgctgaaggatgtcatcagagaatatgatgaacatttccctgagatcattgaacgagcaacgtacaccctggaaaagaagtttgggatccacctgaaggagatcgacaaggaagaacacctgtatattcttgtctgcacacgggactcctcagctcgcctccttggaaaaaccaaggacactcccaggctgagtctcctcttggtgattctgggcgtcatcttcatgaatggcaaccgtgccagcgaggctgtcctctgggaggcactacgcaagatgggactgcgccctggggtgaggcacccattcctcggcgatctgaggaagctcatcacagatgactttgtgaagcagaagtacctggaatacaagaagatccccaacagcaacccacctgagtatgaattcctctggggcctgcgagcccgccatgagaccagcaagatgagggtcctgagattcatcgcccagaatcagaaccgagacccccgggaatggaaggctcatttcttggaggctgtggatgatgctttcaagacaatggatgtggatatggccgaggaacatgccagggcccagatgagggcccagatgaatatcggggatgaagcgctgattggacggtggagctgggatgacatacaagtcgagctcctgacctgggatgaggacggagattttggcgatgcctgggccaggatcccctttgctttctgggccagataccatcagtacattctgaatagcaaccgtgccaacaggagggccacgtggagagctggcgtcagcagtggcaccaatggaggggccagcaccagcgtcctagatggccccagcaccagctccaccatccggaccagaaatgctgccagagctggcgccagcttcttctcctggatccagtaagagtttcggcaccgttgacgaactgcagcgatcttactggccaagccagagcgcctcctctcagattccttctcgacacagcaccctaggcggcttcttcctgtcagtcggaggtggcatgcaagatgaagctctctttgctcttcctgctttcattttgtgcttttccttgtgttttcatgttttgggtatcagtgttacattaaagttgcaaaattaa

SEQ ID NO: 1444 - DNA, 430 bp, HOMO SAPIENS
attcatcaaaggtgaagcaggtgctactgtaccttataaaggtggcagaagaaagctgcagactgaggcacagaaacatccccagtggctgcagcagcatgtcatggaagactgccatggtctcagtctgtttggaaagtgctaggcctggaattgggtgaaactgacaactcacctcttgtttatatgccagggcttctgggtgaagtcatacatgcagatcttctccctgccccttctgaatatacattggattctggaatttggcccaagacatcaccaggaatgaatcaccagtcaccattacctgtcaccgatgattttgcaaattgcagttttgctcaagaaagggaatgtcctgaatatggttttcttttacgcctgtcatttcagcatctgctgtttgaagaaagccattgagaagatgtga

SEQ ID NO: 1445 - DNA, 2870 bp, HOMO SAPIENS
aggtcgcaggcgggcgtgcgtggagcgggggccgcggccgcgccgcagagatgtgactcgggccgaaggccagctggagcgtcggcgctgcggggccgcgggggtcgaatgttcgtggcatcagagagaaagatgagagctcaccaggtgctcaccttcctcctgctcttcgtgatcacctcggtggcctctgaaaacgccagcacatcccgaggctgtgggctggacctcctccctcagtacgtgtccctgtgcgacctggacgccatctggggcattgtggtggaggcggtggccggggcgggcgccctgatcacactgctcctgatgctcatcctcctggtgcggctgcccttcatcaaggagaaggagaagaagagccctgtgggcctccactttctgttcctcctggggaccctgggcctctttgggctgacgtttgccttcatcatccaggaggacgagaccatctgctctgtccgccgcttcctctggggcgtcctctttgcgctctgcttctcctgcctgctgagccaggcatggcgcgtgcggaggctggtgcggcatggcacgggccccgcgggctggcagctggtgggcctggcgctgtgcctgatgctggtgcaagtcatcatcgctgtggagtggctggtgctcaccgtgctgcgtgacacaaggccagcctgcgcctacgagcccatggactttgtgatggccctcatctacgacatggtactgcttgtggtcaccctggggctggccctcttcactctgtgcggcaagttcaagaggtggaagctgaacggggccttcctcctcatcacagccttcctctctgtgctcatctgggtggcctggatgaccatgtacctcttcggcaatgtcaagctgcagcagggggatgcctggaacgaccccaccttggccatcacgctggcggccagcggctgggtcttcgtcatcttccacgccatccctgagatccactgcacccttctgccagccctgcaggagaacacgcccaactacttcgacacgtcgcagcccaggatgcgggagacggccttcgaggaggacgtgcagctgccgcgggcctatatggagaacaaggccttctccatggatgaacacaatgcagctctccgaacagcaggatttcccaacggcagcttgggaaaaagacccagtggcagcttggggaaaagacccagcgctccgtttagaagcaacgtgtatcagccaactgagatggccgtcgtgctcaacggtgggaccatcccaactgctccgccaagtcacacaggaagacacctttggtgaaagactttaagttccagagaatcagaatttctcttaccgatttgcctccctggctgtgtctttcttgagggagaaatcggtaacagttgccgaaccaggccgcctcacagccaggaaatttggaaatcctagccaaggggatttcgtgtaaatgtgaacactgacgaactgaaaagctaacaccgactgcccgcccctcccctgccacacacacagacacgtaataccagaccaacctcaatccccgcaaactaaagcaaagctaattgcaaatagtattaggctcactggaaaatgtggctgggaagactgtttcatcctctgggggtagaacagaaccaaattcacagctggtgggccagactggtgttggttggaggtggggggctcccactcttatcacctctccccagcaagtgctggaccccaggtagcctcttggagatgaccgttgcgttgaggacaaatggggactttgccaccggcttgcctggtggtttgcacatttcaggggggtcaggagagttaaggaggttgtgggtgggattccaaggtgaggcccaactgaatcgtggggtgagctttatagccagtagaggtggagggaccctggcatgtgccaaagaagaggccctctgggtgatgaagtgaccatcacatttggaaagtgatcaaccactgttccttctatggggctcttgctctaatgtctatggtgagaacacaggccccgccccttcccttgtagagccatagaaatattctggcttggggcagcagtcccttcttcccttgatcatctcgccctgttcctacacttacgggtgtatctccaaatcctctcccaattttattcccttattcatttcaagagctccaatggggtctccagctgaaagcccctccgggaggcaggttggaaggcaggcaccacggcaggttttccgcgatgatgtcacctagcagggcttcaggggttcccactaggatgcagagatgacctctcgctgcctcacaagcagtgacacctcgggtcctttccgttgctatggtgaaaattcctggatggaatggatcacatgagggtttcttgttgcttttggagggtgtgggggatattttgttttggtttttctgcaggttccatgaaaacagcccttttccaagcccattgtttctgtcatggtttccatctgtcctgagcaagtcattcctttgttatttagcatttcgaacatctcggccattcaaagcccccatgttctctgcactgtttggccagcataacctctagcatcgattcaaagcagagttttaacctgacggcatggaatgtataaatgagggtgggtccttctgcagatactctaatcactacattgctttttctataaaactacccataagcctttaacctttaaagaaaaatgaaaaaggttagtgtttgggggccgggggaggactgaccgcttcataagccagtacgtctgagctgagtatgtttcaataaaccttttgatatttctcaaaaaaaaaaaaaaaaaaaaaaa

SEQ ID NO: 1446 - DNA, 818 bp, HOMO SAPIENS
cagaatcactaggcgccggcgcctccgaggcagtgtgtttccgcccagagctggagtctcccagctgccagccgaccccgaacccgcactcccgccaaccgcgctttttgtgggcggtcggaaaccacagcctccgttggatatgttcggtgcatgttataaacaaccacttaaaccctccggatctgagcctcccgcagaggaatgcagaatgacgccacggcacgcaggatgtgatgtcaccgagatgcagaggatactcagtcaaccaacatttactgagcatctacttcgtgccgtatgtcttgtcaacggaaaggggtccctatccagaccccaagagagcattcttggatctcttgcaagaaagaatttgaggcgaatccatagagtaagcttagtgatgtgtgtcagacctctgagcccaagcaaagccatcatatcccctgtgacctgcatgtatacatccagatggcctgaagcaagtgaagaatcacaaaagaagtgaaaagggccggttcctgccttaactgatgacattccaccattgtgatttgttcctgccccaccttaactgagcgattaacctgtgaacttccttctcctggctcagaagcttccccactgagcaccttgtgacccccgcccctgcctgccatagaacaaccccctttgattgtaattttcctttacctacccaaatcctataaaacggccccacccctatctcccttcgctgacactctctttggactcagcctgcctgcacctaggtgattaaaaagctttattgctcacgcaaaaaaaaaaaaaaaaaa

SEQ ID NO: 1447 - DNA, 3464 bp, HOMO SAPIENS
cgccattgccgcgccgcagctccaggacaggccctcgccccacgtcaacagcgtagggccggctgcccaggtttactcttacgccactgacgtaacgtcatcgtgcgggacgtggacggaagaaaaaagagagtgagcgagcgccggaatcagcccggcgtggagtgcggacccgcggtagtgccagggggcgaaggcggcggtggtgaggaagatactttggttagtgaccacatcgcagcatgttgagtcaagtttaccgctgtgggttccagcccttcaaccaacatcttctgccctgggtcaagtgtacaaccgtcttcagatctcattgtatccagccttcagtcatcagacatgttcgttcttggagcaacatcccgtttatcactgtacccctcagtcgtacacatggcaagtccttcgcccaccgcagtgagctgaagcatgccaagagaatcgtggtgaagctcggcagtgccgtggtgacccgaggggatgaatgtggcctggccctggggcgcttggcatctattgttgagcaggtatcagtgctgcagaatcagggcagagagatgatgctggtgaccagtggagccgtagcctttggcaaacaacgcttgcgccatgagatccttctgtctcagagcgtgcggcaggccctccactcggggcagaaccagctgaaagaaatggcaattccagtcttagaggcacgagcctgtgcagctgccggacagagtgggctgatggccttgtatgaggctatgtttacccagtacagcatctgtgctgcccagattttggtgaccaatttggatttccatgatgagcagaagcgccggaacctcaatggaacacttcatgaactccttagaatgaacattgtccccattgtcaacacaaatgatgctgttgtccccccagctgagcccaacagtgacctgcagggggttattagtgttaaagataatgatagcctggctgcccgactggctgtggaaatgaaaactgatctcttgattgttctttcagatgtagaaggcctttttgacagccccccaggttcagatgatgcaaagcttattgatatattttatcccggagatcagcagtctgtgacatttggaaccaagtctagagtgggaatgggtggcatggaagccaaggtgaaagcagccctctgggctttgcaaggtggcacttctgttgttattgccaatggaacccacccaaaggtgtctgggcacgtcatcacagacattgtggaggggaagaaagttggtaccttcttttcagaagtaaagcctgcaggccctactgttgagcagcagggagaaatggcgcgatctggaggaaggatgttggccaccttggaacctgagcagagagcagaaattatccatcatctggctgatctgttgacggaccagcgtgatgagatcctgttagccaacaaaaaagacttggaggaggcagaggggagacttgcagctcctctgctgaaacgtttaagcctctccacatccaaattgaacagcctggccatcggtctgcgacagatcgcagcctcctcccaggacagcgtgggacgtgttttgcgccgcacccgaatcgccaaaaacttggaactggaacaagtgactgtcccaattggagttctgctggtgatctttgaatctcgtcctgactgtctaccccaggtggcagctttggctatcgcaagtggcaatggcttgttactcaaaggagggaaggaggctgcacacagcaaccggattctccacctcctgacccaggaggctctctcaatccatggagtcaaggaggccgtgcaactggtgaataccagagaagaagttgaagatctttgccgcctagacaaaatgatagatctgatcattccacgtggctcttcccagctggtcagagacatccagaaagctgctaaggggattccagtgatggggcacagcgaagggatctgtcacatgtatgtggattccgaggccagtgttgataaggtcaccaggctagtcagagactctaaatgtgaatatccagctgcctgtaatgctttggagactttgttaatccaccgggatctgctcaggacaccattatttgaccagatcattgatatgctgagagtggaacaggtaaaaattcatgcaggccccaaatttgcctcctatctgaccttcagcccctccgaagtgaagtcactccgaactgagtatggggacctggaattatgcattgaagtagtggacaacgttcaggatgccattgaccacatccacaagtatggcagctcccacacggatgtcatcgtcacagaggacgaaaacacagcggagttcttcctgcagcacgtagacagtgcctgtgtgttctggaatgccagcactcgcttttctgatggttaccgctttggactgggagctgaagtgggaatcagtacatcgagaatccacgcccggggaccagtaggacttgagggactgcttactactaagtggctgctgcgagggaaggaccacgtggtctcagatttctcagagcatggaagtttaaaatatcttcatgagaacctccctattcctcagagaaacaccaactgaaaagagccaggaaaacccgggaattttccaaaaggtcttcacgttaaacttgtcttatctcaggagagagcccgctcttgtctcccagttcctggtagggtctgcctgttggaaagtgtacctggatgcttctgggctccgtttggcaatagcagtcttggctgatgtgcacagtctggctcccagctcaccctttttttttaaagtaagaaaatagttgctaccgatagggactttgccaagtccaattatcttctaggattgaaaggtgcattttccccataaaaaaggcgaggaaaacccatggctgctttgtgtcacctcagtgacttacagtcccccttggcatttagttggtactagagccagtcatccttaacaaatcttttcacattttatttctttcacatgtagtcatcttcaaaaaggaaagatttggaattttagaaaaggggcaactcttctttttagcattctcatcagaaagtcacaaaaatcgatggaatcatttccactgggaagattgaccttttgtatttatttgtggggtaaattaataagcattccagatgcttgcagcttcctgcatccaggagatgctgtgttccccgtgatgcagctggaacccaagctgcagcaggagatgcaagtttcaggatgttccccactgagctggaggaatatctacagcagtgatgcttgaaatttttgtatgaattattttgtcgtcctacccttttcctccaaaacaaaaattagaggattattttaatactttggattcttcccccttttttgagaaataaagttttttatgaaaagcctgtgcgtgaaaaaaaa

SEQ ID NO: 1448 - DNA, 4285 bp, HOMO SAPIENS; identical to SEQ ID NO: 1294

SEQ ID NO: 1449 - DNA, 2318 bp, HOMO SAPIENS; identical to SEQ ID NO: 1187

SEQ ID NO: 1450 - DNA, 3601 bp, HOMO SAPIENS
ccaagcgtgcccgtgcgctggtgaggtggcgtccgttctacccggtcgctcccgttccgcgccatgcagagcccagtctctggcacctggctgctctgatctggtctcagcgcggagggagcagagggagtccatggaggatccctccgagcccgaccggttggcgtccgcggacggcgggagcccggaggaggaggaggatggggagcgggagccgctgctaccgcggatcgcctgggcccacccgcggagaggcgccccaggcagcgccgtgaggctgctggacgctgccggggaggagggcgaggccggcgacgaggagctgcccctcccgcccggggacgtgggggtctcccggagttcgtccgccgagctggaccggagccgccccgcggtttcagtaactattggtacttcagagatgaatgcattcttggatgacccagaatttgccgatattatgctgagagcagagcaagcaatagaagttggaatttttccagaaagaatctctcaaggttcaagtggaagttactttgtgaaggatcctaagaggaaaattattggtgtgtttaaacccaaatcagaagagccttatggtcaactcaatccaaaatggaccaaatatgtccataaggtctgctgcccttgctgctttggccgaggctgcctgattcctaatcaggggtacctttccgaagcgggtgcctatcttgtggacaacaagcttcatctgagcattgtacctaaaacaaaggtggtttggcttgtcagtgagacatttaactataatgcgattgaccgtgcaaaatcaagaggcaaaaagtatgctttagaaaaagtgccaaaagtgggtagaaagtttcataggataggactccctcctaagattggttcctttcagttatttgttgaaggttacaaggaggctgaatattggcttaggaaatttgaagctgaccctttgcctgagaatattagaaaacaatttcagtcacaatttgaaagattagttattttggattacatcatcagaaatacagacaggggcaatgataattggttagtcagatacgaaaagcagaaatgtgaaaaggaaattgaccataaggaatcaaaatggattgatgatgaagaattccttattaaaatagctgcaattgataatggtctagcatttccttttaaacatcctgatgaatggagagcatatccatttcactgggcttggcttcctcaagcaaaagttcccttttctgaagaaataagaaatttgattctaccatatatttctgacatgaactttgtgcaagatttatgtgaagatctctatgaactttttaagactgacaaaggatttgacaaagccacttttgaaagtcagatgtctgtgatgaggggtcagatcttaaaccttactcaggcattgagagacgggaagagtcctttccagctagtacagataccttgtgtgattgtggaacgcagtcaaggtggaagtcagggtcggattgtccacctgagcaattcctttacccagactgtcaattgcaggaagccatttttttcctcctggtagtaaatgtcagagtaagagaaacaaactgtttagaattatcatgtttttaaaacatcatagtaatataaatctgctgttaggagctccagttgctaaaacctcaatttaagtctttaaaaggttgtattttgaatgtaaccaaaagtttacagttttttgtccaaatattaaatttctatttcagggaagaagtgctatatctcctatattgtatttttgtagaaaatttgtattttatgttgttgttagtttaaaaggtaattttacacatgctggaatgactgtaattactctagaattccaagtagaatacaataacttttaatattgagaagaatgttcatgctaattcttcttacattacaaaaggcctttgaggatgcctacgtctgaaattgctcttacgaactttaataaaatagttagctaatagaaaaacaggtaagaataaagcaatgttgccttaatttcaaaagctgctattttagaatttgaataagtactcctaaagtgaccattattagggaccagaaaattatatcttggctaagtaatagaggaccattttggtttttgtacttgagaatatttttggtgaattactttgttgtagtgaggaaaaaacctaagaaatttcccctttttttaaaaaatggaaatattcaattgagacttgaggggaataatagaaaattaaggtagatccccaatattttggaataccaaaattgccttaaaaattcccttctgtttcttacatgggatcaaatacttgagattagtacttcagagtactggccttgttcaatttagtacttcaattagtattaaacttcactaaaaagtaaaccatactccaaattgtatattggattgcattttggggtcctaggtcatacgttcttcaaaattattatgattgtactattgtacttgaaattacagatgttattataattacagtcaaatgtagactatcaggccaaattaaaggggagcatggcagataaccataaagtcatttatatttgattttgaaatgtatttttgtactttattttgaatatcatccatatgtctgacattattggaatttgtaacattgttaatgcactaagtgatttaaattcaattgatgaagatgtgattttacagaagcagaagtttcattttcttgaggcttaaaaccaatgtcaccacttgggcttaactgggtaatttgtggtctaggccttttgttttctaagcttactatcttgtgtttgtttatttgcttttaatgaagtattttgtgtagaaggttaaattaggatgcaaaacagatctgccattcctttttcccttatatcttccttttggtcttcatggacgagatgaatgaggattctgctgccctgagggagttcattggaaacctgcgttctcctacctcttccaaccctccattagctcaattttgagataatggaaaattgactggaaattcaaaactcaaactactatctttagatataaacactagtaattaaaatgtgccttttgaagatgttttctaagagaaaggaaatacgttgcagtgatgtgggtactgctttcataaaacagttttttcagtattttgagaattgccatattaatttttataatggaaaacttaataaattgctactgttttatatcataaaattaaaataccatggtaatatttgcaaaaggtctggccataccagaaaagtacagttgagatagttaagatataaccacaagtcagagtacattggttgtattttgtaaactttcatgaactgaattcttatttaaatagtatggttttttttcaataagtatatttatagtgacaaatgtggtagactaaaggtaataaaaatcattgtcttaagattatgttcttctgtatgtacgtgtttggaatatttagaatgtttatgaacacatttactataaatgatgccaaactatcattttcttcatatattaaaggtatagtttaattcttttttt

SEQ ID NO: 1451 - DNA, 2077 bp, HOMO SAPIENS
aggaggacctattagagcctttgccccggcgtcggtgactcagtgttcgcgggagcgccgcacctacaccagccaacccagatcccgaggtccgacagcgcccggcccagatccccacgcctgccaggagcaagccgagagccagccggccggcgcactccgactccgagcagtctctgtccttcgacccgagccccgcgccctttccgggacccctgccccgcgggcagcgctgccaacctgccggccatggagaccccgtcccagcggcgcgccacccgcagcggggcgcaggccagctccactccgctgtcgcccacccgcatcacccggctgcaggagaaggaggacctgcaggagctcaatgatcgcttggcggtctacatcgaccgtgtgcgctcgctggaaacggagaacgcagggctgcgccttcgcatcaccgagtctgaagaggtggtcagccgcgaggtgtccggcatcaaggccgcctacgaggccgagctcggggatgcccgcaagacccttgactcagtagccaaggagcgcgcccgcctgcagctggagctgagcaaagtgcgtgaggagtttaaggagctgaaagcgcgcaataccaagaaggagggtgacctgatagctgctcaggctcggctgaaggacctggaggctctgctgaactccaaggaggccgcactgagcactgctctcagtgagaagcgcacgctggagggcgagctgcatgatctgcggggccaggtggccaagcttgaggcagccctaggtgaggccaagaagcaacttcaggatgagatgctgcggcgggtggatgctgagaacaggctgcagaccatgaaggaggaactggacttccagaagaacatctacagtgaggagctgcgtgagaccaagcgccgtcatgagacccgactggtggagattgacaatgggaagcagcgtgagtttgagagccggctggcggatgcgctgcaggaactgcgggcccagcatgaggaccaggtggagcagtataagaaggagctggagaagacttattctgccaagctggacaatgccaggcagtctgctgagaggaacagcaacctggtgggggctgcccacgaggagctgcagcagtcgcgcatccgcatcgacagcctctctgcccagctcagccagctccagaagcagctggcagccaaggaggcgaagcttcgagacctggaggactcactggcccgtgagcgggacaccagccggcggctgctggcggaaaaggagcgggagatggccgagatgcgggcaaggatgcagcagcagctggacgagtaccaggagcttctggacatcaagctggccctggacatggagatccacgcctaccgcaagctcttggagggcgaggaggagaggctacgcctgtcccccagccctacctcgcagcgcagccgtggccgtgcttcctctcactcatcccagacacagggtgggggcagcgtcaccaaaaagcgcaaactggagtccactgagagccgcagcagcttctcacagcacgcacgcactagcgggcgcgtggccgtggaggaggtggatgaggagggcaagtttgtccggctgcgcaacaagtccaatgaggaccagtccatgggcaattggcagatcaagcgccagaatggagatgatcccttgctgacttaccggttcccaccaaagttcaccctgaaggctgggcaggtggtgacgatctgggctgcaggagctggggccacccacagcccccctaccgacctggtgtggaaggcacagaacacctggggctgcgggaacagcctgcgtacggctctcatcaactccactggggaagaagtggccatgcgcaagctggtgcgctcagtgactgtggttgaggacgacgaggatgaggatggagatgacctgctccatcaccaccacgtgagtggtagccgccgctgaggccgagcctgcactggggccacccagccaggcctgggggcagcctctccccagcctccccgtgccaaaaatcttttcattaaagaatgttttggaactttaaaaaaaa

SEQ ID NO: 1452 - DNA, 2122 bp, HOMO SAPIENS
ctgcttaacaattagtctagtgggataccaggccctgagagacccctacgatcccaggacactgatgtggggtaactaacacccactggaagtctacgctgagttcacaggctatagtcagaggttccggttgagatcaagttgggagacacacccttgttcattctccttgagaagcagctattatcaacagaacattgacagaacctgtgtttggggaaaggactgatggctttgagtctaggttggaaagcacacaggaaccactgtggtctcctcttgcaggctctgcgaagcagtggtcttctcttgtttccctgtggccagtgtccctggagaggagctggaagctttttggaccctgagataaaggctttcctggaggagaacactgaagtcaccagcagtggtagcctcacccctgaaatccagttgcggcttttgacccccagatgcaaattctggtgggagagagctgacctgtggccccacagtgatccttactgggcaatctactggccaggaggccaagccctgtctaggtatcttttggataatcctgatgttgtcagaggaaaatctgtattagatcttgggagtggatgtggagctacagctattgctgctaagatgagtggggcatcaaggatcttggccaatgacatagaccctattgcaggaatggctattacactaaattgtgaattgaacagactgaatccttttcctattttaatccaaaacattttgaatttggaacaagataagtgggaccttgttgttcttggcgatatgttttatgatgaagaccttgcagatagtcttcatcagtggctgaagaagtgcttctggacctatagaactcgagtactgattggtgaccctgggcggccccagttcagtggacacagcattcagcatcacctgcacaaagtggtagaatattcacttttggagtctactaggcaggaaaacagtggactgacaacaagcacagtgtggggttttcagccttgagttgtcaaagtgcttccaagtatgaatatagtaatgtttggatctgactctaaaagttttctctataggagatactctccagtttaatgaatgtaattcttgttaaatggaaaatcttgtttttaaaatatgaaggtttagagttttgtttacttttgtcatgtaactggttctgtatttctatgcatgccaattatacacatctctatctgcatttttttttctattttaaccgctgaaggaatatgattatacaatgccatactcaatggtggcagcatttaatttaagtaatggagaagaattaaacattgtagctggatctgtttctgtagtcgaggacaactgtgatgtaactttgaattaaacaaacaaaacaaaacagaagaagactatatatatattttttctttttttagagacagtctcactttgctcccaggctggaatgcagtggctattcagaggcttaatcattgggcactgcagccttgaactctgggcttttttttttttttgagatggagtctcagctctgtcgtccaggctggagtgcagtgactcatgtctcggctcactgtagcctccacctcccccaatcaagcgattgtcctgtctcagcctccagagtagctgggattttaggtgtgcaccaccatgcctggctaatttttgtatttttagtagagacggggttttgccatgttggccaggccggtctcaaactcctgacctcaggtgatccacccgccttggcctcccaaagtgctaggattacaggtgtgagccaccacgccagcctgacgatgttttttacttctatcacttccttttgattttttcttatagcttctatctctgcttacgtcacccatcattcttgcgtgttgtatgcttttcgcattagagccctttgcatgttaatcagttattttaaatttatgatctggtaattctaaaatgtctgccataactgagtctggttctgatgcttgttttcttttcagactgtttttttgtcttttagcatgccttgtaattttttgttgatagctagacatgatgtattgcataaataaacaagtaaactaaaaaaaaaaaaaaa

SEQ ID NO: 1453 - DNA, 2244 bp, HOMO SAPIENS
aatgtttggagtctggtttccaggttgccgtttttgggggctctgggtgtggcggttgccgtagctgaaattggctgcaccatgtcggccttcgagaagcctcagatcatcgcccatatccagaagggcttcaactacacggtgtttgactgtaagtgggtgccctgcagcgccaaatttgtgaccatgggcaacttcgcacggggcaccggcgtcattcagctgtacgagatccagcacggggacctgaagctgcttcgggagattgaaaaggccaaacctattaaatgtggaacatttggtgcaacatctttacagcagagatatttagctactggagattttggtggaaaccttcatatatggaatttagaagctccagagatgccagtatattctgtaaagggccataaagaaattataaatgccatagatggcataggtggactaggaattggagaaggagcacctgaaattgtgactggcagccgagatggaactgtgaaggtgtgggacccaaggcaaaaagatgatcctgttgctaatatggaacctgtacaaggagaaaacaagagagactgttggactgtggcatttggcaatgcttataatcaagaagaacgtgttgtttgtgctggctatgacaatggggatatcaaactatttgatctcagaaatatggcattacggtgggagacaaacatcaaaaatggggtgtgtagcttggagtttgacagaaaagacataagtatgaataagttagtagccacatctctggaaggaaagttccatgtttttgacatgagaacacagcatccaaccaaaggttttgcctctgtttcagaaaaggctcataaatctactgtgtggcaggtccgacacctgccgcagaacagggagctctttctgacagctggaggcgccggcggccttcacctctggaagtatgaataccctattcagcggtcaaagaaagattctgagggaatagaaatgggagtcgcaggttctgtaagccttctgcagaatgttacgttgtccacccagcccatttcaagtttggattggagtccagataaaaggggtctctgcgtctgtagttcatttgaccaaacggtgagagtactgatcgttacaaagctcaataaaatttgacttcaagactttggacttgaggctgggcacggtggctcactcctgtaatcccagcactttgggaggccgaggcgggtggatcagaaggtcaggagatcgagaccatcctggctaacatggtgaaaccccgtctctactaaaaatataaaaaaaaatttgctgggtgtcatggcgggcatctgtagtcctagctacttgggaggctgaggcaggagaatggcgtgaacccgggaggcggaggttgcagtgagccgagattgtgccactgcactccagcctgggcaactgagcaagactgtctcaaaaaaaaaaaaaaaaaaaaagactttggacttgaaaccttccagaggaacactcacacaatttaagataggttctggagtcctctgaccctcattgaacaaagctggatttggctgatgataaaagaccccagccacaagcctctgggccagcctccagcctctctcggggcttgtttgctgacttgctgctgcacgtgggtatcagaagcaccaagtaaactatctccagggccagttcttttctctcccttccatttctaagtcaatagttgtctataattaaacatatttcagatttgttctgtgtccctgaagttccatattttatctttatgcttgtgttatgttttagtgtctataatgttgtggtgggaatcatttcatttggtttaaaagagtttgccttggaaaaactgaattaaccttcataaatacattttgagagatttcagtgtgagtaattttctggacataatattattgtataaaatatcaaaatggtgggccaggcgtggtagctcacgcctgtaattccagcactttgggaggctgaggcgggtgaatcacgaggtcaggaattcgagaccagcctggccaacatggtcaaaacccgtctctactaaaaatacaaaaaattagctgggcttagtggcgggcgcctgtaatcacagctacttgggaggctgaggcaggagaatcacttgaacccaggaggtggagattgcagtgagctgagattgcgccactgcactccagccctggcgacagagtgagactccgtctc

SEQ ID NO: 1454 - DNA, 7771 bp, HOMO SAPIENS
tttctgttatttgtccccgtccctccccacccccctgctgaagcgagaataagggcagggaccgcggctcctacctcttggtgatccccttccccattccgcccccgcctcaacgcccagcacagtgccctgcacacagtagtcgctcaataaatgttcgtggatgatgatgatgatgatgatgaaaaaaatgcagcatcaacggcagcagcaagcggaccacgcgaacgaggcaaactatgcaagaggcaccagacttcctctttctggtgaaggaccaacttctcagccgaatagctccaagcaaactgtcctgtcttggcaagctgcaatcgatgctgctagacaggccaaggctgcccaaactatgagcacctctgcacccccacctgtaggatctctctcccaaagaaaacgtcagcaatacgccaagagcaaaaaacagggtaactcgtccaacagccgacctgcccgcgcccttttctgtttatcactcaataaccccatccgaagagcctgcattagtatagtggaatggaaaccatttgacatatttatattattggctatttttgccaattgtgtggccttagctatttacatcccattccctgaagatgattctaattcaacaaatcataacttggaaaaagtagaatatgccttcctgattatttttacagtcgagacatttttgaagattatagcgtatggattattgctacatcctaatgcttatgttaggaatggatggaatttactggattttgttatagtaatagtaggattgtttagtgtaattttggaacaattaaccaaagaaacagaaggcgggaaccactcaagcggcaaatctggaggctttgatgtcaaagccctccgtgcctttcgagtgttgcgaccacttcgactagtgtcaggagtgcccagtttacaagttgtcctgaactccattataaaagccatggttcccctccttcacatagcccttttggtattatttgtaatcataatctatgctattataggattggaactttttattggaaaaatgcacaaaacatgtttttttgctgactcagatatcgtagctgaagaggacccagctccatgtgcgttctcagggaatggacgccagtgtactgccaatggcacggaatgtaggagtggctgggttggcccgaacggaggcatcaccaactttgataactttgcctttgccatgcttactgtgtttcagtgcatcaccatggagggctggacagatgtgctctactgggtaaatgatgcgataggatgggaatggccatgggtgtattttgttagtctgatcatccttggctcatttttcgtccttaacctggttcttggtgtccttagtggagaattctcaaaggaaagagagaaggcaaaagcacggggagatttccagaagctccgggagaagcagcagctggaggaggatctaaagggctacttggattggatcacccaagctgaggacatcgatccggagaatgaggaagaaggaggagaggaaggcaaacgaaatactagcatgcccaccagcgagactgagtctgtgaacacagagaacgtcagcggtgaaggcgagaaccgaggctgctgtggaagtctctggtgctggtggagacggagaggcgcggccaaggcggggccctctgggtgtcggcggtggggtcaagccatctcaaaatccaaactcagccgacgctggcgtcgctggaaccgattcaatcgcagaagatgtagggccgccgtgaagtctgtcacgttttactggctggttatcgtcctggtgtttctgaacaccttaaccatttcctctgagcactacaatcagccagattggttgacacagattcaagatattgccaacaaagtcctcttggctctgttcacctgcgagatgctggtaaaaatgtacagcttgggcctccaagcatatttcgtctctcttttcaaccggtttgattgcttcgtggtgtgtggtggaatcactgagacgatcttggtggaactggaaatcatgtctcccctggggatctctgtgtttcggtgtgtgcgcctcttaagaatcttcaaagtgaccaggcactggacttccctgagcaacttagtggcatccttattaaactccatgaagtccatcgcttcgctgttgcttctgctttttctcttcattatcatcttttccttgcttgggatgcagctgtttggcggcaagtttaattttgatgaaacgcaaaccaagcggagcacctttgacaatttccctcaagcacttctcacagtgttccagatcctgacaggcgaagactggaatgctgtgatgtacgatggcatcatggcttacgggggcccatcctcttcaggaatgatcgtctgcatctacttcatcatcctcttcatttgtggtaactatattctactgaatgtcttcttggccatcgctgtagacaatttggctgatgctgaaagtctgaacactgctcagaaagaagaagcggaagaaaaggagaggaaaaagattgccagaaaagagagcctagaaaataaaaagaacaacaaaccagaagtcaaccagatagccaacagtgacaacaaggttacaattgatgactatagagaagaggatgaagacaaggacccctatccgccttgcgatgtgccagtaggggaagaggaagaggaagaggaggaggatgaacctgaggttcctgccggaccccgtcctcgaaggatctcggagttgaacatgaaggaaaaaattgcccccatccctgaagggagcgctttcttcattcttagcaagaccaacccgatccgcgtaggctgccacaagctcatcaaccaccacatcttcaccaacctcatccttgtcttcatcatgctgagcagcgctgccctggccgcagaggaccccatccgcagccactccttccggaacacgatactgggttactttgactatgccttcacagccatctttactgttgagatcctgttgaagatgacaacttttggagctttcctccacaaaggggccttctgcaggaactacttcaatttgctggatatgctggtggttggggtgtctctggtgtcatttgggattcaatccagtgccatctccgttgtgaagattctgagggtcttaagggtcctgcgtcccctcagggccatcaacagagcaaaaggacttaagcacgtggtccagtgcgtcttcgtggccatccggaccatcggcaacatcatgatcgtcaccaccctcctgcagttcatgtttgcctgtatcggggtccagttgttcaaggggaagttctatcgctgtacggatgaagccaaaagtaaccctgaagaatgcaggggacttttcatcctctacaaggatggggatgttgacagtcctgtggtccgtgaacggatctggcaaaacagtgatttcaacttcgacaacgtcctctctgctatgatggcgctcttcacagtctccacgtttgagggctggcctgcgttgctgtataaagccatcgactcgaatggagagaacatcggcccaatctacaaccaccgcgtggagatctccatcttcttcatcatctacatcatcattgtagctttcttcatgatgaacatctttgtgggctttgtcatcgttacatttcaggaacaaggagaaaaagagtataagaactgtgagctggacaaaaatcagcgtcagtgtgttgaatacgccttgaaagcacgtcccttgcggagatacatccccaaaaacccctaccagtacaagttctggtacgtggtgaactcttcgcctttcgaatacatgatgtttgtcctcatcatgctcaacacactctgcttggccatgcagcactacgagcagtccaagatgttcaatgatgccatggacattctgaacatggtcttcaccggggtgttcaccgtcgagatggttttgaaagtcatcgcatttaagcctaaggggtattttagtgacgcctggaacacgtttgactccctcatcgtaatcggcagcattatagacgtggccctcagcgaagcagacccaactgaaagtgaaaatgtccctgtcccaactgctacacctgggaactctgaagagagcaatagaatctccatcacctttttccgtcttttccgagtgatgcgattggtgaagcttctcagcaggggggaaggcatccggacattgctgtggacttttattaagtcctttcaggcgctcccgtatgtggccctcctcatagccatgctgttcttcatctatgcggtcattggcatgcagatgtttgggaaagttgccatgagagataacaaccagatcaataggaacaataacttccagacgtttccccaggcggtgctgctgctcttcaggtgtgcaacaggtgaggcctggcaggagatcatgctggcctgtctcccagggaagctctgtgaccctgagtcagattacaaccccggggaggagtatacatgtgggagcaactttgccattgtctatttcatcagtttttacatgctctgtgcatttctgatcatcaatctgtttgtggctgtcatcatggataatttcgactatctgacccgggactggtctattttggggcctcaccatttagatgaattcaaaagaatatggtcagaatatgaccctgaggcaaagggaaggataaaacaccttgatgtggtcactctgcttcgacgcatccagcctcccctggggtttgggaagttatgtccacacagggtagcgtgcaagagattagttgccatgaacatgcctctcaacagtgacgggacagtcatgtttaatgcaaccctgtttgctttggttcgaacggctcttaagatcaagaccgaagggaacctggagcaagctaatgaagaacttcgggctgtgataaagaaaatttggaagaaaaccagcatgaaattacttgaccaagttgtccctccagctggtgatgatgaggtaaccgtggggaagttctatgccactttcctgatacaggactactttaggaaattcaagaaacggaaagaacaaggactggtgggaaagtaccctgcgaagaacaccacaattgccctacaggcgggattaaggacactgcatgacattgggccagaaatccggcgtgctatatcgtgtgatttgcaagatgacgagcctgaggaaacaaaacgagaagaagaagatgatgtgttcaaaagaaatggtgccctgcttggaaaccatgtcaatcatgttaatagtgataggagagattcccttcagcagaccaataccacccaccgtcccctgcatgtccaaaggccttcaattccacctgcaagtgatactgagaaaccgctgtttcctccagcaggaaattcggtgtgtcataaccatcataaccataattccataggaaagcaagttcccacctcaacaaatgccaatctcaataatgccaatatgtccaaagctgcccatggaaagcggcccagcattgggaaccttgagcatgtgtctgaaaatgggcatcattcttcccacaagcatgaccgggagcctcagagaaggtccagtgtgaaaagaacccgctattatgaaacttacattaggtccgactcaggagatgaacagctcccaactatttgccgggaagacccagagatacatggctatttcagggacccccactgcttgggggagcaggagtatttcagtagtgaggaatgctacgaggatgacagctcgcccacctggagcaggcaaaactatggctactacagcagatacccaggcagaaacatcgactctgagaggccccgaggctaccatcatccccaaggattcttggaggacgatgactcgcccgtttgctatgattcacggagatctccaaggagacgcctactacctcccaccccagcatcccaccggagatcctccttcaactttgagtgcctgcgccggcagagcagccaggaagaggtcccgtcgtctcccatcttcccccatcgcacggccctgcctctgcatctaatgcagcaacagatcatggcagttgccggcctagattcaagtaaagcccagaagtactcaccgagtcactcgacccggtcgtgggccacccctccagcaacccctccctaccgggactggacaccgtgctacacccccctgatccaagtggagcagtcagaggccctggaccaggtgaacggcagcctgccgtccctgcaccgcagctcctggtacacagacgagcccgacatctcctaccggactttcacaccagccagcctgactgtccccagcagcttccggaacaaaaacagcgacaagcagaggagtgcggacagcttggtggaggcagtcctgatatccgaaggcttgggacgctatgcaagggacccaaaatttgtgtcagcaacaaaacacgaaatcgctgatgcctgtgacctcaccatcgacgagatggagagtgcagccagcaccctgcttaatgggaacgtgcgtccccgagccaacggggatgtgggccccctctcacaccggcaggactatgagctacaggactttggtcctggctacagcgacgaagagccagaccctgggagggatgaggaggacctggcggatgaaatgatatgcatcaccaccttgtagcccccagcgaggggcagactggctctggcctcaggtggggcgcaggagagccaggggaaaagtgcctcatagttaggaaagtttaggcactagttgggagtaatattcaattaattagacttttgtataagagatgtcatgcctcaagaaagccataaacctggtaggaacaggtcccaagcggttgagcctggcagagtaccatgcgctcggccccagctgcaggaaacagcaggccccgccctctcacagaggatgggtgaggaggccagacctgccctgccccattgtccagatgggcactgctgtggagtctgcttctcccatgtaccagggcaccaggcccacccaactgaaggcatggcggcggggtgcaggggaaagttaaaggtgatgacgatcatcacacctgtgtcgttacctcagccatcggtctagcatatcagtcactgggcccaacatatccatttttaaaccctttcccccaaatacactgcgtcctggttcctgtttagctgttctgaaatacggtgtgtaagtaagtcagaacccagctaccagtgattattgcgagggcaatgggacctcataaataaggttttctgtgatgtgacgccagtttacataagagaatatcactccgatggtcggtttctgactgtcacgctaagggcaactgtaaactggaataataatgcactcgcaaccaggtaaacttagatacactagtttgtttaaaattatagatttactgtacatgacttgtaatatactataatttgtatttgtaaagagatggtctatattttgtaattactgtattgtatttgaactgcagcaatatccatgggtcctaataattgtagttccccactaaaatctagaaattattagtatttttactcgggctatccagaagtagaagaaatagagccaattctcatttattcagcgaaaatcctctggggttaaaattttaagtttgaaagaacttgacactacagaaatttttctaaaatattttgagtcactataaacctatcatctttccacaagataaaa

SEQ ID NO: 1455 - DNA, 244 bp, HOMO SAPIENS
tgtggcttcaagtggactgggtgaagagccaaaagatagaacagaattccgaggccctgaacattcaggagggtaaaacggccaccctgacctgcaactatacaaactattccccagcatacttacagtggtaccgacaagatccaggaagaggccctgttttcttgctactcatacgtgaaaatgagaaagaaaaaaggaaagaaagactgaaggtcacctttgataccacccttaaacagag

SEQ ID NO: 1456 - DNA, 2213 bp, HOMO SAPIENS
gcgggactcggccttctgggcgcgcgcgacgtcagtttgagttctgtgttctccccgcccgtgtcccgcccgacccgcgcccgcgatgctggcgctgcgctgcggctcccgctggctcggcctgctctccgtcccgcgctccgtgccgctgcgcctccccgcggcccgcgcctgcagcaagggctccggcgacccgtcctcttcctcctcctccgggaacccgctcgtgtacctggacgtggacgccaacgggaagccgctcggccgcgtggtgctggagctgaaggcagatgtcgtcccaaagacagctgagaacttcagagccctgtgcactggtgagaagggcttcggctacaaaggctccaccttccacagggtgatcccttccttcatgtgccaggcgggcgacttcaccaaccacaatggcacaggcgggaagtccatctacggaagccgctttcctgacgagaactttacactgaagcacgtggggccaggtgtcctgtccatggctaatgctggtcctaacaccaacggctcccagttcttcatctgcaccataaagacagactggttggatggcaagcatgttgtgttcggtcacgtcaaagagggcatggacgtcgtgaagaaaatagaatctttcggctctaagagtgggaggacatccaagaagattgtcatcacagactgtggccagttgagctaatctgtggccagggtgctggcatggtggcagctgcaaatgtccatgcacccaggtggccgcgttgggctgtcagccaaggtgcctgaaacgatacgtgtgcccactccactgtcacagtgtgcctgaggaaggctgctagggatgttagacctcggccaggacccaccacattgcttcctaatacccacccttcctcacgacctcatttctgggcatctttgtggacatgatgtcacccaccccttgtcaagcattgcctgtgattgcccagcccagattcatctgtgccttggacatggtgatggtgatgggttgccatccaagtgaaagtcttttccttgaccaagggggacagtcagttttgcaaaaggactctaatacctgtttaatattgtcttcctaattgggataatttaattaacaagattgactagaagtgaaactgcaacactaacttccccgtgctgtggtgtgacctgagttggtgacacaggccacagaccccagagcttggcttttgaaacacaactcagggcttttgtgaaggttcccccgctgagatctttcctcctggttactgtgaagcctgttggtttgctgctgtcgtttttgaggagggcccatgggggtaggagcagttgaacctgggaacaaacctcacttgagctgtgcctagacaatgtgaattcctgtgttgctaacagaagtggcctgtaagctcctgtgctccggagggaagcatttcctggtaggctttgatttttctgtgtgttaaagaaattcaatctactcatgatgtgttatgcataaaacatttctggaacatggatttgtgttcaccttaaatgtgaaaataaatcctattttctatggaagactggtacctggtttctggaagaggggtctgtgacttggagctgatctttactgagctcgccgtggcagatgccatgctcaggacgttcatgtggatggtttcatgtcatcgtgctggcaacttgtcctccctgccttagagatgaggctcagacaaacgaccttagcacccatagcctatgccatgagcactggctccaccctgaatcccagctcctccccttagtgaccccaagtctgtttccctcagctgcataaggaggcgatatagtttgaatatttgtccccagccaaatctcatgttgaactgtaatccccagtgctggaggtggggcctgctacgaggtgtttggatcatggggacgggtatttcatggcttggtgctgttttcttgatggtgaattattgcaagatacggtcatttaaaattgtgtggcacctccccctgcccccttcttgctcctgctttcaccatgtgacatgcctgatcccccttcaccttttgccatggtcataagcttcctgaggcctccctggaagctgagcagatgccagcaccatgcttcctgtacatcctgcagaaccataagccaattaaacctttttaataataaaaaaaaaaaaaaa

SEQ ID NO: 1457 - DNA, 2550 bp, HOMO SAPIENS
tttggaaaaagattactgagttggagccgtctcaaatttgcagggagggacggggtggggggtggggggaccccggttgtgcagtttgatattgagggagcccccacctactcgctggggctgcgtaatctggacgtttccaaactgaagcgaaggcgtcgggagactaggcctcagagaaccatggctactgccaagggaatcgccataggcatcgacctgggcaccacctactcctgtgtgggggtgttccagcacggcaaggtggagatcatcgccaacgaccagggcaaccgcaccacccccagctacgtggccttcacagacaccgagcggctcattggggatgcggccaagaaccaggtagcaatgaatccccagaacactgtttttgatgctaaacgtctgatcggcaggaaatttaatgatcctgttgtacaagcagatatgaaactttggccttttcaagtgattaatgaaggaggcaagcccaaagtccttgtgtcctacaaaggggagaataaagctttctaccctgaggaaatctcttcgatggtattgactaagttgaaggagactgctgaggcctttttgggccaccctgtcaccaatgcagtgattaccgtgccagcctatttcaatgactctcaacgtcaggctactaaggatgcaggtgtgattgctggacttaatgtgctaagaatcatcaatgagcccacggctgctgccattgcctatggtttagataaaggaggtcaaggagaacgacatgtcctgatttttgatctgggtggaggcacatttgatgtgtcaattctgaccatagatgatgggatttttgaggtaaaggccactgctggggacactcacctgggtggggaggactttgacaacaggcttgtgagccacttcgtggaggagttcaagaggaaacacaaaaaggacatcagccagaacaagcgagccgtgaggcggctgcgcaccgcctgcgagagggccaagaggaccctgtcgtccagcacccaggccaacctagaaattgattcactttatgaaggcattgacttctatacatccatcaccagagctcgatttgaagagttgtgtgcagacctgtttaggggtaccctggagcctgtagaaaaagcgcttcgggatgccaagatggataaggctaaaatccatgacattgttttagtagggggctccacccgcatccccaaggtgcagcggctgcttcaggactacttcaatggacgtgatctcaacaagagcatcaaccctgatgaggccgtagcatatggggctgcggtacaagcagccatcctgatgggggacaagtctgagaaggtacaggacctgctgctgctggacgtggctcccctgtccctggggctggagacggctgggggcgtgatgactgccctgataaagcgcaactccaccatccccaccaagcagacacagattttcaccacctactctgacaaccaacccggggtgctgatccaggtgtatgagggcgagagggccatgacaaaggacaacaacctgctggggcggtttgacctgactggaatccctccagcacccaggggagttcctcagatcgaggtgacgtttgacattgatgccaatggtattctcaatgtcacagccacggacaagagcaccggcaaggtgaacaagatcaccatcaccaatgacaagggccgcctgagcaaggaggagattgagcgcatggttctggatgctgagaaatataaagctgaagatgaggtccagagggagaaaattgctgcaaagaatgccttagaatcctatgcttttaacatgaagagtgttgtgagtgatgaaggtttgaagggcaagattagtgagtctgataaaaataaaatattggataaatgcaacgagctcctttcgtggctggaggtcaatcaactggcagagaaagatgagtttgatcataagagaaaggaattggagcagatgtgtaaccctatcatcacaaaactctaccaaggaggatgcactgggcctgcctgcggaacagggtatgtgcctggaaggcctgccacaggccccacaattgaagaagtagattaattctttttagaactgaagcatcctaggatgcctctacatgtatttcattcccctcatcttcaaacatcattattattcttgaccagacctgaatctaagttaccatcccttggaaattctggagaaggagtctcatgcaccacctatcacactccctcacatcctgtttctgactttggaatggactcaggaaaactaggcccctctttaaaccgtgtgatgtatttgaatgtctgttatttccagccaccctaacattcttcttcctgtgtggatgcttatttgtcaatcagtaaatttgttcgtaaagaaaattacttctggtatttaggctgtgaatgtaccttgaaggggagagttcatggagagagcatgtgttctctgattgtgaggtcactgtgaatgattaaattggtaagggtaaagtaaaaaaaaaaaaaa

SEQ ID NO: 1458 - DNA, 1649 bp, HOMO SAPIENS
aatttttgtatttttagtagagacggggtttcaccatgttggttaggctggtgttgaactcctgacctcgtgatccgccctcctcggcctcccaaagtgctgggattacaggcgtgagccactgctcccggcgtttgggttttttaagctattcaaattaagactagactggaatctggagcagtgtgtgtgacaacccctctctgcacacccaactttccccgggccggctagtgactcaaagcgacagcccagatttaagaaaacgaaacctagtgcagctggggcacttccgggatctcgctatccggccgccacccgcagctgcagcacagtcatggcccaggcgtcgccgccccggcccgagagggtgctcggcgccagcagcccggaggcccggcccgcgcaggaggcgctcctccttcccaccggtgtctttcaggttgcagaaaagatggaaaaaaggacatgtgcactctgccccaaagatgtcgaatataatgtcctatactttgcacaatcagagaatatagctgctcatgagaattgtttgctgtattcttcaggacttgtggaatgtgaggatcaggatccacttaatcctgatagaagttttgatgtggaatcagtaaagaaagaaatccagagaggaaggaagttgaaatgcaaattttgtcataaaagaggagccaccgtgggatgtgatttaaaaaactgtaacaagaattaccactttttctgtgccaagaaggacgacgcagttccacagtctgatggagttcgaggaatttataaactgctttgccagcaacatgctcaattcccgatcatcgctcaaagtgctaaattttcaggagtgaaaagaaaaagaggaaggaagaaacccctctcaggcaatcatgtacagccacccgaaacaatgaaatgtaatacattcataagacaagtgaaagaagagcatggcagacacacagatgcaactgtgaaagttccttttcttaagaaatgcaaggaagcaggacttcttaattacttacttgaagaaatattagacaaagttcattcaattccagaaaaactcatggatgagactacttcagaatcagactatgaagaaatcgggagtgcactttttgactgtagattgttcgaagacacatttgtaaattttcaagcagcaatagagaaaaaaattcatgcatctcaacaaaggtggcagcagttgaaggaagagattgagctacttcaggacttaaaacaaaccttgtgctcttttcaagaaaatagagatcttatgtcaagttctacatcaatatcatccctgtcttattagggattaccgtttcctaagccaagagtcatgtcaaattgcaatcaggctcaaaaccagagaccaggctgtgaaatccacacatctttagaactagtcgtctcctcttggcctcagcagctcttccctgttcttactggttgacattttgatcactctttgcacactcttgtgttttttgctcactgtcacattcccagcacctagtatgctcagtaaatgtttgtggaataagtgcataaaatgttcttaacctttgattctacttacagcccatgatagcctcttagatataataaatttggattatactacttta

SEQ ID NO: 1459 - DNA, 3603 bp, HOMO SAPIENS
gcggccgccgtagttgaatctcctcggcgccggaagccccgccactccgcttcctggttcatgtgcggccttcgttccctcgctatctcgaccttgacttcgcatgtgcatccgccgaagtctttctagatcaatcggccccatctctcgtcttcccgattcggccatgacctcacccgtatcctcgacgtaggacctcggacttcatttccgccaccccgacacttccggaatccccggaagcgacccgttgccatggcgactatgtacacagccaggcagccccgcgtggggagtgcaggtggtttcggttgcggcagtcgcgtcccgggagcgtcgctgcctggtgaacgctgggtcgctcatctctgaaacccaggcgaaggagggctcgacgtcgcgggagtcctttcaacctgaccgcggcttacggtcttcggagctaatgttcattggtcccacaaaggggtcccacgtcgcgtccaggacatagaggccgtgaggcagggagccagaggtcgtctggactcttccgtactagtcagttttcgaactagagggggctttgggatcaccagtcggagcccttcgtgttacagctagaatgggtactaggaaaaaagttcatgcatttgtccgtgtcaaacccaccgatgactttgctcatgaaatgatcagatacggagatgacaaaagaagcattgatattcacttaaaaaaagacattcggagaggagttgtcaataaccaacagacagactggtcgtttaagttggatggagttcttcacgatgcctcccaggacttggtttatgagacagttgcaaaggatgtggtttctcaggccctcgatggctataatggcaccatcatgtgttatgggcagacgggagctggcaagacatacaccatgatgggggcaactgagaattacaagcaccgggggatcctccctcgtgccctgcagcaggtttttaggatgatcgaagaacgccccacacatgccatcactgtgcgtgtttcctacttggaaatctataatgagagcctgtttgatctcctgtccactctgccctatgttggaccctcagtcacaccaatgaccatcgtggaaaaccctcaaggagtcttcattaagggcttgtcagttcacctcacaagtcaggaggaggatgcattcagcctcctttttgagggtgagaccaacaggattatagcctcccacactatgaacaaaaactcttccagatcacactgcattttcaccatctacttagaggcccattcccggaccttatcagaggaaaagtacatcacttccaaaattaacttggtggatctggcaggctcagagaggctggggaagtctgggtctgagggccaagtcctgaaggaagccacctacatcaacaaatcgctctcattcctggagcaggccatcattgcccttggggaccagaagcgggaccacatcccctttcggcagtgcaagctcacccacgctctgaaggactcgttagggggaaactgcaatatggtcctcgtgacaaacatctatggagaagctgcccagttagaagaaacgctatcttcactgagatttgccagcaggatgaagctagtcaccactgagcctgccatcaatgaaaagtatgatgctgagagaatggtcaagaacctggagaaggaactagcactactcaagcaggagctggctatccatgacagcctgaccaaccgcacctttgtgacctatgaccccatggatgaaatccagattgctgagatcaactcccaggtgcggaggtacctggaggggacactggacgagatcgacataatcagccttagacagatcaaggaggtgttcaaccagttccgggtggttctgagccaacaggaacaggaagtggagtccactttgcgcaggaagtacaccctcattgacaggaatgactttgcagccatttctgctatccagaaggcggggcttgtggatgttgatggccacctagtgggtgagcctgaaggacaaaactttggactcggagtcgcccctttctctaccaaacctgggaagaaagccaagtccaagaagacattcaaagagccactcagctccttggcaagaaaggaaggtgccagcagccctgtgaatgggaaggacttggattacgtttccacctccaagacccagctggtcccatcctccaaagatggggatgtcaaagacatgctttcgcgggaccgggaaacttccagcattgagccccttccctcagactccccgaaggaggaattacgcccaattaggcccgacaccccaccctccaaaccagtggcctttgaggagtttaagaatgagcaaggtagtgagatcaaccgaattttcaaagaaaacaaatccatcttgaatgaacggaggaaaagggccagcgagaccacacagcacatcaatgccatcaagcgggagattgatgtgaccaaggaggccctgaatttccagaagtcactacgggagaagcaaggcaagtacgaaaacaaggggctgatgatcatcgatgaggaagaattcctgctgatcctcaagctcaaagacctcaagaagcagtaccgcagcgagtaccaggacctgcgtgacctcagggctgagatccagtattgccagcacctagtggatcagtgtcgccaccgcctgctcatggaatttgacatctggtacaatgagtcctttgtcatccctgaggacatgcagatggcactgaagccaggcggcagcatccggccaggcatggtccctgtgaacaggattgtgtctctgggagaagatgaccaggacaaattcagccagctgcagcagagggtgcttcctgagggccctgattccatctccttctacaatgccaaagtcaagatagagcagaagcataattacttgaaaaccatgatgggcctccagcaggcacatagaaaatagaacctcatcgccagtaccttaaaggacaagaccagcaactcccacctactgtagtggagctgctcaaccacctgcccagagctgcagccccctctactccaatgctgggacccagcacagagaacacatttggcctgcatgttgggaggagcatcctccaaggacaaccttgctcatctccacagagcactttgggttttaattcactgtcttatatgcagggacaggataaaataactttctagtttggactttcagtgctcatctgagaactttgtcttatttcctgtctgaaaggacatattctctatgtatgtgtgaggtcagaactgagtctcaagtaggaaggcagaaaagtagctcagccaggctcctcctggcaggcctttgtcacactggtcagcccctttcctggatagacatcctagggtgggggtggtgagctcggtctgaggagctctgcttctcacagctccctcagaccctaagttctctcaagacatcttttctgtgtttctgagccagtgaagaagacaggaggaggccctccttcatttggcaaccaggggaggataaggtctagccacagagaccagaaagggatgaggcagagctggctccatgta

SEQ ID NO: 1460 - DNA, 2062 bp, HOMO SAPIENS
ggggcgtcccctaaggggacggaggccgcatgggccgccgagccgggaaatctccgcccccagctggagcggctgtgcgggctgcgtagcggtgctgggtcgggccgacgtgccacccacccggagccggtccatggaaagaaattattccttagatttgatctagatgaagaaatggggccccctggcagcagcccaacaccagagcctccacaaaaagaagtgcagaaggaaggggctgcggacccaaagcaggtcggggagcccagcgggcagaagacccttgatggatcctcacggtctgcagagctcgtcccccagggcgaggatgattctgagtatttggagagagacgcccctgcaggagatgctgggaggtggctgcgtgtcagctttggtttgtttggcagcgtttgggtgaacgatttctccagagccaagaaagccaacaagaggggggactggagggacccttccccgaggttggtcctgcactttggtggtggtggcttcctggcattttataattgtcagttgtcttggagctcttccccagtggtcacacccacctgtgacatcctgtctgagaagttccatcgaggacaagccttagaagctctaggccaggctcagcctgtctgctatacactgctggaccagagatacttctcagggctagggaacatcattaagaatgaagccttgtacagagctgggatccatcccctttctctcggttcagtcctgagtgcctcgcgtcgggaggtcctggtggatcacgtggtggagttcagtacagcctggctgcagggcaagttccaaggcagaccgcagcacacacaggtctaccagaaagaacagtgccctgctggccaccaggtcatgaaggaggcgtttgggcccgaagatgggttacagaggctcacctggtggtgcccgcagtgccagccccagttgtcagaggagccagagcagtgccagttctcctaaggagctggtggtgctcctcacggaaccttgccgcttggggaacctgacgtctaagtgtccagaaaggaggatgtgggcagggacggggtacagaggatagtgtgggtcagaggtgccagtagtataatattcgtctccctggagttatgttgaaggcagagttttcatagggttagattttttttatccttttctagttcagttaattcatcctgttgaattgcaccatcgtgaaagatgggaaaaatcgtgatgatgggtaaggggaaaacttcccggaaggcaatggggcaaggaaaaagaaagcctatgggaaatggctgtgctcccaacatagctttgcagatgatgtgggttttttttttttttttggttgtttgttttgagagagagtcttgctctgtctccctggctagggtgtggtggtgtgatcttggctcacggcagccttgccctccctggctcaagcagtcttcatctcagcctccagagtagctgggactacaggcatgtgatatgatgctcggctgatttttgtttactttttagagagatggggtcttgccatatttgccaggctggtttgaactcctacaactcaagcattcctcccaccttggtctcccaaaatgttgggaccacgggtgtgagccaccgcgcccagctagctcctgtgttttgtttttgttttgtaactttggttgatgttaaggccctccattttggaaagcaggaaaacaggatttttttttttttatcttgttccctggaggatccagggatgaggatagagtggcctgagagcagtgcttggattcagcctcctgctgggtccttctgctggatacaggcaccaagaggcggtcgtggagcagggagctgcgccttcctggggtgcccggtggtgtgtagagaaaagctgcttgtttactccttaagtcaatgtattggtgactgttgatttgttgaacaattcaggaatcaagggctgtggagaaactccctcatgttgttggcaacaggtgaatgaacctagagcggtgacatgaaaataaagctcactgttactcgc

SEQ ID NO: 1461 - DNA, 5455 bp, HOMO SAPIENS; identical to SEQ ID NO: 666

SEQ ID NO: 1462 - DNA, 1885 bp, HOMO SAPIENS
agtgagggagagggtgctgcgagctgctgggctgcacacgcacacgcacacgcacacgcacactgatgcacacggacctggacacagacatggacatggacacagaaaccacagcactctgcccctctggcagccgccgggcctcccctccagggacgcccacaccagaagcagatgccacgctactaaagaagtcagagaaactgttggcagagttggaccggagcgggttaccctctgcccctggggcccccagacgaagaggcagtatgcctgtcccctacaagcaccagctccggcgggcccaggctgtagatgaacttgactggccacctcaggcctcatcctctggctcgtctgactccttgggctcaggggaggcagcccctgctcaaaaggatggcatcttcaaggtcatgctagtgggggagagcggcgtgggcaagagcaccctagcaggcacttttggtggtctccagggagacagtgctcacgaaccggagaacccagaggatacctatgagagacgcatcatggtggataaggaggaagtgactctagtcgtttatgacatctgggaacagggggatgcaggagggtggctgcgggaccactgccttcagaccggggacgcctttctcatcgtcttctcagtcaccgaccgacggagtttctccaaagttccagagaccctacttcggctccgggctgggaggccgcaccacgacctacccgttatcctcgttggaaacaagagcgacttggcccgctcccgggaggtatcactggaggagggccgccacctggccgggacgctgagctgcaagcacatcgagacgtcggccgcactgcaccacaacacgagggagctcttcgagggcgcggtgcgccagatccggctgcggcggggccgaaaccacgccggaggccagaggcccgatccgggcagccccgagggccctgcgccacctgcacgccgcgagagcctcaccaagaaagccaagaggttcctcgccaacctggtgccgcgcaacgccaagttcttcaagcagcgctccaggtcgtgtcacgacctctcggtgctctgagccgcggtcgccatggccactgcggtcgccatggtcaccgcgccctccgctcgccccccctcgccccgccccgcccccgtccggcttccttggtggaggccgtctaggaaaccaaaaactcccaggatgccccggtgtgaccgccgggggcggcccggggccgctcggcggcacctccacacccgccccaacgcgttctctggagctttgggcctcagggcgcctagaaggcgaggacgcagacctgaaggcggccggtgagcggggcgggttctgctgggtcgggaagaaaaataattctgcaaggtattttgttttttattaattcgcgcttggccacctcatctgtaaagagattctaaaagcaagatctggaaaagtgcttcgtagactccttgacggagtttgcctcctttgtacgctgcgtgaacatgcctcacctttaagagagtcttaaaggtaaagacacgaaaacacttcctccagggaccttcccgaaaacgttctggctctcatctggtgcggcatgtgtccactttgcctttaaggagttcttaaaggcaagggcctggaagtgctgttcctgagatggattctcttgacttaccagtccaccacggcacttcccctttaaggttattaaaggtaaggggtggacagactttctgcattcagataatgagcagtggcaaccccttttggccagggccaggggggcaccagcaaggggccaccctttcccttttcaataaataatttttgtactgcctcaaaaaaaaaaaaaaaaaaaaaaaaaa

SEQ ID NO: 1463 - DNA, 5808 bp, HOMO SAPIENS
aacagactggcggcgcgcggaaaacgcgtcacgtgacgactggccccgcctcttcctctcggtcccatattgaactcgagttggaagaggcgagtccggtctcaaaatggaggtaaaaccgccgcccggtcgcccccagcccgactccggccgtcgccgtcgccgccggggggaggagggccatgatccaaaggaaccagagcagttgagaaaactgtttattggtggtctgagctttgaaactacagatgatagtttacgagaacattttgagaaatggggcacactcacagattgtgtggtaatgagagacccccaaacaaaacgttccaggggctttggttttgtgacttattcttgtgttgaagaggtggatgcagcaatgtgtgctcgaccacacaaggttgatgggcgtgtagtggaaccaaagagagctgtttctagagaggattctgtaaagcctggtgcccatctaacagtgaagaaaatttttgttggtggtattaaagaagatacagaagaatataatttgagagactactttgaaaagtatggcaagattgaaaccatagaagttatggaagacaggcagagtggaaaaaagagaggatttgcttttgtaacttttgatgatcatgatacagttgataaaattgttgttcagaaataccacactattaatgggcataattgtgaagtgaaaaaggccctttctaaacaagagatgcagtctgctggatcacagagaggtcgtggaggtggatctggcaattttatgggtcgcggagggaactttggaggtggtggaggtaattttggccgtggtggaaactttggtggaagaggaggctatggtggtggaggtggtggcagcagaggtagttatggaggaggtgatggtggatataatggatttggaggtgatggtggcaactatggcggtggtcctggttatagtagtagagggggctatggtggtggtggaccaggatatggaaaccaaggtggtggatatggtggaggtggaggatatgatggttacaatgaaggaggaaattttggcggtggtaactatggtggtggtgggaactataatgattttggaaattatagtggacaacagcaatcaaattatggacccatgaaagggggcagttttggtggaagaagctcgggcagtccctatggtggtggttatggatctggtggtggaagtggtggatatggtagcagaaggttctaaaaacagcagaaaagggctacagttcttagcaggagagagagcgaggagttgtcaggaaagctgcaggttactttgagacagtcgtcccaaatgcattagaggaactgtaaaaatctgccacagaaggaacgatgatccatagtcagaaaagttactgcagcttaaacaggaaacccttcttgttcaggactgtcatagccacagtttgcaaaaagtgcagctattgattaatgcaatgtagtgtcaattagatgtacattcctgaggtcttttatctgttgtagctttgtctttttctttttcttttcattacatcaggtatattgccctgtaaattgtggtagtggtaccaggaataaaaaattaaggaatttttaacttttcaatatttgtgtagttcagtttttctacattttagtacagaaactttaacaaaatgcagtttcgaaggtgtttccttgtgagttaacaagtaaagaagatcattgttaattactattttgtatgaattttgctaaagttaactgtaaagaaacacctgctgacttgcagtttaaggggaatctattctccccatttccaaaccatgatatgaatgggcgctgacatgtggagagaatagataatttgtgtgtttgcaatgtgtgttttagataaataggattgggtatttaaattagcatttgtgaatttaatagcattaagattaccttcaaatgaaaaaaaatctcaaaatttctatttggtttttgtgcattttcttttaaaatgtaatcatatgattttagtgtgttagacttgctgagtcctagctgtgtttagaacatctctattctacatttaccttggtcaaatttgaactgctgccataggttttgggtgtaaagaatgtttactgccctccatttaaattctgaaaagggatggtggatgttttccctctcctacgttagaaaccattcttaaaaacttttgaaaatatagaaccattaagcctgctatatctgagcaaattagtgggtaccttttttttcttatttaaagcacaagaggcccataaatcttgagttactttaaattcttttttttgatacaagttttcagagcaagagaataaaaatcatgtgttattaaacccctaactggctggcatgctttcctgtttgtattctatacattttgctggatgaaaccaaggatagttcaggtataattgtccaaaataacctaactgcagcagaaatgtagcacagttgcttagtacaggcttctcacttcctacagacctgaattcaaatttggatagtctgagttcttaaattcccaaagaacacactgttatttcttgtgtatatttcaacataaatcatgttgttaccaatttgtttggaaggccctggttgagaagagttttagttaataaggtcatatatacatatattaatataaaccaatgtctactgttttgctccagctagtgcttacagtttcattcgagccctgagtatgtgccctgctgttactctctttggtagttgaacgttgaattcaagtcttttgttttaagaagtactaagcaaacaagcaataaaaaggggaatggggtgtgctagtgtttgaatatgctctcttgttgctctaattctgtgcctctgtgcattaatatttggatgcatgcaatgccagcatggaaattggtcttcacacatactgcagttttccagaaacattcacaaaccaataaatgtaacagacattccatttgttaatgggcatatatgtgaaaagcagtgtagaaaataggctaatattagaaaatggttaagtcctaaataacttcaagtgtggttatataatggacactgtcaatgttcataacttaaacctgggtacctggtcaaaataatgcttgggaaacattaaaattgagctaaattgtctcaagttcttttattcatataaataaagtttaaaggaatgggggagattaacatttcctgttttatgtttgtgaaattgtttgacacaaccttgacagtatcctttaatggcatgaggttaattgtactgttaaccaactttctatgttctggaactagtattatagtgaaaacatttacagtaagttgatgtttacaacctataagcaggtgaaatctgtgtatgtgacctgtttataagttgtattagcttagctcttgtgaacagtgtggaaaagtaagccatgaggagagcgatttaaccacctttaaaggacctaagatgtgctttttaagcacagtgtggatcacagaaactcactaagacaggacttcagcagccttttgtgtttggacaagtcagcataaataaagaatgacaaggcagcagcaagagcttcaactacagagaagtgaaggcataagatactatgatgatagtgagcaactttccaaaagctagttaaatctgcttattacaactgaaatatcgaagaaagtctagcaggaaggagctcttcgccttttggaacatcaatgagagatagttgccacagtcactaggtctagcatttagacctgcaaggaagggcaataagcattaggtaaggcttgaatttgaattttttcactaattaaagagtaattttttgtaaagcaaggtaagagtaatctttttgatttgcaggttgaatgagaaccctacttgcctaaatgaggaatgtctttcctaccatctaaaatacgaaggtttctggctgggtaaggtttgtagttgacagtaaaacctgatgacaccatttgtttccctgcaagtctacattacatatttcacaactttgtccctctctagtaggcacattggaaaaattcttcaactgaaaactaccttggtaccatgtcctacacgttttaaaccttagttttaaaaattcccctgcgaaatagccataagtattcatatcaagtcagttgtgactccttgtgtatacaattcattttttgtgtcttcagggtaaactcaatttttggtaaagtggtttcagcttttgtgaaaaccgttttggtgtgtaagcatgacacacaacagactcagtaagctgcccatcctcatactaggaaaacaccttcaaaggaacattaaaagttaccagggccaggcacagtggctcacgcctgtaatcccagcactttgggaggctgaggcagatggatcccaagtccaggaatttgagacgagcctgggcaacatagtgagagcctgtcaacaaaaaatagaaaaattagttgggcttggtgatacacatctgtagtcccagctatttgggaggctgccttgatatcaggcagtcgaggctgcagtgagctgactgccccactgtattccagcctgggtgaccccatctcaaagaagaaaagttaccagatgtcatgggtaaaggttggtcttcaagtggcctcataagttgtcttgcatttaaattcagggaattcattggaccaataggttacattttcgttccttttttgttttggttcatctgttaagcagtgggggcctaattactgctcctttgtaaaaacacattttcccaaagaacactgaattaccgttcaaactggttgttgatgggtaataagggctgtttttgctgccccaaaagggcttaacaatttagtcggatagtttacttaaaaaaaaaaatcctttggagacatactgaaaatgcaaactagtttctaaattatcaattccctacatgaagaagcagtttgccagagtttagtctcagaaaatgactggttggctctatttaaatcagaacccaatttctacgcgtgttgaataaggtaacagcctttgatgaatttccttcacaacatggttttagtgaagcaaacattttttttttaagggcattgttctttctagtttatttctttttatgaaataaaattattttatttaaacagttccattgtcgtttctgaaaactacagtattctcagaagttgtagcagcagtaaaaaaaaaaaagttgttatataagtgattggggcagatttaactgattttgttaaaccaatttgtaagttactgcttctaatattacacttctaaaaagctgaatttatactcatgtcctaaaggagaatatgtggtaataaagtatatttgttaagtaactaattgaaataggcttggttttaagagttccagtatataataatcacaaattgaaacctgacagtatcttgggagttccagtaatgtcacaaattagtgaataagcatgccagtgtgcaagggtaatgtaaggattgttagcctatctaaatattcaaaattactttaaaacttaagtatgttttctgatttttaagaattcagaagtgttctgtaatggattcagatgtttcatttgtagtataatgaaatgtttacagaaagataactttttcattaaaatatttttagaaatgtgtgtgttgttttgtcacttcacaatgttcatgtgacttaaacactataggtgaatattttgacttattttaccagtaagtaataaaacaacaggaaacttg

SEQ ID NO: 1464 - DNA, 556 bp, HOMO SAPIENS
caagtataacctgtcccagggtcctcttgctcagctgtgactaacaaaagtctgttcaatttaactacttagataagaagcgcaatgcttttatttaaaaatttaatattttctatggggctgtattttccaaataatagcaacaaaactgtcctaacgttttcactgttctgtaattttgttttaatatagaggatacccataatttcttaacactggaaacatcattctgaacgatgtaggaagcggtcagtaacgtgaatgatgttattgtaccgtctccagctttttccttcttcccccagatggtcgcacctgtgcatacatccctgtgcatgtgggggcacatgagtgggaaagtgggtgtcactcctattttctgtcctagagtgtcagcgttggaagggatttttttttgttcctccagtccggccctctagttgatagtccagtagtctgttaacaatttgtaaggacctgggttatattttaaaggtggttgttgttgttgtttgggttcacttatgtatatgcagcttgactgttcaacccagat

SEQ ID NO: 1465 - DNA, 1447 bp, HOMO SAPIENS
actgctggcggctggagcggagcgcaccgcggcggtggtgcccagagcggagcgcagctccctgccccgcccctccccctcggcctcgcggcgacggcggcggtggcggcttggacgactcggagagccgagtgaagacatttccacctggacacctgaccatgtgcctgccctgagcagcgaggcccaccaggcatctctgttgtgggcagcagggccaggtcctggtctgtggaccctcggcagttggcaggctccctctgcagtggggtctgggcctcggccccaccatgtcgagcctcggcggtggctcccaggatgccggcggcagtagcagcagcagcaccaatggcagcggtggcagtggcagcagtggcccaaaggcaggagcagcagacaagagtgcagtggtggctgccgccgcaccagcctcagtggcagatgacacaccaccccccgagcgtcggaacaagagcggtatcatcagtgagcccctcaacaagagcctgcgccgctcccgcccgctctcccactactcttcttttggcagcagtggtggtagtggcggtggcagcatgatgggcggagagtctgctgacaaggccactgcggctgcagccgctgcctccctgttggccaatgggcatgacctggcggcggccatggcggtggacaaaagcaaccctacctcaaagcacaaaagtggtgctgtggccagcctgctgagcaaggcagagcgggccacggagctggcagccgagggacagctgacgctgcagcagtttgcgcagtccacagagatgctgaagcgcgtggtgcaggagcatctcccgctgatgagcgaggcgggtgctggcctgcctgacatggaggctgtggcaggtgccgaagccctcaatggccagtccgacttcccctacctgggcgctttccccatcaacccaggcctcttcattatgaccccggcaggtgtgttcctggccgagagcgcgctgcacatggcgggcctggctgagtaccccatgcagggagagctggcctctgccatcagctccggcaagaagaagcggaaacgctgcggcatgtgcgcgccctgccggcggcgcatcaactgcgagcagtgcagcagttgtaggaatcgaaagactggccatcagatttgcaaattcagaaaatgtgaggaactcaaaaagaagccttccgctgctctggagaaggtgatgcttccgacgggagccgccttccggtggtttcagtgacggcggcggaacccaaagctgccctctccgtgcaatgtcactgctcgtgtggtctccagcaagggattcgggcgaagacaaacggatgcacccgtctttagaaccaaaaatattctctcacagatttcattcctgtttttatatatatattttttgttgtcgttttaacatctccacgtccctagcat

SEQ ID NO: 1466 - DNA, 1700 bp, HOMO SAPIENS
agcaggactcagaggggagagttggaggaaaaaaaaaggcagaaaagggaaagaaagaggaagagagagagagagtgagaggagccgctgagcccaccccgatggccgcggacgaagttgccggaggggcgcgcaaagccacgaaaagcaaactttttgagtttctggtccatggggtgcgccccgggatgccgtctggagcccggatgccccaccagggggcgcccatgggccccccgggctccccgtacatgggcagccccgccgtgcgacccggcctggcccccgcgggcatggagcccgcccgcaagcgagcagcgcccccgcccgggcagagccaggcacagagccagggccagccggtgcccaccgcccccgcgcggagccgcagtgccaagaggaggaagatggctgacaaaatcctccctcaaaggattcgggagctggtccccgagtcccaggcttacatggacctcttggcatttgagaggaaactggatcaaaccatcatgcggaagcgggtggacatccaggaggctctgaagaggcccatgaagcaaaagcggaagctgcgactctatatctccaacacttttaaccctgcgaagcctgatgctgaggattccgacggcagcattgcctcctgggagctacgggtggaggggaagctcctggatgatcccagcaaacagaagcggaagttctcttctttcttcaagagtttggtcatcgagctggacaaagatctttatggccctgacaaccacctcgttgagtggcatcggacacccacgacccaggagacggacggcttccaggtgaaacggcctggggacctgagtgtgcgctgcacgctgctcctcatgctggactaccagcctccccagttcaaactggatccccgcctagcccggctgctggggctgcacacacagagccgctcagccattgtccaggccctgtggcagtatgtgaagaccaacaggctgcaggactcccatgacaaggaatacatcaatggggacaagtatttccagcagatttttgattgtccccggctgaagttttctgagattccccagcgcctcacagccctgctattgccccctgacccaattgtcatcaaccatgtcatcagcgtggacccttcagaccagaagaagacggcgtgctatgacattgacgtggaggtggaggagccattaaaggggcagatgagcagcttcctcctatccacggccaaccagcaggagatcagtgctctggacagtaagatccatgagacgattgagtccataaaccagctcaagatccagagggacttcatgctaagcttctccagagaccccaaaggctatgtccaagacctgctccgctcccagagccgggacctcaaggtgatgacagatgtagccggcaaccctgaagaggagcgccgggctgagttctaccaccagccctggtcccaggaggccgtcagtcgctacttctactgcaagatccagcagcgcaggcaggagctggagcagtcgctggttgtgcgcaacacctaggagcccaaaaataagcagcacgacggaactttcagccgtgtcccgggccccagcattttgccccgggctccagcatcactcctctgccaccttggggtgtggggctggattaaaagtcattcatctgacaaaaaaaaaaaaaaaaaa

SEQ ID NO: 1467 - DNA, 2183 bp, HOMO SAPIENS
ccaatgaggaagcctggcaggatggagggcgaggcctggcagctgtagtgcttctgggcagtagaggcgcggggtgcggagctagggcggccgagagccatggcggcgctattggcggcggcggcagtgcgagcccggatcctgcaggtttcttccaaggtgaaatccagtcccacctggtattcagcatcttccttctcttcttcagtgccaactgtaaagctcttcattggtgggaaattcgttgaatccaaaagtgacaaatggatcgatatccacaacccagccaccaatgaggtcattggtcgggtccctcaggccaccaaggcagaaatggatgcagccattgcttcctgcaaacgtgcttttcctgcatgggcagacacttcagtattaagccgccagcaggtcttgctccgctatcaacaacttattaaagaaaacttgaaagaaattgccaagttaatcacattggaacaagggaagaccctagctgatgctgaaggagatgtatttcgaggccttcaggtggttgagcatgcctgtagtgtgacatccctcatgatgggagagaccatgccatccatcaccaaagacatggacctttattcctaccgtctgcctctgggagtgtgtgcaggcattgctccattcaattttcctgccatgatccccctttggatgtttcccatggccatggtgtgtggaaataccttcctaatgaaaccatctgagcgagtccctggagcaactatgcttcttgctaagttgctccaggattctggtgcccctgatggaacattaaacatcatccatggacagcatgaagctgtaaattttatttgcgatcatccggacatcaaagcaatcagctttgtgggatccaacaaggcaggagagtatatcttcgagagaggatcaagacatggcaagagggttcaagccaatatgggagccaagaaccatggggtagtcatgccagatgccaataaggaaaataccctgaaccagctggttggggcagcatttggagctgctggtcagcgctgcatggctctttcaacagcagtccttgtgggagaagccaagaagtggctgccagagctggtggagcatgccaaaaacctgagagtcaatgcaggagatcagcctggagctgatcttggccctctgatcactccccaggccaaagagcgagtctgtaatctgattgatagtggaacaaaggagggagcttccatccttcttgatggacgaaaaattaaagtgaaaggctatgaaaatggcaactttgttggaccaaccatcatctcgaatgtcaagccaaatatgacctgttacaaagaggagatttttggtccagttcttgtggttctggagacagaaacattggatgaagccatccagattgtaaataacaacccatatggaaatggaactgccatcttcaccaccaatggagccactgctcggaaatatgcccacttggtggatgttggacaggtgggagtgaatgtccccattccagtgcctttgccaatgttctcattcaccggctctcgatcctccttcaggggagacaccaatttctatggcaaacagggcatccaattctacactcagttaaagaccattacttctcagtggaaagaagaagatgctactctttcctcacctgctgttgtcatgcctaccatgggccgttagaaacaagtttgtttaagactgactccatcctgagtaatctccctttatttttgaccagcttcatttgtcagctttgctcagatcagatcgatgggattggaatacattgtaactaaaatcttcctcaggactattaacccccgcaaagtttctatagggaactgcctagtgtaacaatgaaaccagatttctcacttgctcttcatacttctattttgaggtaactgttgtaactatgaaatgcttatctgaaagtagtgcttaaacctgatttctaaaaattatcccattttctgatgatttgaaggggagaaaagccagtgtatgtaaagaaaatgttccagccaggcgcggtggctcacgcctgtaattccatcattttgggaggccacagtgggcagattgcttgagcccaggagttgaagaacgtggcgaaaccccgtatctattatttaaaaaaattgaaaaagtaaaaa

SEQ ID NO: 1468 - DNA, 4349 bp, HOMO SAPIENS
gcccccgcctcgcgccgcgcgcacgtgactgcgcccccggccccgcccccggcctgccccccgcccccactggccgctcggccgcgcgcgggtcggccggctctatggggaaagcggcggctccgagccgaggcggcggctgtggcggccgctcccgcgggctctcgtcgctgttcacggttgtcccctgcctgtcgtgccacacggcggcgccgggcatgagcgcttccacgtccggctccgggccggagcccaagccccagccccagcccgtgcccgaaccggagcggggaccgctgtcagaacaggtgtcggaggcagtttcggaggcagtgccaagatcggaacctgtgtccgagacgacgtctgagccggagccaggggctgggcagccatcggaactgctgcaggggtcgcggccggggtcagagtcaagctcaggtgtaggggctgggcccttcactaaggccgcatcggagccgctctcccgggcggtggggagcgcgacctttctcagacccgagtcaggatcgctgccagcgttaaagcccctgcctcttctgcgaccaggacaggcgaagactcctcttggggttccaatgtcggggactggcacgacctccagtgccccactggccttactgcctctggacagcttcgagggctggcttctcaagtggaccaactatctgaagggctaccagcgccgctggttcgtgctgggcaatggtttgctctcttactacagaaatcagggtgaaatggcccacacgtgccgtggaaccatcaacctgtccaccgcgcacattgacacggaggactcttgtggtatcttgctgaccagtggggccaggagctaccacctcaaggccagctcagaggtggaccggcagcagtggatcaccgccctggagctggccaaggccaaggctgtccgcgtgatgaacactcattcagatgactctggggacgacgacgaggctaccaccccagccgacaagagcgagctgcaccacaccctgaagaatctttccctgaagttagatgacctcagcacgtgcaatgacctcatcgccaagcacggcgctgcactccagcgctccctgacagagctggacggcctcaagatcccatctgagagtggggagaagctgaaggtggtgaatgagcgggccaccctcttccgcatcacatccaatgctatgatcaacgcctgcagggacttcttggaactagcagagatacacagtcggaaatggcagcgggcactgcagtatgagcaggagcagcgcgtgcacttggaggaaaccattgagcagctggcgaagcagcacaacagcctcgagcgggccttccacagtgcccctggccggccggccaacccctccaagagcttcattgagggaagcctcttgactcccaaaggagaggacagtgaggaagatgaagataccgagtactttgatgccatggaagactccacatccttcatcaccgtgatcaccgaggccaaggaagacagcagaaaagctgaaggtagcaccgggacaagttccgtggactggagctcagcagacaatgtactagatggtgcctcgctcgtgcccaagggttcatccaaagtcaagaggcgagtccgcattcccaacaagcccaactacagccttaacctctggagcatcatgaagaactgcatcggccgggagctctccaggatccccatgccggtgaacttcaatgagcccctgtccatgctccagcggctgacagaggacctggagtaccaccacctgctggacaaggcagtgcactgcaccagctcagtggagcagatgtgcctggtggccgccttctctgtgtcctcctactccaccacagtgcaccgcatcgccaagcccttcaaccccatgctgggggagaccttcgagctggaccgcctcgacgacatgggcctgcgctccctctgtgagcaggtgagccaccaccccccctcagctgcgcactacgtgttctccaagcatggctggagcctctggcaggagatcaccatctccagcaagttccggggaaaatacatctccatcatgccgctaggtgccatccacttagaattccaggccagtgggaatcactacgtgtggaggaagagcacctcaactgttcacaacatcatcgtgggcaagctctggatcgaccagtcaggggacatcgagattgtgaaccataagaccaatgaccggtgccagctgaagttcctgccctacagctacttctccaaagaggcagcccggaaggtgacaggagtggtgagtgacagccagggcaaggcccattacgtgctgtccggctcgtgggatgaacaaatggagtgctccaaggtcatgcatagcagtcccagcagccccagctctgacgggaagcagaagacagtgtaccagaccctgtcagccaagctgctgtggaagaagtacccgctgccggagaacgcggagaacatgtactacttctcagagctggccctgaccctcaacgagcacgaggagggcgtagcgccaaccgacagccgcctgcggcccgaccagcggctgatggagaagggccgttgggacgaggccaataccgagaagcagcggctggaggagaagcagcgcctgtcgcggcgccggcggctggaggcctgcgggccgggcagcagctgcagctcggaggaagagaaggaggcggatgcctacacgccactgtggtttgagaagaggctggatccgctgaccggggagatggcctgtgtgtacaagggcggctactgggaggccaaggagaagcaagactggcatatgtgccccaacatcttctgagcgccacccttgcaacaaatacaggcgcctgcacagcctggcccacctgttcattaatgcactcaatttagtactgaatggtctttctcccagcccattcccagcccttcctatttcctttcctattttttttttctccccacactttcttgggactcccaccttggaaggaggaagggctgacctgggttctctccagcccccaggtgcgccgggtcacccgtgccccttcattatggacctgggccctaccggaacccctgccccagttaccacaactcaggccggctggcccgggccatgggctgcgcaaatcaccagcccccaacccagggaggaactggcccctcctagggagcctcttcgacttttttagaaaaatgatctccatttctttccagccatgatgtttagtaaatatttttagtaccgcacttagcagacagctttccaagtgtgctttcttgccacaaaagtgtcctggcaagagccccttatttttaagacatcaggaagccagaccgctttgagttgggagaattttgtagctcaacatatcaagtcctcgatggtatctgagctgcccacacccccacctgccaaggccccacagagcccaaaacagaagggggctgccccagcccagcagagcacagagtttctggagctcccatccacagatgcaggagggggtactgatggtaacccccatgtggatttgagggcagcagtccctggcctcaccctagccagcctgggtggctccctagccccaagaggccaggaagggctggaaggcagggcctgcaggtgctccccgccctgagacccaggccccaaatcagcaataatgaacaaacccttggcccagcctgggctggtgacctgggcaccagagaccttgcatccctcctcatcctaggaggcccctaggggtgccccatctcagtgtcccctgaactctttatttgcctaatttatatatatatatatgagatatataaatatatataaaatagctattttgcttaaatttctacagtatgtaaaagtgaaaaaatgatgaagacgggtgcacctgtctgagtttggccctcatgtgagctgtgcccttccctctcctcatgcccccttccagcggcttctgccaaccatggggggctggaccaccatggccactgacccagcccctcagaatcccacactccaatcctttccatttcagtttagtcctaaaagttcatcacagggtctttctttctactccaggactggttttgtttttatatatataaaaaaaaaaagtgaaaacaccaatgtgtgaaatgccttacaatgcccactggagaggcggggcggggtggggcaggatggccccactggggctcctacagagctgtggaatgtacctctccccaacactgttttgttagcgagcaccttttgaccagtaataaaaaaccttggctttggagttttccactgaaaaaaaaa

SEQ ID NO: 1469 - DNA, 2694 bp, HOMO SAPIENS
gtgggtgcctgccagcagctgaggcgccatggcggcggcagcggtgtcagagtcttggccggagctggagctggctgagcgcgagcggcggcgggagctgctgctgacggggcccgggctggaggagcgagtgcgggcggcgggtgggcagctgccgccgcggcttttcaccctgccgctgctgcactacttggaagtgagcggctgcgggagcttgcgcgcgccggggcctggcctggcgcagggcctgccgcagctgcacagcctcgtgctgcggcgcaacgcgctggggcccggcctgagccccgagctcgggccgctgcctgcccttcgggtgctcgacctgtcgggcaacgcgctggaggcgctgccgccgggccaaggcctgggccccgccgagccgccgggccttccgcagctgcagagcctcaacctcagcggcaaccggctgcgcgagctgccagccgacctggcgcgctgcgccccgcgcctgcagagcctcaacctcaccggcaattgcctagactcctttcccgccgagctctttcgccccggcgcgctgcccctgctcagtgaactggcggctgctgacaactgcctccgagaactcagccccgacatcgcccacctggcctcgctcaagacgttggacctctcgaacaaccagctgagcgagatccctgcagagcttgcggactgccccaagctcaaggagatcaatttccgtgggaacaagctgagggacaagcgcctggagaagatggtcagcggctgccagaccagatccatcctggagtacctgcgcgtcggaggccgtggtggcgggaagggcaagggccgtgccgagggctcggagaaggaagagagccggaggaagaggagggagaggaagcagaggcgggaaggtggtgatggggaggagcaggacgtgggagatgccggccggctgctgctcagggtcctgcacgtctctgaaaaccccgtacctctgacagtcagagtgagccccgaggtccgggatgtgcggccctacattgtgggggccgtggtgcgaggcatggacctgcagccagggaatgcactcaagcgcttcctcacctcgcagaccaagctccacgaagatctctgtgagaagaggacggctgccacccttgccacccacgagctccgtgccgtcaaagggcccctgctgtactgcgcccggcccccacaggacctcaagattgtccccttggggcggaaagaagccaaggccaaggagctggtgcggcagctgcagctggaggccgaggagcagaggaagcagaagaagcggcagagtgtgtcgggcctgcacagataccttcacttgctggatggaaatgaaaattacccgtgtcttgtggatgcagacggtgatgtgatttccttcccaccaataaccaacagtgagaagacaaaggttaagaaaacgacttctgatttgtttttggaagtaacaagtgccaccagtctgcagatttgcaaggatgtcatggatgccctcattctgaaaatggcagaaatgaaaaagtacactttagaaaataaagaggaaggatcactctcagatactgaagccgatgcagtctctggacaacttccagatcccacaacgaatcccagtgctggaaaggacgggccctcccttctggtggtggagcaggtccgggtggtggatctggaagggagcctgaaggtggtgtacccgtccaaggccgacctggccactgcccctccccacgtgactgtcgtgcgctgacgccagggccgcctgtccgcgtttgtttggccggttttgcggaggtttctatgcggcaatgctgaattatccgttagattttcaccccagtttttttgttggtttttttttttgagatggagtctcgctctgtcgccaggctggagtgcagtggcgtgatctcgagtcactgcagcctgtgtctcctgggttcaagcgattctcctgcctcagcctcccaagtagctgggactacaggtgtgtgccactaagctcagctaatttttgtatttttagtagagacggggtttcaccattttgaccaggatggtcttgatctcttgacctcatgatctgtccacctctgcccctcaaagtgctgggattacgtgatccacccgcctcagcctcccaaagtgctgggattacaggcgtgagctgtgcctggcccaccccagcattttttaagatgtatgtattcgttgttctgtttttccagatgattctgtcgtaaagtgatgctatgttgtcgttacaacatcaaagtgattttacggtttttgatgggattattcaagtgtcagaattaactgttcaaaatgttctgaatcatgtagatacatggcaggtaactgtttatgggagaaaagtacagtgctgttacgtggcactgtacagtcatgtgccacgtaacagcgtctgggtcagtgacggacacttacctgacagcggatccacaatattctcgtgcagtgtgtttggaatcctggtctgggctctcgtcgttggccttgtagatcaagtaggggaagtgagtgatgttcagtcatgctgctgggacacttggttttccagatgaaaacacataaataaaactacatgcaccatcaaaaaaaaaaaaaaaaaaaaaaaaaaaaaaaaaaaaaaaaaaaaaa

SEQ ID NO: 1470 - DNA, 2578 bp, HOMO SAPIENS
cggcgggcgaggggcagggcagggcggaccctggacgcgcgggcgcgcgcggaaggtagcgcggggccgcgttggcgcgcacgcgcctgagcgtgcgcccggtggggccggccgggactcgccgctcgcacgcccttgggccgcggccgggcgcccgctcttccttccgcttgcgctgtgagctgaggcggtgtatgtgcggcaataacatgtcaaccccgctgcccgccatcgtgcccgccgcccggaaggccaccgctgcggtgattttcctgcatggattgggagatactgggcacggatgggcagaagcctttgcaggtatcagaagttcacatatcaaatatatctgcccgcatgcgcctgttaggcctgttacattaaatatgaacgtggctatgccttcatggtttgatattattgggctttcaccagattcacaggaggatgaatctgggattaaacaggcagcagaaaatataaaagctttgattgatcaagaagtgaagaatggcattccttctaacagaattattttgggagggttttctcagggaggagctttatctttatatactgcccttaccacacagcagaaactggcaggtgtcactgcactcagttgctggcttccacttcgggcttcctttccacagggtcctatcggtggtgctaatagagatatttctattctccagtgccacggggattgtgaccctttggttcccctgatgtttggttctcttacggtggaaaaactaaaaacattggtgaatccagccaatgtgacctttaaaacctatgaaggtatgatgcacagttcgtgtcaacaggaaatgatggatgtcaagcaattcattgataaactcctacctccaattgattgacgtcactaagaggccttgtgtagaagtacaccagcatcattgtagtagagtgtaaaccttttcccatgcccagtcttcaaatttctaatgttttgcagtgttaaaatgttttgcaaatacatgccaataacacagatcaaataatatctcctcatgagaaatttatgatcttttaagtttctatacatgtattcttataagacgacccaggatctactatattagaatagatgaagcaggtagcttcttttttctcaaatgtaattcagcaaaataatacagtactgccaccagattttttattacatcatttgaaaattagcagtatgcttaatgaaaatttgttcaggtataaatgagcagttaagatataaacaatttatgcatgctgtgacttagtctatggatttattccaaaattgcttagtcaccatgcagtgtctgtatttttatatatgtgttcatatatacataatgattataatacataataagaatgaggtggtattacattattcctaataatagggataatgctgtttattgtcaagaaaaagtaaaatcgttctcttcaattaatggcccttttattttgggaccaggcttttattttccctgatattatttctatttaatactcttttctctcaagaaaaaaaaaaaagtttgttttttctttattgtccttcatagcaggccaagtattgcctctctgcaatagacagctactgtcaatacatgctgtaatttgacattctgggtcacagatataaggtatttaaaatctatttatgctttatagagaaaccagacattaaaacttcatgcactacttatttcgaattactgtaccttatccaaatttacacctagctattaggatcttcaacccaggtaacaggaataattctgtggtttcatttttctgtaaacaactgaaagaataattagatcatattctagtatgttctgaaatatctttaagactgatcttaaaaactaacttctaagatgatttcatcttctcatagtatagagtttactttgtacacgtttgaaaccaactactgtagaagatgaggaatctattgtaattttttgctttattttcatctgccagtggacttatttgaaattttcactttagtcaaattattttttgtattagtttttgatgcagacataaaaatagcaatcattttaaattgtcaaaatttccagattactggtaaaaattatttgaaaacaaacttatgggtaataaaggctagtcagaaccctataccataaagtgtagttaccatacagattaatatgtagcaaaaatgtatgcttgatatttctcaactgtgttaatttttctgctgtattccagctgaccaaaacaatattaagaatgcatctttataaatgggtgctaattgataatggaaataatttagtaatggactatacaggatgttaataatgaagccatatgtttatgtctggatttaaaaattttaaacaatcatttactatgtcatttttctttaccttgaagaacataaactgttatttcacttctacaaatcagcaagatattatttatggcaagaaatattccattgaaatattgtgctgtaacatgggaaagtgtaaatgtttttcatggtttctatcaatgtgaaataaaatttaattctgaaaaa

SEQ ID NO: 1471 - DNA, 3054 bp, HOMO SAPIENS
agttgagtctgcggagccgcgggcagtggcagtcaggcctccccgctctgtgctacctgcggcccggctctcctccgcgcccccactcgcgctgcgatgacgcgctcactgttcaagggaaacttttggagtgcagacatcctcagcaccatcggctatgacaacattatccaacatctgaacaatggccgcaagaactgcaaagagtttgaagactttctaaaagaaagggcagcaattgaagagaggtatggcaaagatctgctcaacctctctaggaagaagccgtgtggacagtctgaaatcaacaccctgaagcgggcccttgaagtcttcaagcagcaagtagacaatgtggcacaatgtcacattcagcttgcacagagtttaagagaagaggccaggaagatggaagaattcagggaaaagcaaaaactacaacgaaaaaagacagagctcataatggatgctatccataaacaaaagagcttacaattcaagaaaaccatggatgcaaagaagaactatgagcagaaatgccgggacaaagatgaggcagaacaggccgtcagccggagtgccaacctggtgaacccgaagcaacaagaaaagctttttgtgaaactggcaacttcaaagaccgcagtagaggactcagacaaagcatacatgctgcacatcggcaccctggataaggtccgagaagagtggcagagtgagcacatcaaggcctgcgaggcatttgaggctcaagaatgtgaacgaataaacttcttccggaatgcattgtggttacatgtgaatcagctgtcacaacaatgtgtcaccagtgatgaaatgtacgaacaagtccgaaagagtttagaaatgtgcagcattcagagggacattgaatactttgtgaatcaacgcaaaactggacagattccaccagcacccatcatgtatgagaatttctactcctcccagaagaatgcagtcccagcaggaaaggctacagggcctaacttggcaaggagaggacccctcccaattcctaaaagctcaccagatgatcccaattactctttggttgatgactacagtttgctctatcagtaaaatcaatgaaaccagagctttttccggctagtgcttctgtgatatggaaagggcacccagagcagcaggacctatagccacgttatgtcagcaatgaagactttgaagtgaacccttgctataattttttagagatttaaaatttatggtagacatttaggacaacataagcaagtagagttctgcagttttttgaagtttacaaattgccccattctgaagaattattctttcccagttactcaggttatgaatgaattaggttttcaacatgggaagcatgaaatccacttctggatttggagcatccacttgaggagcagaggtggcagcagaggattctgagccaccaactgcagtagtggctcctttggctttgggcagcctggctgtggagtttccacggcgacacacagcctcagtggtgcaagatttaaaattaccttcctttttggctggaagacttagaagccgcctgatcatactttctcattttacagatgaggaaataaagcctacaagtgtgaaattaatttccttacagttttcctagctgatgagggacagaaccagaactagagcctgagcccaacccacatcactattcttctaacccttcctgaagttgtgatgctcatgctgaaatttaagatgccaaatatttttgccagcactttttcagttgggagaatcaccagggtttaaatgtcagatttatttttatgtggatccctgtgtatgctgaactacagagcatgatgtttaatctaatttaaggagccactgattgtaaaacatgccattattttatgttgcactaagaaggtggggtcgaggagttgccaataaacttgggacagactattgatggccaagcccatctgaatttaagatgctaaagtatgaaaaaaatacatcttagaatcaatgaaataccatattttgattccattcctcaagataattttagagttataaaaccagtcctcaattttgggtcttcacagagaatctttcccttgctagaccccagaattttaaatgcatccgtcttacactttcacaaatatttgggttttcctttttcactcacaaacagcagggaggtcatgtactttttgtacaacacctgtgcactatgagaaaatggtaccttttagttattgacaagttaaaatagcactctcagtttttcagtattacagagagcaaatagtttcctctcctgctctgtgcagtagcttttccagaactatggacaaattgatcagaagaagattgattatttcctcatctttttttcttttttttgagacagagtctctctctgtcccccaggctgaagtgcagcggcatgatctcagctcactgcaacctctgcctcccgggttcaagtgattctcctgcctcagcctcctgagtagctgggattacaggcacccaccaccacacctggctaattttttgtatttttagtaaagacagggttttaccatgttggtcaggctggtctcaaactcctgacctcaggtgatccacctgcctcggcctcccaaagtgctgggattacaggcgtgagccactgcgcccggcctatttccccacctttcgtgtaaggtgctactgaacatgacagcttcttgtcatgacaggaaacttgcatcagttggatatccttttgagaaactgaattttgcaaagggccaaatttccccaaactgaacgggctcaggaaatgttcctttacactcagaacattctattttaagtatattatttattgttggcagttcctcagggatttcccttttctctgtattggtcagtgtagttgatgtaaaaccgttttgtggatggaaaatatttttattttattgctcttttagtttggtaggttaaataaaggttcttggtaatttgggaaaaaaaaaaaaaaaaaaaaaaaaaaaaaaa

SEQ ID NO: 1472 - DNA, 2331 bp, HOMO SAPIENS
ttttgaaggcgtccacttgggggaaaaaaatgaaaggaaaaatatttcaacccggctgtcggtctaaaagaggagagaatgctttctttaaaaaagggtctgtgaattagttttcctgatctaacttctaattttctgtatgttctgccatttgtgggaaatatttcttcgtttcagattgttgatgttattgttgggaaagacgaaaaaggcagaaagatcccagaatatctgatccattttaatggttggaacagaagctgggatagatgggcagcagaagatcatgtgcttcgtgataccgatgaaaatcgtagattacagcgtaaattggcaagaaaagctgtagctcgcctgaggagcacaggaagaaagaagaagcgctgcaggttgcctggtgtggactctgtcttaaaaggcctccccactgaagaaaaagatgaaaatgatgaaaactcattaagcagttcctctgactgtagtgaaaacaaggatgaagaaataagtgaagaaagtgatattgaagaaaagactgaagtgaaagaagaaccagagcttcaaacaagaagggaaatggaagaaagaacaataactatagaaatccctgaagttctgaagaagcagctggaggatgattgttactacattaacaggaggaaacggttagtgaaacttccatgccagaccaacatcataacgattttggaatcctatgtgaagcattttgctatcaatgcagccttttcagccaatgagaggcctcgtcaccatcacgttatgccacatgccaacatgaacgtgcattatatcccagcagaaaagaatgttgacctttgtaaggagatggtggatggattaagaataacctttgattacactctcccgttggttttactctatccatatgaacaagctcagtataaaaaggtgacttcgtctaaattttttcttccaattaaggaaagtgccacaagcactaacaggagccaggaggaactctctcccagtccgcctttgttgaatccatccacgccacagtccacagagagtcagccgaccaccggtgaaccagccacccccaaaaggcgcaaagctgagccagaagcattgcagtctctgaggcggtccacgcgccacagtgccaactgtgacaggctttctgagagcagcgcttcacctcagcccaagcgccggcagcaggacacatccgccagcatgcccaagctcttcctgcacctggaaaagaagacacctgtgcatagcagatcatcttcacctattcctctgactcctagcaaggaagggagtgctgtgtttgctggctttgaagggagaagaactaatgaaataaacgaggtcctctcctggaagcttgtgcctgacaattaccccccaggtgaccagccgcctccaccctcttacatttatggggcacaacatttgctgcgattgtttgtgaaacttccagaaatccttggaaagatgtccttttctgagaagaatctgaaggctttattgaagcactttgatctctttttgaggtttttagcagaataccacgatgacttcttcccagagtcggcttatgtcgctgcctgtgaggcacattacagcaccaagaacccccgggcaatttattaaaatgttgttggttctgtaagagcaactgctctgtctagtttggcgctctgggttccaggtgaataactaacaaggtggtgggtctttacccacagcgcaaacacaatgcccaccttggggctctgttgtttgagttgcccacatactgcagttattctgttaggaatgattccctgggtgcctgaaagtgctctgacacgacacttgttactttgcaggccatctgtgatggcaaggaaaaagcaactatgttcacagtgaaatattcgtggaataggttaggccatttcagtagacattgcagttagttagcaagaaccacattgtctctttatttgttagcattaaacaaatttttttttgcaaattggttttatttttttgatgaagccgagcaactctgtccaaaaaggtttagtttgtactcggaaaccacaaagtagtctcaaagtattttagagggaatcgatattgatggcaaaagaaaatttgcagctatgcatttgcttctaacggttccctctctgtgaaacattatttttggtgatctaaagaaagcattgcctttcttatttgagattttacagctatactttgttgtgtaatgttatggttccctttctgtaaaatgttatttttggtgatctaaataaagcctgtcttgtttgaaagaaaaaaaaaaaaaaaaaa

SEQ ID NO: 1473 - DNA, 1381 bp, HOMO SAPIENS
gcacaagccggccttgaaatcagagcctttccagcaactccgagagcgtgtgctcggcgaccgcgggcttggccagcggcgcgcgctcggcgccccggcgcccccagccccacgcgcgccgggcgggcgccatggaggagggctccagctcgcccgtgtcccccgtggacagcctgggcaccagcgaggaggagctcgagaggcagcccaagcgcttcggccggaagcggcgctacagcaagaagtcgagcgaagatggcagcccgaccccgggcaagcgcggcaagaagggcagccccagcgcgcagtccttcgaggagctgcagagccagcgcatcctggccaacgtgcgcgagcgccagcgcacccagtcgctcaacgaggccttcgcggcgctgcgcaagatcatccccacgctgccctctgacaagctgagcaagatccagacgctcaagctggccgccaggtacatagacttcctctaccaggtcctgcagagcgacgagatggacaataagatgaccagctgcagctacgtggcccacgagcgcctcagctacgccttctccgtgtggcgcatggagggcgcgtggtccatgtccgcctcccactagcgccgcgccacccacctccggaccggcgcgccagggctgtccgtcgcgtcggcggcgcaagtggaattgggatgcattcgagtctgtaacttctgaaacctgaacaacctcaggaggcccccacctctgccctccaccagcgtcgagagaagggacagcagtgacatcggacagaagacccgggctcccgtcctcccccaggacggtccccacataggaagggcactcccagccctcttgctggtgacattgtcatggtcatcttgtttctgtttggatttttcttctgggtcttatgtttggggggaggtttattctttctgaaaatgtctagattcaggaacacatttatgaggatttggattttgaatttgtatttccctctaagtgccttttttaatgtctatttttttaataaaacagaaatgcattcttgtacaattctgttgaaactggaccaaggctctcagaagaggacccccgagttccttcccctcccccgagcctctgcatgattgtttcaagtcagcctggaattcttactttcacgccgctattcttttcctttctccgtgattgcttggctagccattttaaaaaaaatattctctgttcagtgtatatgttgcttgtttgttttatttattgagatatttttacaagctaagtgactgcagtgtggctgtgtatcctgctccccacccaggaaaaataaagacgtccgcgcagccatggacaaaaaaaaaaaaaaaaaaaaaaaaaaaaaa

SEQ ID NO: 1474 - DNA, 2150 bp, HOMO SAPIENS
gccggggcccgggagcagctgcgcgccccgccccgccccgcgggctcctccctgccgccgcggccccccggttgctgccccgatgcgctgcgcccggagccggggccgagtcgctgccgcagctgttggggcgcccgggccaggcgacgccgccgtcgcccgtgcccctcccagaccgcaccggccgcatggagcccccggagggcgccggcaccggagagatcgttaaggaggctgaggtgccgcaggctgcgctgggcgtcccagcccaggggacaggggacaatggccacacgcctgtggaggaggaggtcgggggcatcccagtaccagcaccggggctcctgcaggtcacggagaggaggcagcctctgagcagcgtctcctctctggaggtccacttcgacctcctggacctcactgagctcaccgacatgtcggaccaggagctggccgaggtctttgctgactcggacgacgagaacctcaacaccgagtccccagcaggtctgcacccgctgccccgggccggctacctgcgctccccttcctggacgaggacaagggctgagcagagccacgagaagcagcccctaggcgaccccgagcggcaggccacagtcctggacacgtttctcactgtggagaggccccaggaggactagaccatctccacctgccccagctcctgcagggatggggtccgaacacgatggcagatctgggcagtgctgacccagcagacacacttcacccgcccacgaggctccagccgtcacctcctgacacacaccctgggggcagctctctgccagccccgagaccggccttgtctgctgggcacgggtcttcgcctcacttggagaccagccggctttcctgggggacacacggggcccccggatgcctctgggagccccagcacaagcacagcccagtggccttacgtccagctcgttcctgggccccgagtcaggaagacagcgtcacggagtcactgccaggaacgtgctgaggaatggagtggcccacggcggccttggggtgaaggggacccaggcctgtgacagccactccaggaactcctgggggtgctccaacctccgcgttttcctgtgctgccaagctcagaagccagaggcgggtttggtagtggctaatgggacaatgtgctgtccagcaaagcacacatggagaagcggccccaaaattcccaccttgatttccatcctgccccttcttctactccacggaggcgctgtctcactagggtcccctccccaaggctcagctctaagacctgcacctgcttctcttggcccctgcgtgacagacaagtccattccctccttagctcagaacaccaaatatcaccagactgcctaagagacttgatgacacctcccggaatgctctcggggtggggttcacctctccttgtcctgcacccactgctaggccacattctcgtttctgctcacatcccattgcccggctacaaggcctgcccacggcccttaaacttgctgggcaggtttggagcccatgggaccccgtgggtctctgtccaggagcagcagaggaggctgacaggccctgctccctctgctctgggggtgtctgggagccccagctcacaccctcccaatgcttatatgctgaagctcacagaatgggcttcttgcctgacagcaagtcaaagaatgagtttaatatcaaagtgtaagcttactttccatccccaagccagcctgccccctgccccatttcccatgagcacacttctggggaaggaaaacaggctcctggccttcactctcagcagagctttggagatgccccaggcatgccctgagctccttctgtgtacctgctcccacttctgagccacccgctgcccctccgcactgctggcaaacccagttcctgcctcagccaggtctccttccctggtttccagtcacacagagcccagcagctttctctttcagtcccataagggcagccttgtgtccctggccacacttccacccgccagggtcttcctccccatctttccatccttcctgctgagcttccacagagctcgtttgcaaacagggggattaaagcatcactgcgcattcgaaaaaaaaaaaaaaaaaaaaaaa

SEQ ID NO: 1475 - DNA, 1826 bp, HOMO SAPIENS
agtatgtgtggttggggaattcatgtggaggtcagagtggaagcaggtgtgagagggtccagcagaaggaaacatggctgccaaagtgtttgagtccattggcaagtttggcctggccttagctgttgcaggaggcgtggtgaactctgccttatataatgtggatgctgggcacagagctgtcatctttgaccgattccgtggagtgcaggacattgtggtaggggaagggactcattttctcatcccgtgggtacagaaaccaattatctttgactgccgttctcgaccacgtaatgtgccagtcatcactggtagcaaagatttacagaatgtcaacatcacactgcgcatcctcttccggcctgtcgccagccagcttcctcgcatcttcaccagcatcggagaggactatgatgagcgtgtgctgccgtccatcacaactgagatcctcaagtcagtggtggctcgctttgatgctggagaactaatcacccagagagagctggtctccaggcaggtgagcgacgaccttacagagcgagccgccacctttgggctcatcctggatgacgtgtccttgacacatctgaccttcgggaaggagttcacagaagcggtggaagccaaacaggtggctcagcaggaagcagagagggccagatttgtggtggaaaaggctgagcaacagaaaaaggcggccatcatctctgctgagggcgactccaaggcagctgagctgattgccaactcactggccactgcaggggatggcctgatcgagctgcgcaagctggaagctgcagaggacatcgcgtaccagctctcacgctctcggaacatcacctacctgccagcggggcagtccgtgctcctccagctgccccagtgagggcccaccctgcctgcacctccgcgggctgactgggccacagccccgatgattcttaacacagccttccttctgctcccaccccagaaatcactgtgaaatttcatgattggcttaaagtgaaggaaataaaggtaaaatcacttcagatctctaattagtctatcaaatgaaactctttcattcttctcacatccatctacttttttatccacctccctaccaaaaattgccaagtgcctatgcaaaccagctttaggtcccaattcggggcctgctggagttccggcctgggcaccagcatttggcagcacgcaggcggggcagtatgtgatggactggggagcacaggtgtctgcctagatccacgtgtggcctccgtcctgtcactgatggaaggtttgcggatgagggcatgtgcggctgaactgagaaggcaggcctccgtcttcccagcggttcctgtgcagatgctgctgaagagaggtgccggggaggggcagagaggaagtggtctgtctgttaccataagtctgattctctttaactgtgtgaccagcggaaacaggtgtgtgtgaactgggcacagattgaagaatctgcccctgttgaggtgggtgggcctgactgttgccccccagggtcctaaaacttggatggacttgtatagtgagagaggaggcctggaccgagatgtgagtcctgttgaagacttcctctctaccccccaccttggtccctctcagatacccagtggaattccaacttgaaggattgcatcctgctggggctgaacatgcctgccaaagacgtgtccgacctacgttcctggccccctcgttcagagactgcccttctcacgggctctatgcctgcactgggaaggaaacaaatgtgtataaactgctgtcaataaatgacacccagaccttcc

SEQ ID NO: 1476 - DNA, 1854 bp, HOMO SAPIENS
cgcgggcgttcgggggcggggcctgttccctctgctctgggtctccgccggcgcccgccccgccagcctcacctgcgcggcacgtgacccgcaccgcccgtgggcaccttgaaggcggatcccgcgcgcccccgctcctgcaggctgtttttcttcaaataaagaacatggtgaaactgattcacacattagctgatcatggtgacgatgtcaactgctgtgccttctccttttccctcttggctacttgctccttggacaaaacaattcgcctgtactcgttacgtgactttactgaactgccacattctccattgaagtttcatacctatgctgtccactgctgctgtttctccccttcaggacatattttggcatcgtgttcaacagatggtaccactgtcctatggaatactgaaaatggacagatgctggcagtgatggaacagcctagtggcagccctgtgagggtttgccagttttccccagactccacgtgtttggcatcaggggcagctgatggaactgtggttttgtggaatgcacagtcatacaaattatatagatgtggtagtgttaaagatggctccttggcggcatgtgcattttctcctaatggaagcttctttgtcactggctcctcatgtggtgatttaacagtgtgggatgataaaatgaggtgtctgcatagtgaaaaagcacatgatcttggaattacctgctgcgatttttcttcacagccagtttctgatggagaacaaggtcttcagttttttcgactggcatcatgtggtcaggattgccaagtcaaaatttggattgtttcttttacccatatcttaggttttgaattaaaatataaaagtacactgagtgggcactgtgctcctgttctggcttgtgctttttcccatgatgggcagatgctagtctcagggtcagtggataagtctgtcatagtatatgatactaatactgagaatatacttcacacattgactcagcacaccaggtatgtcacaacttgtgcttttgcacctaatacccttttacttgctactggttcaatggacaaaacagtgaacatctggcaatttgacctggaaacactttgccaagcaaggcgcacagaacatcagctgaagcaatttaccgaagattggtcagaggaggatgtctcaacatggctttgtgcacaagatttaaaagatcttgttggtattttcaagatgaataacattgatggaaaagaactgttgaatcttacaaaagaaagtctggctgatgatttgaaaattgaatctctaggactgcgtagtaaagtgctgaggaaaattgaagagctcaggaccaaggttaaatccctttcttcaggaattcctgatgaatttatatgtccaataactagagaacttatgaaagatccggtcatcgcatcagatggctattcatatgaaaaggaagcaatggaaaattggatcagcaaaaagaaacgtacaagtcccatgacaaatcttgttcttccttcagcggtacttacaccaaataggactctgaaaatggccatcaatagatggctggagacacaccaaaagtaaaattgttgatattgtattatttatattttcagtgatctcatttgaatgatttataggtaaatactaatcagacattattaaaagcaaaacaggaaaaaggtaaacttcttaaatttagttacctataaaaattgtcaattttcattctttaaaaaacacatggacttactataaaagcctttttgtactagtgaaaagaatcttcagctatatagaaataaagttatactttaaattgcaaaaaaaaaaaaaaaaa

SEQ ID NO: 1477 - DNA, 2364 bp, HOMO SAPIENS
ctgctgaaaaagcagaaagagattaccagccacagacgggtcatgagcgcggtattactgctggccctcctggggttcatcctcccactgccaggagtgcaggcgctgctctgccagtttgggacagttcagcatgtgtggaaggtgtccgacctgccccggcaatggacccctaagaacaccagctgcgacagcggcttggggtgccaggacacgttgatgctcattgagagcggaccccaagtgagcctggtgctctccaagggctgcacggaggccaaggaccaggagccccgcgtcactgagcaccggatgggccccggcctctccctgatctcctacaccttcgtgtgccgccaggaggacttctgcaacaacctcgttaactccctcccgctttgggccccacagcccccagcagacccaggatccttgaggtgcccagtctgcttgtctatggaaggctgtctggaggggacaacagaagagatctgccccaaggggaccacacactgttatgatggcctcctcaggctcaggggaggaggcatcttctccaatctgagagtccagggatgcatgccccagccagtttgcaacctgctcaatgggacacaggaaattgggcccgtgggtatgactgagaactgcgatatgaaagattttctgacctgtcatcgggggaccaccattatgacacacggaaacttggctcaagaacccactgattggaccacatcgaataccgagatgtgcgaggtggggcaggtgtgtcaggagacgctgctgctcctagatgtaggactcacatcaaccctggtggggacaaaaggctgcagcactgttggggctcaaaattcccagaagaccaccatccactcagcccctcctggggtgcttgtggcctcctatacccacttctgctcctcggacctgtgcaatagtgccagcagcagcagcgttctgctgaactccctccctcctcaagctgcccctgtcccaggagaccggcagtgtcctacctgtgtgcagccccttggaacctgttcaagtggctccccccgaatgacctgccccaggggcgccactcattgttatgatgggtacattcatctctcaggaggtgggctgtccaccaaaatgagcattcagggctgcgtggcccaaccttccagcttcttgttgaaccacaccagacaaatcgggatcttctctgcgcgtgagaagcgtgatgtgcagcctcctgcctctcagcatgagggaggtggggctgagggcctggagtctctcacttggggggtggggctggcactggccccagcgctgtggtggggagtggtttgcccttcctgctaactctattacccccacgattcttcaccgctgctgaccacccacactcaacctccctctgacctcataacctaatggccttggacaccagattctttcccattctgtccatgaatcatcttccccacacacaatcattcatatctactcacctaacagcaacactggggagagcctggagcatccggacttgccctatgggagaggggacgctggaggagtggctgcatgtatctgataatacagaccctgtcctttctcccagtgctgggatttctccatgtgagggggcagcaggacacccagggatctagcgtgggggaggagaggagcctaatgagaaaatgaccatctaaagcctgcccttcattggtctggttcacgtctccaaaccagcttggatggtagcagagacttcagggtgctccagccaaacgtatttgggcatcaccatgacctgggaggggaagatgcactgagacgtatgaggcttccagcctagcagccagggccctagcacaaacaggaggctcgccccatctgagcaactgcaggagaggttagtacagtcatgcattgcttaacgacagggacgtgtcgttagaaatgtgtcgttaggtgattttatgaccataggaacattgtagcgtgcacttacaccaacccagatggtacagcccaatacacacccaggatggacgctagagtcgactgctcctaggctacaagcctgcagtgcatgttatggtgtgaatactgcaggcaatcttaacaccacggcaagtatttgtgcatctacacacatctaaacatagaaaaggtacagcataaatacactattgtcatctcagcagaccaccgttctatacgcaattcgtcgctgacccaaacgttgctatgtagcatctgcgtatcgtgggataattgacatgagggcttgagagaactccagaaaaaaatgggttagcattttcccagagctgttatcattgggtctctcttaccaccata

SEQ ID NO: 1478 - DNA, 2377 bp, HOMO SAPIENS
gtcctgtttctctccctgttgtccctgcctctttttccttcccgccgtgccccgcggccgggccggggcagccgggaagcgggtggggtggtgtgttacccagtagctcctgggacatcgctcgggtacgctccacgccgtcgcagccactgctgtggtcgccggtcggccgaggggccgcgatactggttgcccgcggtgtaagcagaattcgacgtgtatcgctgccgtcaagatggaggggcctttgtccgtgttcggtgaccgcagcactggggaaacgatccgctcccaaaacggatgtaaccattactaacgatggtgcaaccatcctgaagttactggaggtagaacatcctgcagctaaagttctttgtgagctggctgatctgcaagacaaagaagttggagatggaactacttcagtggttattattgcagcagaactcctaaaaaatgcagatgaattagtcaaacagaaaattcatcccacatcagttattagtggctatcgacttgcttgcaaggaagcagtgcgttatatcaatgaaaacctaattgttaacacagatgaactgggaagagattgcctgattaatgctgctaagacatccatgtcttccaaaatcattggaataaatggtgatttctttgctaacatggtagtagatgctgtacttgctattaaatacacagacataagaggccagccacgctatccagtcaactctgttaatattttgaaagcccatgggagaagtcaaatggagagtatgctcatcagtggctatgcactcaactgtgtggtgggatcccagggcatgcccaagagaatcgtaaatgcaaaaattgcttgccttgacttcagcctgcaaaaaacaaaaatgaagcttggtgtacaggtggtcattacagaccctgaaaaactggaccaaattagacagagagaatcagatatcaccaaggagagaattcagaagatcctggcaactggtgccaatgttattctaaccactggtggaattgatgatatgtgtctgaagtattttgtggaggctggtgctatggcagttagaagagttttaaaaagggaccttaaacgcattgccaaagcttctggagcaactattctgtcaaccctggccaatttggaaggtgaagaaacttttgaagctgcaatgttgggacaggcagaagaagtggtacaggagagaatttgtgatgatgagctgatcttaatcaaaaatactaaggctcgtacgtctgcatcgattatcttacgtggggcaaatgatttcatgtgtgatgagatggagcgctctttacatgatgcactttgtgtagtgaagagagttttggagtcaaaatctgtggttcccggtgggggtgctgtagaagcagccctttccatataccttgaaaactatgcaaccagcatggggtctcgggaacagcttgcgattgcagagtttgcaagatcacttcttgttattcccaatacactagcagttaatgctgcccaggactccacagatctggttgcaaaattaagagcttttcataatgaggcccaggttaacccagaacgtaaaaatctaaaatggattggtcttgatttgagcaatggtaaacctcgagacaacaaacaagcaggggtgtttgaaccaaccatagttaaagttaagagtttgaaatttgcaacagaagctgcaatcaccattcttcgaattgatgatcttattaaattacatccagaaagtaaagatgataaacatggaagttatgaagatgctgttcactctggagcccttaatgattgatctgatgttccttttatttataacaatgttaaatgcaattgtcttgtaccttgagttgagtattacacattaaagtaaagtacaagctgtaaacttgggtttttgtgatgtaggaaatggtttccatctgtactttggtcctctgatttcacatattgcaacctagtactttattagtttaaaaagaaattgaggttgttcaaagtttaagcaattcattctctctgaacacacattgctattcccatcccacccccaatgcacagggctgcaacaccacgacttctgcccattctctccagtgtgtgtaacagggtcacaagaattcgacagccagatgctccaagagggtggcccaaggctatagcccctccttcaatattgacctaacgggggagaaaagatttagattgtttattcttctgtggacacagtttaaaatcttaaacttgtctttttcctcttaatgtatcagcatgctaccctttcaaactcaaattttcattttaactgcttaggaataaatttacacctttgtgaaaattcaaaaaaaaaaa

SEQ ID NO: 1479 - DNA, 5425 bp, HOMO SAPIENS
cccgggccaccgcctccgcccggctgcccgcccggactgtcgcggcccgcggtggcgacggcggccgctgcaaagtttccccggcggcggcggcccgggggcgcatcctcccgcaactgtcaagcgctggcggcggaaatgatgaggcgctggccattttccgagcccgggtttcctgcctgagccccgctcgagcgagccgcgagcgaggagccggcgggcgggagaggacgcgcccagggcgggggcccgcccgccccctcgggatttcgagggcccgggggcgcgcgacgccatgggccggccgggcccagagctcctgtctctcagcccggccgcaccacctgggtctccgccatgaacgggcctgccctgcagccctcctcgccctcttccgcgccctcagcctccccggcggcggccccgcggggctggagcgagttctgtgagttgcacgccgtagcggcggcccgggagctggcccgccagtactggctgttcgcccgggagcatccgcagcacgcgccgctgcgcgccgagctggtgtcgctgcagttcaccgacctcttccagcgctacttctgccgcgaggtgcgcgacggacgggcgccgggccgcgactaccgggacacaggccgtgggcccccagccaaggccgaggcgtccccggagccaggccccggccccgccgcccctggcctgcccaaggcccgcagctctgaggagctggccccgccgcggccgcccgggccctgctccttccagcactttcgccgcagcctccgccacatcttccgccgccgctcggccggggagctgccagcggcccacaccgctgccgcccccgggacccccggagaggctgctgagacccccgcccggcctggcctggccaagaagttcctgccctggagcctggcccgggagccgccacccgaggcgctgaaggaggcggtgctgcgctacagcctggccgacgaggcctccatggacagcggggcacgctggcagcgcgggaggctggcgctgcgccgggccccgggccccgatggccccgaccgcgtgctggagctcttcgacccacccaagagttcaaggcccaagctacaagcagcttgctccagcatccaggaggtccggtggtgcacacggcttgagatgcctgacaacctttacacctttgtgctgaaggtgaaggaccggacagacatcatctttgaggtgggagacgagcagcagctgaattcatggatggctgagctctcggagtgcacaggccgagggctggagagcacagaagcagagatgcatattccctcagccctagagcctagcacgtccagctccccaaggggcagcacagattcccttaaccaaggtgcttctcctggggggctgctggacccggcctgccagaagacggaccatttcctgtcctgctacccctggttccacggccccatctccagagtgaaagcagctcagctggttcagctgcagggccctgatgctcatggagtgttcctggtgcggcagagcgagacgcggcgtggggaatacgtgctcactttcaactttcaggggatagccaagcacctgcgcctgtcgctgacagagcggggccagtgccgtgtgcagcacctccactttccctcggtcgtggacatgctccaccacttccagcgctcgcccatcccactcgagtgcggcgccgcctgtgatgtccggctctccagctacgtggtagtcgtctcccaaccaccaggttcctgcaacacggtcctcttccctttctcccttcctcactgggattcagagtcccttcctcactggggttcagagttgggccttccccaccttagttcttctggctgtccccgggggctcagcccagagggtctcccagggcgatcctcaccccccgagcagatcttccacctggtgccttcgcccgaagaactggccaacagcctgcagcacctggagcatgagcctgtgaatcgagcccgggactcggactacgaaatggactcatcctcccggagccacctgcgggccatagacaatcagtacacacctctctgaccagtgaggaattccaggcctcaacagctgcccttgaggagcacaggcagaagtgtgaacttgtgaatgtaattgatctttccttccttccagagaaagatttaagggacactgttaactgctcgtgccagtttggaagtgacccttctattaggcctgttgaagggccctcctgtaggtttcatctatccacctggctttctccttattgtttacagatgtagttcttgttagaggatgccgctagctcctgcccggggtccctatgcccagtccccgttactcttagagaaaggagttggggtgagggccagagctggcagtggaaacttgttctctttttcactgacactgtcacagcggatgacagactttctacggggaggagggggggatcatcaggaagcccagaacactaacaagcggttctcccatctaccgtcagtccacatggcaggtctgctgtgtccacaccacagatgaccacatctaatcctgcttctactctcagctttaggacaaaagctctgtcagaggcacaagctgaaggtcaaaaatgatttaaaacattttacctcagactaatttctttaaaggattcaggttcaaaacttaaccactgcttatttcagtgcactgtttcaactaacacccatgctatttttgtagtcagaaacagctatgcaaaccctacctaatttacagtctgagccagcatgctggcttgtctactgcatcctcgggacagtcacctgccactgagtggccactgtccttcctaaatgtcaagaagtgaagtatgtcaccctttcagggaaattcaggcaattactgaaataggagggtggcaagaacagttctatcctggtgccttacgaataaaaaactggattctggtttacagcagctttacagtgatagttaaattaactggggctaggggaagagcaagcaaaaagggaagaaggactcctaggccctttctagtaaatccttcagcaacaaggctggcttggtgccctccaagcatctaatggcttattaaattatcccacaagtgggttttaggctccttttttgagccaaaatggaagctgggaatctggtgccataactaatgagaaactcctttaatagcccacaatcagtgttctgttctagctggctactgcttcactggattgagaatctatctatctccttgcacacatgggcacacacaatctccaccatccagggaggtcctgaagtcaaatctctatctatacaagtgatacaattcatagggggctggctcctcccagaacctgtctggaggctcagaaacgggggcagtgacagtggagtcagctgctcttgggtgccagcagagccattcagtacaacccccaggctcacagcagtggcttctaggaaactgggagtttagatcagctttacagatacatcgatcagaggctaaaatgaaacctcagcctaaaactcataggactgactgcctgggaggagggttaggtctgcttcttccacttatacttagtctctgtgctccaagaggtcaaatttttgcttctagaatttccttggggtctttcagagggtgggggaacaaacccctatgcacttttcttttttttttttttgagatggagtttctcttgtcaaccgggctggagtgcagtggtgcaatcttggctcactgcaacctccaccttcctggttcaagcgattctgcctcgacctctcaagtagctgggattacaagcaccagccaccatgcctggctaattttgtatttttagtagagacagggtttcaccatgttggccaggctggtctcgaatgtctgacctcaggtgatccacccgccttggcctcccaaagtgctgggattacaggcgcgagccaccgcgcccagcctacaccacttttagtaccaacactcttgggtgatttcatggaccctaaagcagacctgacactgatccagatttgcagtccatttttaaggacacctgtctttatttcctcaaagtcaagcagctttctctggaaaatgaatgctaattagtgtgaaccaaaagagtaagtaagagtctgaagtttttttaaaggagaaagcttattatggaaagtcactggtcctcccctccgcacaggaaaggtacccagtagataatgaaccaaattaagttccctccctccagccagaagttaaacatctgggatatgacgtcttcatgccaggggcactcatttcttagcagcctctctacatacatctctcaggtggtgccaagaggcacaccaggtagagcaaacttagcagctctgactaacaggctgcaaagtgcaagttcagattctgtggcagagatttggaaggcacccacctccagactgcttcccgtccaagttaccaggacagctcaaaaacatgctgacagaaaactcccatggctctaggaagaagtgacactaagccaacacctttctttatgtgggagcagaatcagctgatgaaggggtgggcagcagtgtggggcaggcaccccactggctgcagctagcccaccataggcacagcacatcccaccactctccttccagtcctgaccaggccccagccggcaacttctaccgagagccatggctcaacaccaaactggacagtagacatcatgatccctccagttagctctaattacagaccccaccagtacagcttgacagctcccggcaccatcccttccttcatctgacttattgaacttttacaaactaacagtcaccagcaccaaagaattaagtcaactaacctgccttgaattttagaccagcaatccatatggctttatctggtataaatcttctgcctttgatcatttctggaccgtaggaaaaaggaatagcaatcattaaaatcttgggccagagaacactatttttacataacagtttcttaacctaaagtcaaggccttggactcttccctgagggttgcctgagattccttcatgctttctattcaggactaagtcccttactgcaaatgtgttagctctaacatctcccacaagctagaggaacttgcgagtatattaacaaggacacatctgacatcctgtgtttggttagaatatacagcacattgtgataacataaagtggattcatcttgtatcattataggcagaaggtatttggcaaatttttatgtattgttttatgtactgtacaagtaacttattcttgaataatgcaaattttgctataatgtacaaattgctatatgtgaattaaaaagttttcagaatcttgaaaaaaaaaaaaaaaaaaaa

SEQ ID NO: 1480 - DNA, 2011 bp, HOMO SAPIENS
gcacagcggcggcgcaggcgcggagaggggcacagcggcggcgcaggcgcggagaggcgcacagcgcggcacagcgaggcgccggcccagactccactccccagctgtgaaaggaggagctctacggtgactttgaagacttggaaacaggggacgtgcacaagggaaaatcgggccccgatactcagaatgaagatgtagagaaacaaggaagaaattgaccctgacgaagaagaaagtgccaagaaaaagcatttggataagaagagaaaattgaaggagatgtttgatgtggaatatgatgaaggagaaagcacatattttgatgatcttaaaggagaaatgcagaaacaagcacagataacagcatacaggttttccccccccaccccgtcatgtacagctgaatcatgcagaatttgaagatcaagatgatgaagccagagttcagtatgagggttttcgacctgggatatgcgtctgaagaaacatcgctggtataagaaaatcctcaagtcccgagatccaatcatattttctgtagggtggaggaggtttcagaccatcccgctctgttatatcgaagaccacaatggaagacaaaggcttctaaacctgattttcggatagctgccacataagttgtccttgatctggataaatccataaaaattgtgaagaaattaaagctaactggttttccatataaaatttttaagaacacttcatttattaagggaatgtttaattcagccttggaagtggccaaatttgaaggtgctgtgattcgaactgtcagtgggataagggggcagatcaagaaagcactctgagctccagaaggagctttccgggccagctttgaggataagctgctgatgagcgatattgtcttcatgcaaacttggtatcctgtttccatcccagccttctgtaacccagtaacatctttgttgaaaccagtgggtgagaaagacacctggtcaggaacgcggaccacgggccaactcaggcttgcccatggtgtcagactaaaggcaaacaaggactctctgtataaggttccctctcccagcctgtgctgactcagccatcttcccattctgcatcttctggagcatcagtcagactcacctgcatgctgagcagtggcttcagtgttggggacttctggataaggtggtaccaacaaaagccagggaaccctccccggtatctcctgtactaccactcagactccaataagggccaaggctctggagttcccagccgcttctctggatccaacgatgcatcagccaatgcagggattctgcgtatctctgggctccagcctgaggatgaggctgactattactgtggtacatggcacagcaactctaagactcacacagtgctccagacccatgaggaacaaaacactgcaaagtcattcgccaggatctcctgcagactggcattcagtgatggagaacagactcctaggtgagatccctggtcacaggatccagatgactatgactgcaagtctggaaaagaagagacagaacaaagatttaccagcataaccctctgagaatgtgccccagccatcctggagggaagagctccctattgacccagcactgcagaatccacagaggaaggacagctctggccaccagggagcagccacacgacaagagaggacccggtgtccccacagggtcctgggcccagtctgtgttgacgcagccgccctcagtgtctgcggccccaggacagaaggtcaccatctcctgctctggaagcagctccaacattgggaataattatgtatcctggtaccagcagctcccaggaacagcccccaaactcctcatttatgacaataataagcgaccctcagggattcctgaccgattctctggctccaagtctggcacgtcagccaccctgggcatcaccggactccagactggggacgaggccgattattactgcggaacatgggatagcagcctgagtgctg

SEQ ID NO: 1481 - DNA, 66 bp, HOMO SAPIENS
ctggtctcctaccttgcctagatatctacacaagtggcaccaccatcgtctagttgccaaagccaa

SEQ ID NO: 1482 - DNA, 7368 bp, HOMO SAPIENS
caataatgaaggtggctgcggcgcggcggcaggctcagctgcgccgggcgggggcggcgctggggccgcgcctgtaggactcggggccgacgccgcgggatggggacgcggcgcggggagtgaggcagtggcggcggcggcggtaagcggaacttcggcccgaggggctcgcccgctcccgcctctgtcttgtcggcctccacctgcagccccgcggcccccgcgccccgcgggacccggacggcgacgacgggggaatgtggcgctggatccggcagcagctgggttttgacccaccacatcagagtgacacaagaaccatctacgtagccaacaggtttcctcagaatggcctttacacacctcagaaatttatagataacaggatcatttcatctaagtacactgtgtggaattttgttccaaaaaatttatttgaacagttcagaagagtggcaaacttttattttcttattatatttttggttcagcttatgattgatacacctaccagtccagttaccagtggacttccattattctttgtgataacagtaactgccataaagcagggatatgaagattggttacggcataactcagataatgaagtaaatggagctcctgtttatgttgttcgaagtggtggccttgtaaaaactagatcaaaaaacattcgggtgggtgatattgttcgaatagccaaagatgaaatttttcctgcagacttggtgcttctgtcctcagatcgactggatggttcctgtcacgttacaactgctagtttggacggagaaactaacctgaagacacatgtggcagttccagaaacagcattattacaaacagttgccaatttggacactctagtagctgtaatagaatgccagcaaccagaagcagacttatacagattcatgggacgaatgatcataacccaacaaatggaagaaattgtaagacctctggggccggagagtctcctgcttcgtggagccagattaaaaaacacaaaagaaatttttggtgttgcggtatacactggaatggaaactaagatggcattaaattacaagagcaaatcacagaaacgatctgcagtagaaaagtcaatgaatacatttttgataatttatctagtaattcttatatctgaagctgtcatcagcactatcttgaagtatacatggcaagctgaagaaaaatgggatgaaccttggtataaccaaaaaacagaacatcaaagaaatagcagtaagattctgagatttatttcagacttccttgcttttttggttctctacaatttcatcattccaatttcattatatgtgacagtcgaaatgcagaaatttcttggatcattttttattggctgggatcttgatctgtatcatgaagaatcagatcagaaagctcaagtcaatacttccgatctgaatgaagagcttggacaggtagagtacgtgtttacagataaaactggtacactgacagaaaatgagatgcagtttcgggaatgttcaattaatggcatgaaataccaagaaattaatggtagacttgtacccgaaggaccaacaccagactcttcagaaggaaacttatcttatcttagtagtttatcccatcttaacaacttatcccatcttacaaccagttcctctttcagaaccagtcctgaaaatgaaactgaactaattaaagaacatgatctcttctttaaagcagtcagtctctgtcacactgtacagattagcaatgttcaaactgactgcactggtgatggtccctggcaatccaacctggcaccatcgcagttggagtactatgcatcttcaccagatgaaaaggctctagtagaagctgctgcaaggattggtattgtgtttattggcaattctgaagaaactatggaggttaaaactcttggaaaactggaacggtacaaactgcttcatattctggaatttgattcagatcgtaggagaatgagtgtaattgttcaggcaccttcaggtgagaagttattatttgctaaaggagctgagtcatcaattctccctaaatgtataggtggagaaatagaaaaaaccagaattcatgtagatgaatttgctttgaaagggctaagaactctgtgtatagcatatagaaaatttacatcaaaagagtatgaggaaatagataaacgcatatttgaagccaggactgccttgcagcagcgggaagagaaattggcagctgttttccagttcatagagaaagacctgatattacttggagccacagcagtagaagacagactacaagataaagttcgagaaactattgaagcattgagaatggctggtatcaaagtatgggtacttactggggataaacatgaaacagctgttagtgtgagtttatcatgtggccattttcatagaaccatgaacatccttgaacttataaaccagaaatcagacagcgagtgtgctgaacaattgaggcagcttgccagaagaattacagaggatcatgtgattcagcatgggctggtagtggatgggaccagcctatctcttgcactcagggagcatgaaaaactatttatggaagtttgcagaaattgttcagctgtattatgctgtcgtatggctccactgcagaaagcaaaagtaataagactaataaaaatatcacctgagaaacctataacattggctgttggtgatggtgctaatgacgtaagcatgatacaagaagcccatgttggcataggaatcatgggtaaagaaggaagacaggctgcaagaaacagtgactatgcaatagccagatttaagttcctctccaaattgctttttgttcatggtcatttttattatattagaatagctacccttgtacagtattttttttataagaatgtgtgctttatcacaccccagtttttatatcagttctactgtttgttttctcagcaaacattgtatgacagcgtgtacctgactttatacaatatttgttttacttccctacctattctgatatatagtcttttggaacagcatgtagaccctcatgtgttacaaaataagcccaccctttatcgagacattagtaaaaaccgcctcttaagtattaaaacatttctttattggaccatcctgggcttcagtcatgcctttattttcttttttggatcctatttactaatagggaaagatacatctctgcttggaaatggccagatgtttggaaactggacatttggcactttggtcttcacagtcatggttattacagtcacagtaaagatggctctggaaactcatttttggacttggatcaaccatctcgttacctggggatctattatattttattttgtattttccttgttttatggagggattctctggccatttttgggctcccagaatatgtattttgtgtttattcagctcctgtcaagtggttctgcttggtttgccataatcctcatggttgttacatgtctatttcttgatatcataaagaaggtctttgaccgacacctccaccctacaagtactgaaaaggcacagcttactgaaacaaatgcaggtatcaagtgcttggactccatgtgctgtttcccggaaggagaagcagcgtgtgcatctgttggaagaatgctggaacgagttataggaagatgtagtccaacccacatcagcagatcatggagtgcatcggatcctttctataccaacgacaggagcatcttgactctctccacaatggactcatctacttgttaaaggggcagtagtactttgtgggagccagttcacctcctttcctaaaattcagtgtgatcaccctgttaatggccacactagctctgaaattaatttccaaaatctttgtagtagttcatacccactcagagttataatggcaaacaaacagaaagcattagtacaagcccctcccaacacccttaatttgaatctgaacatgttaaaatttgagaataaagagacatttttcatctctttgtctggtttgtcccttgtgcttatgggactcctaatggcatttcagtctgttgctgaggccattatattttaatataaatgtagaaaaaagagagaaatcttagtaaagagtattttttagtattagcttgattattgactcttctatttaaatctgcttctgtaaattatgctgaaagtttgccttgagaactctatttttttattagagttatatttaaagcttttcatgggaaaagttaatgtgaatactgaggaattttggtccctcagtgacctgtgttgttaattcattaatgcattctgagttcacagagcaaattaggagaatcatttccaaccattatttactgcagtatggggagtaaatttataccaattcctctaactgtactgtaacacagcctgtaaagttagccatataaatgcaagggtatatcatatatacaaatcaggaatcaggtccgttcaccgaacttcaaattgatgtttactaatatttttgtgacagagtataaagaccctatagtgggtaaattagatactattagcatattattaatttaatgtctttatcattggatcttttgcatgctttaatctggttaacatatttaaatttgctttttttctctttacctgaaggctctgtgtatagtatttcatgacatcgttgtacagtttaactatatcaataaaaagtttggacagtatttaaatattgcaaatatgtttaattatacaaatcagaatagtatgggtaattaaatgaatacaaaaagaagagcctctttctgcagccgacttagacatgctcttccctttctataagctagattttagaataaagggtttcagttaataatcttattttcaggttatgtcatctaacttatagcaaactaccacaatacagtgagttctgccagtgtcccagtacaaggcatatttcaggtgtggctgtggaatgtaaaaatgctcaacttgtatcaggtaatgttagcaataaattaaatgctaagaatgattaatcgggtacatgttactgtaattaactcattgcacttcaaaacctaacttccatcctgaatttatcaagtagttcagtattgtcatttgtttttgttttattgaaaagtaatgttgtcttaagatttagaagtgattattagcttgagaactattacccagctctaagcaaataatgattgtatacatattaagataatggttaaatgcggttttaccaagttttcccttgaaaatgtaattcctttatggagatttattgtgcagccctaagcttccttcccatttcatgaatataaggcttctagaattggactggcaggggaaagaatggtagagacagaaattaagactttatccttgtttgcttgtaaactattattttcttgctaatgtaacatttgtctgttccagtgatgtaaggatattaagttattaagctaaatattaattttcaaaaatagtccttctttaacttagatatttcatagctggatttaggaagatctgttattctggaagtactaaaaagaataatacaacgtacaatgtctgcattcactaattcatgttccagaagaggaaataatgaagatatactcagtagagtactaggtgggaggatatggaaatttgctcataaaatctcttataaaacgtgcatataacaaaatgacacccagtaggcctgcattacatttacatgaccgtgtttatttgccatcaaataaactgagtactgacaccagacaaagactccaaagtcataaaatagcctatgaccaactgcagcaagacaggaggtcagctcgcctataatggtgcttaaagtgtgattgatgtaattttctgtactcaccatttgaagttagttaaggagaactttatttttttaaaaaaagtaaatggcaaccactagtgtgctcatcctgaactgttactccaaatccactccgtttttaaagcaaaattatcttgtgattttaagaaaagagttttctatttatttaagaaagtaacaatgcagtctgcaagctttcagtagttttctagtgctatattcatcctgtaaaactcttactacgtaaccagtaatcacaaggaaagtgtcccctttgcatatttctttaaaattctttctttggaaagtatgatgttgataattaacttacccttatctgccaaaaccagagcaaaatgctaaatacgttattgctaatcagtggtctcaaatcgatttgcctccctttgcctcgtctgagggctgtaagcctgaagatagtggcaagcaccaagtcagtttccaaaattgcccctcagctgctttaagtgactcagcaccctgcctcagcttcagcaggcgtaggctcaccctgggcggagcaaagtatgggccagggagaactacagctacgaagacctgctgtcgagttgagaaaaggggagaatttatggtctgaattttctaactgtcctctttcttgggtctaaagctcataatacacaaaggcttccagacctgagccacacccaggccctatcctgaacaggagactaaacagaggcaaatcaaccctaggaaatacttgcattctgccctacggttagtaccaggactgaggtcatttctactggaaaagattgtgagattgaacttatctgatcgcttgagactcctaataggcaggagtcaaggccactagaaaattgacagttaagagccaaaagtttttaaaatatgctactctgaaaaatctcgtgaaggctgtaggaaaagggagaatcttccatgttggtgtttttcctgtaaagatcagtttggggtatgatataagcaggtattaataaaaataacacaccaaagagttacgtaaaacatgttttattaattttggtccccacgtacagacattttatttctattttgaaatgagttatctattttcataaaagtaaaacactattaaagtgctgttttatgtgaaataacttgaatgttgttcctataaaaaatagatcataactcatgatatgtttgtaatcatggtaatttagatttttatgaggaatgagtatctggaaatattgtagcaatacttggtttaaaattttggacctgagacactgtggctgtctaatgtaatcctttaaaaattctctgcattgtcagtaaatgtagtatattattgtacagctactcataattttttaaagtttatgaagttatatttatcaaataaaaactttcctatataattaaaaaaaaaaaaaaaaaaaaaaaaaaaaacaaaaaaaaaaaaaaaaaaaa

SEQ ID NO: 1483 - DNA, 3213 bp, HOMO SAPIENS
gaccgaagcaagagctggttcaggtggcagccacagcagcctcagggacctcagcaactatggcctcctgcccagactctgataatagctgggtgcttgctggctccgagagcctgccagtggagacactgggcccggcatccaggatggacccagaatctgagagagccctgcaggcccctcacagcccctccaagacagatgggaaagaattagctgggaccatggatggagaagggacgctcttccagactgaaagccctcagtctggcagcattctaacagaggagactgaggtcaagggcaccctggaaggtgatgtttgtggtgtggagcctcctggcccaggagacacagtagtccagggagacctgcaggagaccaccgtggtgacaggcctgggaccagacacacaggacctggaaggccagagccctccacagagcctgccttcaacccccaaagcagcttggatcagggaggagggccgctgctccagcagtgacgatgacaccgacgtggacatggagggtctgcggagacggcggggccgggaggccggcccacctcagcccatggtgcccctggctgtggagaaccaggctgggggtgagggtgcaggcggggagctgggcatctccctcaacatgtgcctccttggggccctggttctgcttggcctgggggtcctcctcttctcaggtggcctctcagagtctgagactgggcccatggaggaagtggagcggcaggtcctcccagaccccgaggtgctggaagctgtgggggacaggcaggatgggctaagggaacagctgcaggccccagtgcctcctgacagtgtccccagcctgcaaaacatgggtcttctgctggacaagctggccaaggagaaccaggacatccggctgctgcaggcccagctgcaggcccaaaaggaagagcttcagagcctgatgcaccagcccaaagggctagaggaggagaatgcccagctccggggggctctgcagcagggcgaagccttccagcgggctctggagtcagagctgcagcagctgcgggcccggctccaggggctggaggccgactgtgtccggggcccagatggggtgtgcctcagtgggggtagaggcccacagggtgacaaggccatcagggagcaaggccccagggagcaggagccagaactcagcttcctgaagcagaaggaacagctggaggctgaggcacaggcattaaggcaagagttagagaggcagcgacggctgctggggtctgtacagcaggatctggagaggagcttgcaggatgccagccgcggggacccagctcatgctggcttggctgagctgggccacagattggcccagaaactgcagggcctggagaactggggccaggaccctggggtctctgccaatgcctcaaaggcctggcaccagaagtcccacttccagaattctagggagtggagtggaaaggaaaagtggtgggatgggcagagagaccggaaggctgagcactggaaacataagaaggaagaatctggccgggaaaggaagaagaactggggaggtcaggaggacagggagccagcaggaaggtggaaggagggcaggccaagggtggaggagtcggggagcaagaaggagggcaagcgacagggcccgaaggaacccccaaggaaaagtggtagcttccactcctctggagaaaagcagaagcaacctcggtggagggaagggactaaggacagccatgaccccctgccatcctgggcagagctgttgaggcccaagtaccgggcaccccagggctgctcaggtgtggacgagtgtgcccggcaggagggcctgactttctttggcacagagctagccccagtgcggcaacaggagctggcctctctgctaagaacatacttggcacggctgccctgggctgggcagctgaccaaggagctacccctctcacctgctttctttggtgaggatggcatcttccgtcatgaccgcctccgcttccgggattttgtggatgccctggaggacagcttggaggaggtggctgtgcaacagacaggtgatgatgatgaagtagatgactttgaggacttcatcttcagccacttctttggagacaaagcactgaagaagaggtcagggaagaaggacaagcactcacagagcccaagagctgcggggcccagggaggggcacagccatagccaccaccaccaccaccggggctgacaccctgccccacagggaatggccttggcctggcccagcccaagatcccagcgttatctaactcctggagggtggactctgtcctggcttgtttggtgtcctcagatatctttcacacagtagagcaaaatcaccagccctgcactgatgtcactttatgtagaaaaaggccttagctggacctgcgttgccgtctatgcaaatgcatgcaaatactccaggccctgggatgtgggcttgtgttttgtcactgtgaagggggagatgggagaggagcctgttttggggtggggtctggggaaggcaatctgattctgaagctaaagagctttcatcctcttgagtgtatgtccccatagtgggccccttgacccacatgctgaccggtgccttgggatttgactagagttgctggctcgaggcccagcacgaggacttaccctggggttttgttaggtttggaagcagctgtccctagggggtgaagtcccccccctttttttttttacccctgcttctcccacggcttcacctccctatgtgaactgtagactcagatcccaataaagtgctgttgcagctatgatgctaggtggtttctaagcacaggggacaccccacaccccctgcctgaatggatgggtccatcccaggcactggtacttgcccccttgttctgtatccccctttgcccttgccttgcccttccaacaaaccctaggcccttgagaagctgatacttctccttttgctcacagctgccttggccccacccctgggagatgtagcaaattgagtgtgggttttggagtctgagcctcaggctcaaatccaggccaagtgatcttgggcaagttaatctctgggaactttgggtttcttatcctcaaaaaaggcgatggaagggctggggaagtgattaaataaaagcaacgcaagaaaaaaaaaaaaaaaaaaa

SEQ ID NO: 1484 - DNA, 3223 bp, HOMO SAPIENS; identical to SEQ ID NO: 932

SEQ ID NO: 1485 - DNA, 4743 bp, HOMO SAPIENS
gctctgtggagctgcgcctgccaactcattgctttctgctgtgctgtgatcctgcagtcagttgccgctgttgctactgcaatcatttgcaccaaactgagccagagaagttccctcttttaacataaagagtcaagaaattggagcatggctatgagcaatggaaacaatgattttgtggttctgagcaacagcagcatcgcaaccagtgctgctaacccgagtcccctcaccccctgtgatggagaccatgcagcccagcagctcacacccaaagaagcaacaagaacaaaagtgagtccaaatggatgcctgcaacttaatggcacggtcaaatcatcctttctgcctttagacaaccaaagaatgcctcagatgttaccccaatgctgccatccttgcccataccatcaccctttgactagccatagcagtcaccaagagtgccatcccgaggctggccctgcagcaccctctgctttggcctcgtgttgcatgcagccacactccgagtattctgcatctctttgtccaaatcattcacctgtgtatcagactacgtgctgtcttcagccctctccatccttctgcctgcatcatccgtggcctgaccattttcagcatcagcctgtgcaacagcacatagccaacataagaccatccagacctttcaagttgccaaaaagttatgcagccctgatagccgactggccggtggtggtcttgggcatgtgcaccatgttcatcgtagtctgtgccttggttggagtattagtgccagagctccctgacttctctgatccattgctgggttttgaaccaagaggaacagcaataggccagagattggtcacatggaataatatggtgaaaaatacaggatacaaagcaacattagcaaattatccctttaaatatgcagatgaacaagccaaaagccatcgggatgatagatggtcagatgatcattatgaaagagagaaaagagaagttgactggaacttccacaaggacagctttttctgcgacgttccaagtgaccgatattccagagtggtatttacttcatctggaggggagacattatggaatttacctgcaattaaatcaatgtgcaatgtagataattccaggatcagatctcatccccagtttggtgatctctgccagaggaccactgctgcctcctgctgccccagctggacactgggaaactacatcgccattctgaacaatagatcgtcctgtcagaaaatagttgagcgagacgtttctcataccttgaagctgcttcggacttgtgccaaacactaccaaaatggcactctggggccagactgctgggacatggcagccagaagaaaggaccagctcaagtgcaccaatgtgccacgcaaatgtaccaagtacaatgctgtgtaccagatcctccattacttggtggacaaagactttatgaccccaaagacggctgactatgccacgccagctttaaaatacagcatgctcttctctcccacagagaaaggggagagcatgatgaacatttacttggacaactttgaaaactggaactcttctgacggcgtgactaccatcaccgggattgagtttggtatcaaacacagtttgtttcaggattatcttctaatggatactgtgtatcctgccatagccattgtgattgtccttttagttatgtgtgtctacaccaagtccatgtttatcactctgatgacaatgtttgcaataatcagttctttgattgtttcctattttctctatcgtgtagtatttcacttcgaattttttccttttatgaacctcactgccctcattattttggttggaattggagcagatgatgcttttgtcctgtgtgatgtttggaactacacaaaatttgataagcctcatgccgaaacctcagaaacagtaagcatcaccttgcagcacgctgccctctccatgttcgtcaccagttttaccactgctgctgccttttatgctaactatgttagcaacattacagcaatccgatgctttggggtttatgcggggacagctatattggtgaattacgttttgatggtcacatggcttccagcagttgttgtgctgcatgagcggtatcttcttaatatattcacttgcttcaaaaagccccagcagcaaatatatgataacaaaagctgctggacagtggcttgccagaagtgccacaaagtactctttgccatttcagaagcatctcgaatttttttcgaaaaagtattgccatgcattgtcattaagtttcgctacctttggctgttttggttccttgccttaactgtaggtggggcctacattgtatgtataaatccaaagatgaaactgccctcactggagttatccgagttccaggtgttccggtcgtcccatccttttgagcgttatgatgctgaatacaaaaagcttttcatgtttgaacgtgttcaccatggcgaggagctccacatgcccatcacagtaatctggggcgtgtccccagaagacaatggcaacccactaaatcccaagagtaaagggaagttgacattagatagcagttttaacatcgccagcccagcttcccaggcctggattttgcacttctgtcaaaaactgagaaaccaaacattcttttaccagactgatgaacaggacttcaccagctgcttcattgagacattcaaacagtggatggaaaaccaggactgtgatgagcctgccctgtacccatgctgcagccactggagcttcccctacaagcaagagatttttgaactgtgcatcaagagagctatcatggagctggaaaggagtacagggtaccatttggatagcaaaaccccagggccgaggtttgatatcaatgatactatcagggcagtggtgttagagttccagagtacctacctcttcacactggcttatgaaaagatgcatcagttttataaagaggtggactcgtggatatccagtgagctgagttcggcccctgaaggcctcagcaatggttggtttgtcagcaatctggagttctatgacctccaggatagcctctccgatggcaccctcattgccatggggctgtcagttgctgttgcatttagcgtgatgctgctgacaacttggaacatcatcataagcctttatgccatcatttcaattgctggaacgatatttgtcactgttggttctcttgtcctgctgggctgggagctcaatgtgttggaatctgtcaccatttcggttgccgtcggcttgtctgtagactttgccgtccattatggggttgcctaccgcttggctccagatcccgaccgagaaggcaaagtgatcttctctctgagtcgcgtgggctctgcgatggccatggctgccctgaccaccttcgtggcaggggccatgatgatgccctccacagttctagcttacacccagctgggcaccttcatgatgctcatcatgtgtatcagttgggctttcgccaccttctttttccagtgcatgtgccggtgccttggaccacagggtacctgtggtcagattcctttacctaaaaaactacagtgcagtgccttttcccatgccttgtctacaagtcccagtgacaagggacaaagcaaaacacataccataaatgcttatcatttagatcccaggggcccaaaatctgaactggagcatgagttttatgaattagaacctctggcttcccacagctgcactgcccctgagaagaccacttatgaagagacccacatctgctctgaatttttcaacagccaagcaaagaatttagggatgcctgtgcatgcagcttacaacagtgaactcagcaaaagcactgaaagtgacgctggctctgccttgttacagccccctcttgaacagcataccgtgtgtcacttcttctctctgaatcagagatgtagctgcccagatgcctacaaacacttgaactatggcccacactcttgccagcagatgggggactgcttgtgccaccagtgctctcctaccactagcagctttgtccagatccaaaacggcgtggcacctctgaaggccacacaccaagctgtcgagggctttgtgcaccccatcacgcacatccaccactgtccctgcctgcagggcagagtaaagccagccggaatgcagaattctctgcctaggaattttttcctccacccagtgcagcacattcaggcccaagaaaaaattggcaagaccaatgtacacagtcttcagaggagcatagaagagcatcttccaaagatggcagagccatcgtcatttgtctgcagaagcactggatcgttactcaaaacgtgttgcgaccccgagaataaacaaagggaactctgtaaaaatagagacgtgagcaatctggagagcagtggagggactgaaaacaaggcaggagggaaagtggagctgagcttgtcacagacggatgcaagtgtgaactcagaacatttcaatcagaatgaaccaaaagtcctatttaatcatttaatgggggaggctggttgtaggtcttgcccaaataattcacaaagttgtggcagaattgtgagagtgaagtgcaattctgtggactgtcaaatgccaaacatggaagccaatgtgcctgctgtattaacacactcggaactttctggtgaaagtttgttaataaaaacactataataaatgcagcattcaattcag

SEQ ID NO: 1486 - DNA, 1524 bp, HOMO SAPIENS
ggacctcggtgagtacaaggtggtggggggtcgccagcaggttccctctccccggccccagctctggacgctcaccccagtgcaacgccctgagtgacggaaagagccaagacaatgcaaactccagtgaacattcccgtgcctgtgctccggctgccccggggccctgatggcttcagccgtggctttgcccctgatggacgcagagcccccttgaggccagaggttcctgaaatccaggagtgtcccatagctcaagaatccctggaatcccaggagcagcgggcacgagccgcccttcgggagcgttacctccgcagcctgctggccatggtgggtcatcaggtgagcttcacgttgcacgagggtgtgcgtgtggccgcccactttggagccaccgacctggatgtggccaacttctacgtgtcacagctgcagactcccataggtgtgcaagcagaggcgctgctccgatgtagtgacattatttcatataccttcaagccataaagatattgtgttcacttttctgcttgaggctaaggcactgtatcccaggcctcccaatgttcccgagccaggaactctgggccccatggagttatgagctcccttggaattttgagccaagctttaagcaagtctggactcctgagacctcctgggtctagtcagtaaaattctgcaactctaggaattctaagatcccattggaaggaatgctctacctcacagaactctgaaccctacagaaatatgggcctgctgccatttcctgaagaccggggcatcggggtggggtgataaaggatacaacctgcacagggggaagttattaaagaggctgcaaagtccagccaccctgaagatactccccagtgctcccctcctgctaaagaaccagttaccccaggaaaattcgactcctgtttttctttaattaactataccgacggggatggagtcatctttaggggctggtagggtggttatccaagggctgaatccagtggagctgggccaagtacgacaggagtccagataaaggtgtaggggctgcacggccgcaagtctcctggaaaggctggagtgaccggcatgccgggattgggagattaggatttgatttcattttggggcgggcggtggctcgtgctgggtcacgtggtcgtgcccaagcgctcctcctgttgccccacctgtggttgctgtggactgcacacgacagcagattcgctgtcccctcgttggaggcgaatggtcggaccccgagtggcggcgcccctgataaaaggccgaggattcgcgatcagggtgcaacttcactccctcctcttttctctccagccttgcagcgtggccgttcacatcacgcgcttcactaagcctcctatcactagtaacctttcagcgcattgtttaaaaagaaagcagtttctgtccctttctgtagttcctttaagttcaggatgtaagcgaagccttccattaagtaaaggtgagtgtcgtttcgtctcagtcgcg

SEQ ID NO: 1487 - DNA, 1367 bp, HOMO SAPIENS
acttccgctgctgtttcgtagccgactgctgaaggctggtttgcgtcgacatggcggttaccctgagtctcttgctgggcgggcgcgtttgcgccgccgtcactcgctgtgggttcgcgacccggggggtggcgggcccaggccctattggccgggagccggaccccgattccgactgggagccggaggaacgggagctgcaggaggtggagagcaccctgaaacgacagaaacaagcaatccgattccagaaaattcggaggcaaatggaggcgcctggtgccccgcccaggaccctgacgtgggaagccatggagcagatacggtatttacatgaggaatttccagagtcctggtcagttcccaggttggctgaaggctttgatgtcagcactgatgtgatccgaagagttttaaaaagcaagtttttacccacattggagcagaagctgaagcaggatcaaaaagtccttaagaaagctgggcttgcccactcgctgcagcacctccggggctctggaaatacctcaaagctgctccctgcaggccactctgtatcaggctctttgcttatgccagggcatgaagcctcatctaaagacccaaatcacagcacagctttgaaagtgatagagtcagacactcacaggacaaatacaccaaggagaaggaagggaagaaataaagaaatccaggacctggaggagagctttgtgcctgttgctgcacccctaggtcatccaagagagctgcagaagtactccagtgattctgagagccccagaggaactggcagtggtgcgttgccaagtggtcagaagctggaggagttgaaggcagaggagccagataacttcagcagcaaagtagtgcagaggggccgagagttctttgacagcaacgggaacttcctgtacagaatttgagtcggggcttggcttatggagatgcctcgtgaaacacagctgggcaagtattaatgtatatggaacagcctggatttctgcatatggataagccaccttggaataggaagaggtgttgagcctggactgtgggaggaaagagctgcgtggatagattcaaacttcctgtggtagtgctcccagtctgacctctgtagaccttcagtactcactcttcttgcttaggctctctgtgtgttgaaagccatcccgtgttgcatgtgttgttacaattttctgtgatacttgcaatttatgtttgagaagaagtgaaaagtttgccttctgacctcatttccttcttgatcagtgaacactaacattttggggacaacttagtcaattggttttccttacaacaaaataaagtaaaatgtagcagtcaaaaaaaaaaaaaaaaaa

SEQ ID NO: 1488 - DNA, 4137 bp, HOMO SAPIENS
ttaccaaagatacatccccaggcggcaccattcacttcacatgaaagccgctgctcttggttcctgagatgatctcatctgaacatggctccagcgacctcagccacaggaactagagacagcttgctttctgtcgtggcaatgttttgaaactggcaaaatcagattttatcatgtgggcaacctgctgcaactggttctgcctggatggacagcctgaggaggtcccaccaccccagggagccaggatgcaggcctattccaaccctgggtacagctccttcccttccccaacaggcttggaaccaagctgcaagtcctgtggggctcactttgcaaacacggccaggaagcagacctgcttggactgtaagaaaaatttttgcatgacctgttcgagccaagtagggaatgggccccgcctctgccttctctgccaacggtttcgagctacagcctttcagcgagaggagctcatgaagatgaaggtgaaggacttgagggactatctcagcctccatgacatctctaccgaaatgtgccgggagaaagaagagctggtgctcttggtccttggccagcagcctgtaatctcccaggaggacaggactcgtgcctccaccttgtccccagactttcctgagcagcaggccttcctgacccagcctcactccagcatggttccacctacctcacccaacctcccctcttcatctgcacaagccacctctgttcccccagcccaggttcaggagaatcagcaggccaatggccatgtgtctcaggatcaagaggaacccgtctacctggagagcgtggccagagtacctgctgaggatgagacccagtctattgactcagaggacagctttgtcccaggccgaagggcctctctgtctgacctgactgacctggaggacattgaaggcctgacagtgcggcagctgaaagagatcttggctcgcaactttgtcaactacaagggctgctgtgagaagtgggagctgatggagagagtgacccggctatacaaggatcagaaaggactccagcacctggtcagtggtgccgaagaccaaaacgggggagcagtaccatcaggcttggaggagaacctgtgtaagatctgcatggactcacccattgactgtgttcttctggagtgtggccacatggtaacctgtaccaagtgtggcaagcgcatgaatgaatgtcccatctgccggcagtatgtaatccgagctgtgcatgtcttccggtcctgagagcttgcatcggtttcttcagtgccttacagggaaatagcctggggtgtctgggctcagggttggccagcttgcagaggagcaagctagtagaaatattgcagggttcccaaaaccaggtcaagcaagatgccatgtcacccctgagcatgcctgtcttcccaggggtgtacctcttggctggcaaagcccaaggccagtgggaacttgtataaatcacatgggtatgttcttggttcagtgatcttggagtgatgatggtaactgatgaacagagaactttccagaacttgggtcctgtcttcctccctgaacctagacagtttcacccctcctcctgtacccaacccatccccaccccatatgggagatgcttgcccatgtgtttcatcaatcagaagtcctcctccccagcacattcggatttaaatttctggtctctccggctttctgtgctttaactatctttgctaaagtctcttgctacattgcctaaatccatttgtttctttggaccaaaaatgttagtttaccagaccgatagtggtccttaggacagattttagaccagtaaacttatctttggtgagaaatgaaatacaaatgctatagaaaaatttcaaagttgttaaaagccacttcattaaatgctgggattggaagctgttggtctcctgacctgactctgggagccaacaaaacatcaggctcccaaactgctgggaaatttgtttctgtctgcaagggatagtgcgtgcataatccctgctgctgcttctcttgggacctgatttgcaccatccttagtttatgcggaaaggggaagcaatgggtggaggcagtggccttctccttaattttggcttggcttctgatccttttcccaactagaagtcttaagccacttttcgctgaaaatgaaatccctcccttatccatggtagttttaaatttggtttcattgaagaaatagatttaggcaaagagcctgtgctcttctctggccagactgctgttgaagttcctggagagcaaatgttaagacagagcacttaagagctttcaggaggtactgaatgagactggattctgttgtaagccgacagttcaagtctttatttcccaggttggtggggagtgaggagaccctactttcattccctttcctagcccactgatttttgggggcaggtcagggagaaagcattttttttttttttttgagtctcactctgttgcccaggctggagtgcagtggtacagtcttggcttactgcaacctccacctcccaggttcaagctattctcctgccttagcctccagagtagctgggattataggcgcccaccaccacaccaggctaatttttgtatttttagtagagacggggttttaccatgttcaccaggctggtcttgaactcttgaccttatgatccgcccgcctcagcttcccaaagtgctgggattacaggcgtgagccaccacacccagcaggagaaaccattttctaggctctttaggaaggaccatgcaatgagtaggtgatgtatttgagccctcacagtctttacacccctagaggagctggaggacttaagagtttgctgcagaagcgtggccaagcacaaaacacatgatcaggaaagcagagtgttttcccattaccaatggatgaactatgcaaaccctaaacgccttggcagacacctcccaccccttacccctcccatgcagctgaaaaatctgagactagaaccaatcatgactctggatggcagagggaaacctctaaagggacttattacattggtacagacatatttatgctttcttccatcaccaaccactaaacccctttggaggaatgaaataactgcataaactagtcaactgaacactgggccacttacctcaatgttatacaaagtcctggatgatttgattctgaaccacagcctttgcaggagttgggggaatcagatttgctcatgaagacatccctttccacttttgtcatgggcagtaaatactatagtttacaatgcctaccaattagcaaaggatcattcattcagctactcagttcctctgtaaaacaggtctatgtatgtgcaattcagctaagatctagcagtaacttaagggcagaagctggctctctacttacaacctgctttctctgctgaagccttacctcctcttcagtttccctcctagacacaaatcgaaaataatatactgatagctggttagtaacctcagtaagaattaaaactgaggttgtttactcattttgcctttaaatcttttatccccttttggtgaaggtttccctttaggaaaaaaggtgtcaaacaaccctgattttttttttttttgcatcatttttattacaccaaattaaagttgggagttccaagatcccattccagttaatatttaaccaaggtctaaaatttgattttttttaaatctttgaatcctcccttctgcccctcatggatccttggttttaatgatatggaaacatctaattcttagaattattccgtagcttttgctgattactctgagatttcagttaagacttgtttcaaaagacagatagctgactggttcataatacattggaatagttggatccaaactaataagaataagctgtacaggaactagtgctcaatatacattgtataaatttgtggaaatctcttggatgtgaattgttacttcaagtggcttttattaagattttctcagacttacttggaggttaaagcaaacccaaatgtgtattattttgttacagagctctgctttataattttgtaataaagtttcaatacagacaccaaaaaaaaaaaaaaaa

SEQ ID NO: 1489 - DNA, 528 bp, HOMO SAPIENS
gacacacaatatcacttctgtagcattcttgccaaaactgcataaactgaatctgatcatgaagaaacaatcaggcaacccaaattcaacacattccactcataagtgttctgtactcttcaaaaatattcattaaagtcaaagagaggctgaggaactatttcaaactcaggagacttggaaactaaatgcagtgtgtgatcttggattggattttagattagtaggaaacatgactgtaaaaaagtgactgaaaaataactggtattattgggacatcaatgttaaatttcatgaatttaatatatattggttatgtaagttaatgttcttgttctgagctgaaattagtttgagcctatagggggcaaagctgtctaaaactcccaaatagttctgcaaaaagattttcagtggggtacacacatggagagagacagagagagagagagagagagaacatatttgatgaaacattaattgatgagatgaatctaagtgaaggctatatggggtgttcattgcaca

SEQ ID NO: 1490 - DNA, 508 bp, HOMO SAPIENS
  misc_feature (46)..(46): n is a, c, g, or t
agctgctcaccatcaggctgcaagtgtctacagtggaaccagatgncctctttgaggaccagcactagaagcctcttggaacacttctgttacgggaggcagggaagtggcatactattgcccggtgccacaaaaagtgcttccttcagtggcgctttgccagttggaggggtggtggactgtgatgggaacccacgagggaactgaatgcacacagccgccgacagctggccagccccacaggcagctcgatgccaaagacaccaggcccctcagaatgcctgggcatcaggaaaagaaagcccagttggcagggtctgcctagaaaccaggcctgcaggggagaggacttcattagaagggacattgccaagcctcataccaggaaagccaggtcatctttctctaccatccactccccaggtgactgggcacctcattttgccttatttttagcatgaccacacttcccagtttacacctgcggtcttggcatcatcattaactc

SEQ ID NO: 1491 - DNA, 1893 bp, HOMO SAPIENS
attagacagcacactgctgactgttttcagttgtttctgtaacagcagaaagtgcactcactaggagtagtcagaattcaaaatgctcaagagaaagccatccaatgtttcagagaaggagaaacatcaaaaaccaaagcgaagcagcagttttgggaatttcgatcgttttcggaataattctttatcaaaaccagatgattcaactgaggcacatgaaggagatcccacaaatggaagtggagaacaaagtaaaacttcaaataatggaggcggtttgggtaaaaaaatgagagctatttcatggacaatgaagaaaaaagtgggtaaaaagtacatcaaagccctttctgaggaaaaggatgaggaagatggagagaatgcccacccatatagaaacagtgaccctgtgattgggacccacacagagaaggtgtccctcaaagccagtgactccatggatagtctctacagtggacagagctcatcaagtggcataacaagctgttcagatggtacaagtaaccgggacagctttcgactggatgacgatggcccctattcaggaccattctgtggccgtgccagagtgcatacggatttcacgccaagtccctatgacactgactccctcaaaatcaagaaaggagacatcatagacattatttgcaaaacaccaatggggatgtggacaggaatgttgaacaataaagtgggaaacttcaaattcatttatgtggatgtcatctcagaagaggaagcagcccccaagaaaataaaggcaaaccgaaggagtaacagcaaaaaatccaagactctgcaggagttcctagagaggattcatctgcaggaatacacctcaacacttttgctcaatggttatgagactctagaagatttaaaagatataaaagagagtcacctcattgaattaaatattgaaaacccagatgacagaagaaggttactatcagctgctgaaaacttccttgaagaagaaattattcaagagcaagaaaatgaacctgagcccctatccttgagctcagacatctccttaaataagtcacagttagatgactgcccaagggactctggttgctatatctcatcaggaaattcagataatggcaaagaggatctggagtctgaaaatctgtctgacatggtacataagattattatcacagagccaagtgactgaacacgcattcccaactatatatctacagatgcattccattttaactcttcttgagctaaaacgtcaaataggagaggaagataagataaatatttgtaaataaaacctaaagtttaaatgttttaatctgaataattgtacataaaattttgtatctctaacattccaaattactgtcaataaaatatatatttattattttaaatgctatgtgttaatatttcacttgcttgtattagaaaggcaaaatgtaagactttggtatgtgtgacatatgctttatttggctttattttacaagtacagtatctgcaaaaaacaaagtaaccttttttcatacctgccagttttgaatttatatatgttattgaacaaatagtaatagaggattcgctgttgaaacaagttgtccaagcaatgttatattcatttttatacttattgggaaagtgtgagttaatattggacacattttatcctgatccacagtggagttttagtaattatattttgttgatttcttcattttgttttctggtataaaagtagagataatgtgtagtcacttctgatttagtgaaaccaattgtaataattgtggaaatgttttgtctttaagtgtaaatattttaaaatttgacataccctaatgttaataataaaaagaactatttgcatattgcaaaaaa

SEQ ID NO: 1492 - DNA, 4433 bp, HOMO SAPIENS
ttcctgtctacgtttcatttcctgggggcttgccaagtgataaacagacccaggcgtgtgtggtagagttcgggttttttagcacgaagtgggtggctggagtttgcttgaaaacatcaattgactttgtgatcattacagaaatgctggtgtaaggtgttcagaagacaatggagaaaaaatggaaatactgtgctgtctattacatcatccagatacattttgtcaagggagtttgggaaaaaacagtcaacacagaagaaaatgtttatgctacacttggctctgatgtcaacctgacctgccaaacacagacagtaggcttcttcgtgcagatgcaatggtccaaggtcaccaataagatagacctgattgctgtctatcatccccaatacggcttctactgtgcctatgggagaccctgtgagtcacttgtgactttcacagaaactcctgagaatgggtcaaaatggactctgcacttaaggaatatgtcttgttcagtcagtggaaggtacgagtgtatgcttgttctgtatccagagggcattcagactaaaatctacaaccttctcattcagacacacgttacagcagatgaatggaacagcaaccatacgatagaaatagagataaatcagactctggaaataccatgctttcaaaatagctcctcaaaaatttcatctgagttcacctatgcatggtcggtggaggataatggaactcaggaaacacttatctcccaaaatcacctcatcagcaattccacattacttaaagatagagtcaagcttggtacagactacagactccacctctctccagtccaaatcttcgatgatgggcggaagttctcttgccacattagagtcggtcctaacaaaatcttgaggagctccaccacagtcaaggtttttgctaaaccagaaatccctgtgattgtggaaaataactccacggatgtcttggtagagagaagatttacctgcttactaaagaatgtatttcccaaagcaaatatcacatggtttatagatggaagttttcttcatgatgaaaaagaaggaatatatattactaatgaagagagaaaaggcaaagatggatttttggaactgaagtctgttttaacaagggtacatagtaataaaccagcccaatcagacaacttgaccatttggtgtatggctctgtctccagtcccaggaaataaagtgtggaacatctcatcagaaaagatcacttttctcttaggttctgaaatttcctcaacagaccctccactgagtgttacagaatctacccttgacacccaaccttctccagccagcagtgtatctcctgcaagatatccagctacatcttcagtgacccttgtagatgtgagtgccttgaggccaaacaccactcctcaacccagcaattccagtatgactacccgaggcttcaactatccctggacctccagtgggacagataccaaaaaatcagtttcacggatacctagtgaaacatacagttcatccccgtcaggtgcaggctcaacacttcatgacaatgtctttaccagcacagccagagcattttcagaagtccccacaactgccaatggatctacgaaaactaatcacgtccatatcactggtattgtggtcaataagcccaaagatggaatgtcctggccagtgattgtagcagctttactcttttgctgcatgatattgtttggtcttggagtgagaaaatggtgtcagtaccaaaaagaaataatggaaagacctccacctttcaagccaccaccacctcccatcaagtacacttgcattcaagagcccaacgaaagtgatctgccttatcatgagatggagaccctctagtctcgtgagactttgccccatggcagaactctgctggaatcctattgagaaggtagacattgtgctttattaatatagtcgctcttcagccatgcctttgctgcagctgaaatggaagtcagaagtgagtgacctgttttcccagcaactcaccctcttccatctccaaacgcctgaagcttaaccaagagtgagaggatatgtcatgttcacactcaatgcaattcgtagtggttttcttgcttatgtaagaagtacatattagtctgccatctttaaaaaaaaatacagtattttcatttaaattctctgatggagggacaacaatggtttcaactgtatgcccatgcctgatcctcttatttgaacatctatcaacattgtaaactctttgccaaaatcctggggctttgctgcattccctaagataattacaggaaaaagaaaatgtaaaagtgctaacaaggctgccaagtaatggagaagtatggttagtcttcatattgaaattctgttgcttattttcatggaaggaaacagaatactttgcacaggaaccacattttcaatcctccttcactgtcttcctaccatgttcagcccagactcctgccacatggaccaggatgaagagggatcaaagagataattagccaaaaacccagtagcctagaagatacaaaactccactggcctctaaaattatattagccaagagtggtttcatttgagtgccttcgtgtgtatgtccatcaaactggaaccaaactgttttgtaagtaaacaggcagcctaagcccaaccctactttctaattccagttattctctttttcatctggggatttacctgttcatttaatctgcctgttttgatctgttttgaaaaagataaagagcctcaaatcagaccagcactgattaattaaccctgctcctaccaatcttttttaaagcagttgaagcagaatgtataggtgtcagagaagaaacctagtcagccagacgtgctctgtattcagcaatagtttgtgaatgaataaattactaatcctccttgtcgcttgaaaccttcccacactccctgctccaggagggaaaaacagatgttgttgacagatagagtgataggcaaattctgtgtggactttagtcccaaaaggaaactttagttcacttgcagtatgcttatccttgactgcacatgagaatgccttgtgcagagttatttggagattatgtctttttcttaaacaccatggctgtcacacttcagttcaattaaatcagaatgtctgaggagtgagacacaggcatcaacactctcaaatgattcacatgttcagccaaagttgagaaccatcgagcctgtggaagttctttctcatggctcagaatcttaggtaggtgcttaactcttgtggtggccagcctccaagatgagccccagtgttcttgcctcctactattcacatctttatgtggtcccctccaatgctgaatacagatgatttgtgtaacctgaggccaggattaaggggaggcaatcaatgcacctagggaaaaaatttaaggaggtattcacactcagggtcatgcacttgcacaatgttgagaatgagtaccactctcaccattggtatagccaaaaaagcttggaagtgaccaaggctaggtcacaaaatacactgtggcttcttctttgatctctctttgaccatactgacactgggaaaagcccattcccatgccatgaagacaccaaggcagccctattgagaaatctacctgtcgtggccgggcgcagtggctcacgcctgtaatcccagcactttgggaggccgaggtgggtggatcacgaggtcaggagatcgagaccatcctggctaacacagtgaaaccccgtctctactaaaaatacaaaaaattagccgggtgtggtgtcgggcacctgtagtcccagctactcaggaggctgaggcaggagaagggtgggaacccgggaggcagagcttgcagtgagccgagattgtgccactgcacactccaatctgggtgaaagaccgagactccgcctcaaaaaaaaaaaaaaaagaaagaaagaaagaaagaaagaaatctacctgtcaaggaactaaggtattttgctaacaagcaccaacttgccagccatgtaagggagccatcttggaagcagatcctccagcctccagtcaagtcttcagataattgcaacttcagttgatcttttgaccaagacctcaagagagccagaactacccagctaagccttttactaaatttctgaacttctaacactattagataataagtgcttattgtttaacaccattaattttgagtataatttgttacatagcgacagataactatacagctcaacaactagaaaaataaactgtttacctgccttaattatttatctttagttccttattagttctcaagaaacaaatgctagcttcatatgtatggctgttgctttgcttcatgtgtatggctatttgtatttaacaagacttaatcatcagta

SEQ ID NO: 1493 - DNA, 551 bp, HOMO SAPIENS
  misc_feature (278)..(278): n is a, c, g, or t
  misc_feature (291)..(293): n is a, c, g, or t
agcaagagagatcctacctagtcctagggacacacaacctcagagacaaatgcagaaggcagttaccaagcaattacggtccaacatgtctggtccaaccttttcctttactggtgaagaaactgaaactttagagggaatgagcttgtttacatgcaagaagtgaatttgagatcaagttgggactcaaatcctatttcacaattagaattctgtcctaacattcaacccaattcaataaacatttgttgaaaaatctatgatgtgcattaaaaatnttcagtgctttannnctgaaactttctctgttcaaaaagcctttatacctccctcattcctactgcatcaagtgcaaacttcttcctggccttcctgaccttctaagatgggccatgaggctatctcatcagtctgggtccccatcactgcccaggggccgccccctctgctgcagtctgtgtgtctcagctccagttcttctcatcctcaggccccacctcactcagtcataccacaggcacactctttgccccttttgatcagctttgaag

SEQ ID NO: 1494 - DNA, 412 bp, HOMO SAPIENS
taaatcccaggtacgaatccaagttttgagttctagaaggatcatggcatgcttatcctttttgttttcaccaaccctgagaggtagtctacattccaagattagaacataatgaagttagaagggctgcattctatgaggcagggagaattagacatggaattacagagcttttcattgcaatttccatgactgttatttatgtgaacttacacaaatctaaggatcactctgagccacagtttctttatcctattctgaaatctctttaaaggacttgagtccaagctctctcccacactgcaagaccccactgcaatggctcctatagctgctgccatggcctcctccaatcaagtcagccttactatcttaaaaaaagtaaataagggcagctaaacgccatggcaaa

SEQ ID NO: 1495 - DNA, 5156 bp, HOMO SAPIENS
gaggtgagcgcggacgtcagagtggagagcggaaggtcagggaggctcggagcggaagtgagactagggagtctgtccgccattgtggacccgagaagcagagagcgagagggggaagaggagcgtgcaagcggaaaagacgggcctcttcctccgactcccgagcgcgaggccctcattttgggttctcagcgaacggcggcagcggcggcggctggaacaatcactcggccaagggcgacagccaactgctgtgagtgcacggggagaggcccaggcagcggcggcggcggcggctctcgggttgcggtgaagaatgtcagccactagcgtggatcagagacctaaagggcaaggaaataaagtttcagtacaaaacggttcgattcatcaaaaagatgctgtaaatgatgatgattttgagccatacttaagtagccagacaaatcagagtaacagctatccaccaatgtcagatccatacatgcctagttactatgctccatccattggatttccatattctcttggggaagcagcgtggtccacagctggagaccagcctatgccatatctgacaacctatggacaaatgagtaatggagaacatcactatataccagatggtgtatttagtcaacctggggcattaggaaatacccctccatttcttggtcaacatggatttaacttttttcctggtaatgctgatttctctacatgggggacaagtggatctcagggacaatcaacacaaagttctgcttatagtagcagttatggctatccacctagttctcttgggagagctattactgatggacaggctggatttggcaatgatactttgagtaaggtgcctggcattagcagtattgagcaaggcatgactggactgaaaattggtggtgacctgacagctgcagtgacaaaaactgtaggtacagctttgagcagcagtggtatgactagcattgcaaccaatagtgtgcccccagttagcagtgcagcacctaaaccaacctcctgggctgccattgccagaaagcctgccaaacctcaaccgaaacttaaacccaagggcaatgtgggaattgggggttctgctgtaccaccacctcctataaaacacaacatgaatattggaacttgggatgaaaaagggtcagtggtaaaggctccaccaacccaaccagttctgcctcctcaaactataatccagcagcctcagccattaattcaaccaccaccattggtgcaaagccaactgcctcaacagcagcctcaaccaccacaaccacagcagcaacaaggacctcagccacaggcccagcctcaccaagtgcagcctcaacagcagcagctgcagaatcgctgggtagctcctcgtaacaggggagcaggcttcaaccagaacaatggagcgggcagtgaaaactttggtttaggtgttgtacctgtcagtgcttcaccttctagtgtagaagtgcatcccgtgctggaaaagctaaaggccataaacaactataatcccaaagactttgattggaatctgaagaatggacgtgtgtttataattaaaagctactctgaggatgacatacatcgttccattaaatactctatctggtgtagtactgagcatggtaataagcgtttggatgcagcttaccgttccctgaatgggaaaggcccactctatttactcttcagtgtgaatggcagtggacatttttgtggagtggctgaaatgaagtctgttgtggactataatgcgtatgctggtgtctggtctcaggataagtggaagggcaaatttgaagttaaatggatctttgtcaaagatgttcccaataaccaattacggcatattcgcttagaaaataatgacaacaaaccggttaccaattcaagggacactcaagaggtacccctagaaaaagctaagcaagtgcttaaaataattgctactttcaagcataccacctcaatctttgatgactttgcacattatgaaaagcgtcaagaagaggaggaagccatgcgtagggagagaaatagaaacaaacaataaccgtatgaagatgtcctgttaaatttacaacactaacgatgtagactctggaaatgcctaataagtcaaagaagacgtattaaagctcttttctgcttaaggtgacatctttgaacactttaacacaaagttgactcttctcgtaatggttttcatcagcgcatctgcccttatactcttcaccaaacacacttgagaactgtaacttcgtcaagcactttctgtcctgaagcttttaccagtatctgctgtcttttgtaattatgcatcctagctaaggcacagaagactgaatgaatgcaaggattcattaactctttgaatttgttaaatactaacagttaaccattagaagtggttcaatgatgtaagagtcacactgcttcaactttttctttgttgtagtttttaaattgtcgatttttagctatttgacagattaaaagcaaaataatcatgccatatttagtcctggagttcaagtctaaatgttgatgtgaaaaattattgtagtaaacttttaatatggcaaagcaaccttaagctctattttagccaaatgaaacataatctgaaattatattagaacatttcccttgtcttcaaactgtttggtgtaacagaatattgatatgcagcttggtggatttcaccagttaatgcacattcttcttccctcctccccccattaatatgtatactgaaaaatgtgcatttgtctgaggaattattttgtttgctaccacttaatgaatctcaaaattttgagtaaatgtacctcagtctaatcagactttttatgacctttataactacatttaaaacccttaattcctatttctgggtgtttgcgagcctgattgctatcatgaagtaaaaatttattactctaggtattcactagctaaataaacatagttcttgtttagcaagcatatgttgttcctcagctcttttctccagcttttgcagtgtcctggcatccttaaaatactttgaaaatatggccttgatccatggattaaatcagtatctaagtgaatgtgttgatgttttattgatcagatctatataagtgggaatacagcatatatctggatattcttatagttatctttttaacatcttatttttttcattaattacatatcaacattaattttgtatcttgaagcaaattgattttgtataattaaatgtgtcaagcatctgtattaattgatttgatggcataaggttatgaaaataatgtactgccccatgtattactgttccaaaaggagaaagctatgtagaaagatacattaagggtgaaaatagcaatacagtagatttgaataccttgatgttttgcattacttcatttatgtttacatcatgtttagaaatgttttcatttactgtggtctttggtcacttcagctcaaagacctagtgatggatatttctttgaggctttcatttatataattttattttgtacaatgttttttttaaatgtgcaaatactgtattcaagtgaaaaaaatacagtatttgtagataaccatagctactacacagttcttcggtagtcccagtgtagttatatcagtgtttactgaagggaacatcaaaatattaatggtatattataaaataaagactttcttaaaggaaaattgcacctattttacctttttaagagtaagccatgaaatcttgtaacatgtctcttaactatttataatgaaaagtggcatttgggtatagtcaccacagcaatgttctacatccctaagattatctaggtaggacatgtcaaagatgactgttgtcattctggaggtcctattagagaatattataaaagggtgaccttgtaggaaggatctgagtcctccccctgaggttctctttttcttggtgctttattagcaactctggatatttttataaaactagttacattataaacggtttcaaacatgtttaatttacattaggtttttatgtaagagtgtcatggaagcactcagcaagcaggctgattgcaatagactcagacatgcgaataaatgtaattgagagtctattcatggtgaggagtacatcccagtgcctttaacctggatttctaatcttaagtgaaatgggtgcagcattcctttggaaaaaaaaatctttttattttcaagtgataattttgtgtttttctcatataagttttctccagagcacccaccttctcttccttcttggtctgtcattatattgcaaaatatttttcctctgaatgaaattatcacaggttgtctcaagcacaaccaactgaatgtctcttaactgtggggaccaaaagggagagagcctggggtctacaagaggagacacatcatcaaatgtttgaatgatcacaaattaagacattatcagcccagtaaatttcttgcttaatgtttttccaagttctggcttgaatatttcttattaaagctatcttatgtgggtattttattttgaaaggtattatagtttgtatatttaacagtaaggaggaaactgtaaccaaaattagtatttctctatacgtattggtacttgaagattcctttcaaaagaaatccagcgttttcctaattttagtacttaatttctctttttaatttaagtgatctttctaattcgaaagctgtgttctttttgaataccgtgcatgggggttaagctgatgttaaaacagtttgcaataaaaaaaaatgaatcagcttaagtcatttaatcatttcaagtgcattctgcatcctttaaaaataagtttaagaaatttaagagaattgtgttttcattaagttttgcatatcttttgttatgccatgtaaattccctttttcgtatgattaaaggaaggttatgataaaatgattagttcatttacattcacttgtagcaattacatgagaatttgaattttgtcgtgtttgggtttgttcattcctgtgaatgatggtacagttaggtgagattttctgttatggtacccaaactcaccatttggtcctctttaatctttgagggtttcaataaaaattgttcactcata

SEQ ID NO: 1496 - DNA, 9771 bp, HOMO SAPIENS
cggggctgctacctccacgggcgcgccctggcaggaggggcgcagtctgcttgcaggcggtcgccagcgctccagcggcggctgtcggctttccaattccgccagctcggctgaggctgggctagcctgggtgccagtggctgctagcggcaggcgtcccctgagcaacaggagcccagagaaaaagaagcagccctgagagagcgccggggaaggagaggcccgcgccctctcctggagccagattctgcaggtgcactgggtggggatgatcggcgggctaggttgcaagcctcttatgtgaggagctgaagaggaattaaaatatacaggatgaaaagatggcaatgttgcctcccccaggacctcagagctttgtccatttcacaaaacagtctcttgccctcattgaacaacgcattgctgaaagaaaatcaaaggaacccaaagaagaaaagaaagatgatgatgaagaagccccaaagccaagcagtgacttggaagctggcaaacagctgcccttcatctatggggacattcctcccggcatggtgtcagagcccctggaggacttggacccctactatgcagacaaaaagactttcatagtattgaacaaagggaaaacaatcttccgtttcaatgccacacctgctttatatatgctttctcctttcagtcctctaagaagaatatctattaagattttagtacactccttattcagcatgctcatcatgtgcactattctgacaaactgcatatttatgaccatgaataacccaccggactggaccaaaaatgtcgagtacacttttactggaatatatacttttgaatcacttgtaaaaatccttgcaagaggcttctgtgtaggagaattcacttttcttcgtgacccgtggaactggctggattttgtcgtcattgtttttgcgtatttaacagaatttgtaaacctaggcaatgtttcagctcttcgaactttcagagtattgagagctttgaaaactatttctgtaatcccaggcctgaagacaattgtaggggctttgatccagtcagtgaagaagctttctgatgtcatgatcctgactgtgttctgtctgagtgtgtttgcactaattggactacagctgttcatgggaaacctgaagcataaatgttttcgaaattcacttgaaaataatgaaacattagaaagcataatgaataccctagagagtgaagaagactttagaaaatatttttattacttggaaggatccaaagatgctctcctttgtggtttcagcacagattcaggtcagtgtccagaggggtacacctgtgtgaaaattggcagaaaccctgattatggctacacgagctttgacactttcagctgggccttcttagccttgtttaggctaatgacccaagattactgggaaaacctttaccaacagacgctgcgtgctgctggcaaaacctacatgatcttctttgtcgtagtgattttcctgggctccttttatctaataaacttgatcctggctgtggttgccatggcatatgaagaacagaaccaggcaaacattgaagaagctaaacagaaagaattagaatttcaacagatgttagaccgtcttaaaaaagagcaagaagaagctgaggcaattgcagcggcagcggctgaatatacaagtattaggagaagcagaattatgggcctctcagagagttcttctgaaacatccaaactgagctctaaaagtgctaaagaaagaagaaacagaagaaagaaaaagaatcaaaagaagctctccagtggagaggaaaagggagatgctgagaaattgtcgaaatcagaatcagaggacagcatcagaagaaaaagtttccaccttggtgtcgaagggcataggcgagcacatgaaaagaggttgtctacccccaatcagtcaccactcagcattcgtggctccttgttttctgcaaggcgaagcagcagaacaagtctttttagtttcaaaggcagaggaagagatataggatctgagactgaatttgccgatgatgagcacagcatttttggagacaatgagagcagaaggggctcactgtttgtgccccacagaccccaggagcgacgcagcagtaacatcagccaagccagtaggtccccaccaatgctgccggtgaacgggaaaatgcacagtgctgtggactgcaacggtgtggtctccctggttgatggacgctcagccctcatgctccccaatggacagcttctgccagagggcacgaccaatcaaatacacaagaaaaggcgttgtagttcctatctcctttcagaggatatgctgaatgatcccaacctcagacagagagcaatgagtagagcaagcatattaacaaacactgtggaagaacttgaagagtccagacaaaaatgtccaccttggtggtacagatttgcacacaaattcttgatctggaattgctctccatattggataaaattcaaaaagtgtatctattttattgtaatggatccttttgtagatcttgcaattaccatttgcatagttttaaacacattatttatggctatggaacaccacccaatgactgaggaattcaaaaatgtacttgctataggaaatttggtctttactggaatctttgcagctgaaatggtattaaaactgattgccatggatccatatgagtatttccaagtaggctggaatatttttgacagccttattgtgactttaagtttagtggagctctttctagcagatgtggaaggattgtcagttctgcgatcattcagactgctccgagtcttcaagttggcaaaatcctggccaacattgaacatgctgattaagatcattggtaactcagtaggggctctaggtaacctcaccttagtgttggccatcatcgtcttcatttttgctgtggtcggcatgcagctctttggtaagagctacaaagaatgtgtctgcaagatcaatgatgactgtacgctcccacggtggcacatgaacgacttcttccactccttcctgattgtgttccgcgtgctgtgtggagagtggatagagaccatgtgggactgtatggaggtcgctggtcaagctatgtgccttattgtttacatgatggtcatggtcattggaaacctggtggtcctaaacctatttctggccttattattgagctcatttagttcagacaatcttacagcaattgaagaagaccctgatgcaaacaacctccagattgcagtgactagaattaaaaagggaataaattatgtgaaacaaaccttacgtgaatttattctaaaagcattttccaaaaagccaaagatttccagggagataagacaagcagaagatctgaatactaagaaggaaaactatatttctaaccatacacttgctgaaatgagcaaaggtcacaatttcctcaaggaaaaagataaaatcagtggttttggaagcagcgtggacaaacacttgatggaagacagtgatggtcaatcatttattcacaatcccagcctcacagtgacagtgccaattgcacctggggaatccgatttggaaaatatgaatgctgaggaacttagcagtgattcggatagtgaatacagcaaagtgagattaaaccggtcaagctcctcagagtgcagcacagttgataaccctttgcctggagaaggagaagaagcagaggctgaacctatgaattccgatgagccagaggcctgtttcacagatggttgtgtacggaggttctcatgctgccaagttaacatagagtcagggaaaggaaaaatctggtggaacatcaggaaaacctgctacaagattgttgaacacagttggtttgaaagcttcattgtcctcatgatcctgctcagcagtggtgccctggcttttgaagatatttatattgaaaggaaaaagaccattaagattatcctggagtatgcagacaagatcttcacttacatcttcattctggaaatgcttctaaaatggatagcatatggttataaaacatatttcaccaatgcctggtgttggctggatttcctaattgttgatgtttctttggttactttagtggcaaacactcttggctactcagatcttggccccattaaatcccttcggacactgagagctttaagacctctaagagccttatctagatttgaaggaatgagggtcgttgtgaatgcactcataggagcaattccttccatcatgaatgtgctacttgtgtgtcttatattctggctgatattcagcatcatgggagtaaatttgtttgctggcaagttctatgagtgtattaacaccacagatgggtcacggtttcctgcaagtcaagttccaaatcgttccgaatgttttgcccttatgaatgttagtcaaaatgtgcgatggaaaaacctgaaagtgaactttgataatgtcggacttggttacctatctctgcttcaagttgcaacttttaagggatggacgattattatgtatgcagcagtggattctgttaatgtagacaagcagcccaaatatgaatatagcctctacatgtatatttattttgtcgtctttatcatctttgggtcattcttcactttgaacttgttcattggtgtcatcatagataatttcaaccaacagaaaaagaagcttggaggtcaagacatctttatgacagaagaacagaagaaatactataatgcaatgaaaaagctggggtccaagaagccacaaaagccaattcctcgaccagggaacaaaatccaaggatgtatatttgacctagtgacaaatcaagcctttgatattagtatcatggttcttatctgtctcaacatggtaaccatgatggtagaaaaggagggtcaaagtcaacatatgactgaagttttatattggataaatgtggtttttataatccttttcactggagaatgtgtgctaaaactgatctccctcagacactactacttcactgtaggatggaatatttttgattttgtggttgtgattatctccattgtaggtatgtttctagctgatttgattgaaacgtattttgtgtcccctaccctgttccgagtgatccgtcttgccaggattggccgaatcctacgtctagtcaaaggagcaaaggggatccgcacgctgctctttgctttgatgatgtcccttcctgcgttgtttaacatcggcctcctgctcttcctggtcatgttcatctacgccatctttggaatgtccaactttgcctatgttaaaaaggaagatggaattaatgacatgttcaattttgagacctttggcaacagtatgatttgcctgttccaaattacaacctctgctggctgggatggattgctagcacctattcttaacagtaagccacccgactgtgacccaaaaaaagttcatcctggaagttcagttgaaggagactgtggtaacccatctgttggaatattctactttgttagttatatcatcatatccttcctggttgtggtgaacatgtacattgcagtcatactggagaattttagtgttgccactgaagaaagtactgaacctctgagtgaggatgactttgagatgttctatgaggtttgggagaagtttgatcccgatgcgacccagtttatagagttctctaaactctctgattttgcagctgccctggatcctcctcttctcatagcaaaacccaacaaagtccagctcattgccatggatctgcccatggttagtggtgaccggatccattgtcttgacatcttatttgcttttacaaagcgtgttttgggtgagagtggggagatggattctcttcgttcacagatggaagaaaggttcatgtctgcaaatccttccaaagtgtcctatgaacccatcacaaccacactaaaacggaaacaagaggatgtgtctgctactgtcattcagcgtgcttatagacgttaccgcttaaggcaaaatgtcaaaaatatatcaagtatatacataaaagatggagacagagatgatgatttactcaataaaaaagatatggcttttgataatgttaatgagaactcaagtccagaaaaaacagatgccacttcatccaccacctctccaccttcatatgatagtgtaacaaagccagacaaagagaaatatgaacaagacagaacagaaaaggaagacaaagggaaagacagcaaggaaagcaaaaaatagagcttcatttttgatatattgtttacagcctgtgaaagtgatttatttgtgttaataaaactcttttgaggaagtctatgccaaaatcctttttatcaaaatattctcgaaggcagtgcagtcactaactctgatttcctaagaaaggtgggcagcattagcagatggttatttttgcactgatgattctttaagaatcgtaagagaactctgtaggaattattgattatagcatacaaaagtgattcagttttttggtttttaataaatcagaagaccatgtagaaaacttttacatctgccttgtcatcttttcacaggattgtaattagtcttgtttcccatgtaaataaacaacacacgcatacagaaaaatctattatttatctattatttggaaatcaacaaaagtatttgccttggctttgcaatgaaatgcttgatagaagtaatggacattagttatgaatgtttagttaaaatgcattattagggagcttgactttttatcaatgtacagaggttattctatattttgaggtgcttaaatttattctacattgcatcagaaccaatttatatgtgcctataaaatgccatgggattaaaaatatatgtaggctattcatttctacaaatgtttttcattcatcttgactcacatgccaacaaggataagacttacctttagagtattgtgtttcatagcctttcttctttcatatccctttttgttcatagaataaccacagaacttgaaaaattattctaagtacatattacactcctcaaaaaaaacaaagataactgagaaaaaagttattgacagaagttctatttgctattatttacatagcctaacatttgactgtgctgcccaaaatactgataatagtctcttaaactcttttgtcaaattttcctgctttcttatgcagtattgtttagtcatcctttcgctgtaagcaaagttgatgaaatccttcctgatatgcagttagttgtttgaccacggtacatacttgagcagataataacttgggcacagtatttattgcatcacttgtatacaatcccgtgtttggcaagctttcaaatcatgtaatatgacagactttacacagatatgtgtttagtatgaataaaaaagcattgaaatagggattcttgccaacttgctctcttgccaccaacttactttcctaaattatggaagtaatcttttttggatatacttcaatgtatacaatgaggaagatgtcaccttctccttaaaattctatgatgtgaaatatattttgcctcaatcaacacagtaccatgggcttctaatttatcaagcacatattcattttgcattagctgtagacatctagttttttgaaaacacctattaatagtaatttgaaaagaaataaccataatgctttttttcgtgagtttatttcaggaatatgagatctttcttctataaagttattcatgcacaggcaaaaattgagctacacaggtagaatgtagttttacttagaagatttttgtgggaggttttgaagcaaatatataaaacaactttcactaatttgctttccatatttaaaaaataataaattacatttatataataaatgtttaaagcacatattttttgttgttctggcaatttaaaaagaaagaggatttaaacgtacctatagaaacaaagatttatggttaaagaatgagatcagaagtctagaatgtttttaaattgtgatatattttacaacatccgttattactttgagacatttgtcctaatctacgtataaaactcaatctagggctaaagattctttataccatcttaggttcattcatcttaggctatttgaaccactttttaatttaatatgaaagacaccatgcagtgttttccgagactacatagatcattttatcacatacctaccaagcctgttggaaataggttttgataatttaagtagggacctatacaaaatatattacatttatcagatttttaaatacattcaattaagaatttaacatcaccttaaatttgaattcaatctaccgttatttcaaactcacaaatataactgcattatgaatacttacataatgtagtaagacaagatgtttgacaggttcgtgtgtaattttctattaatgtttttacattgccttgtttttatgtaaaataaaaaatatgggcaactggtttgttaacaacacaatttcttcttagcatttcaaaaatatatataaagttgttctttttcctatttcatgaactatgtttttttttaaaataacatggttaagttttatatatatttacgtttgtttcaggaatgtctacttgtgactttttatcaattaaaaataatatttggaagaaagagcttattaagtataagcttgaagtaaaattagacctctctttccatgtagattactgtttgtactgatggtttcacccttcagaaggcactgtcatattaatatttaaattttataatcgctgaacttattacacccaacaatacagaaaggcagttacactgaagaacttaacttagaataaaatggaagcaaacaggttttctaaaaacttttttaagtgaccaggtctcgctctgtcacccaggctagagtgcaatggcatgatcatagctctctgcagcctcaactctgggctcaagcaaccctcctgcctcagcctcccaagtagctaagactacaggtacatgccaccatgcctggctaatatttaaatttttgtagataaggggtcttgctatgttgcccaggctagtctcaaactcctggcttcaagtgttcctactgtcatgacctgccaacatgctggggttacaggcatgagccaccatgccccaaacaggtttgaacacaaatctttcggatgaaaattagagaacctaattttagctttttgatagttacctagtttgcaaaagatttgggtgacttgtgagctgtttttaaatgctgattgttgaacatcacaacccaaaatacttagcatgattttatagagttttgatagctttattaaaaagagtgaaaataaaatgcatatgtaaataaagcagttctaaatagctatttcagagaaatgttaatagaagtgctgaaagaagggccaactaaattaggatggccagggaattggcctgggtttaggacctatgtatgaaggccaccaattttttaaaaatatctgtggtttattatgttattatcttcttgaggaaaacaatcaagaattgcttcatgaaaataaataaatagccatgaatatcataaagctgtttacataggattctttacaaatttcatagatctatgaatgctcaaaatgtttgagtttgccataaattatattgtagttatattgtagttatacttgagactgacacattgtaatataatctaagaataaaagttatacaaaataaaaaaaaaaaaa

SEQ ID NO: 1497 - DNA, 1014 bp, HOMO SAPIENS
gtacccgggcccaaggctgagggacccggtggagcggaagtcactccctgaggcagtggcgacagcggcggcgagaggatgaacaacaagttcgacgctttgaaagatgatgacagtggggaccatgatcagaatgaagaaaacagcacacagaaagatggtgagaaggaaaaaacggaacgagacaagaatcagagcagtagcaagagaaaggctgttgtccctggaccggcagagcatcccctgcagtacaactacactttttggtactccaggagaacccccggccgtcccacgagctcacagagctatgaacagaatatcaaacagattggcacctttgcctctgtggagcagttctggaggttttatagccacatggtacgtcctggggacctgacaggccacagtgacttccatctcttcaaagaaggaattaaacccatgtgggaggatgatgcaaataaaaatggtggcaagtggattattcggctgcggaagggcttggcctcccgttgctgggagaatctcattttggccatgctgggggaacagttcatggttggggaggagatctgtggggctgtggtgtctgtccgctttcaggaagacattatttcaatatggaataagactgccagtgaccaagcaaccacagcccgaatccgggacacacttcggcgagtgcttaacctacctcccaacaccattatggaatacaaaactcacaccgacagcatcaaaatgccaggcaggctgggcccccaaaggctcctttttcaaaacctctggaagccgcggttgaatgtgccatgaccctctccctctctggatggcaccatcattgaagctggcgtcatcggagtctcttgttctgttggcgtgctacctggaagatccttctgtcctggacaagaggaattggaagagcattttatgttttaagaacaggctgacacgcagcagctacaacaacagctgagatcacttaataaatggtgctaaactaaaaaa

SEQ ID NO: 1498 - DNA, 11784 bp, HOMO SAPIENS; identical to SEQ ID NO: 130

SEQ ID NO: 1499 - DNA, 4840 bp, HOMO SAPIENS
cggtcactccaggctgcctcgctgcgccgctggcggtgggcgtggcgctgccggcggctaggcgcggacgccggaggaggtgtccccgggtttaggggtgttcggccaggggcggggctgccgggcccgggcgactgccggagctgcggaagtcgtggaagcgtcggcgacgcatcgcgcgatggcgcgggcgggacagtgcttgtgaaactgaacacaacaaaagtatggatatgggaaaccaacatccttctattagtaggcttcaggaaatccaaaaggaagtaaaaagtgtagaacagcaagttatcggcttcagtggtctgtcagatgacaagaattacaagaaactggagaggattctaacaaaacagctttttgaaatagactctgtagatactgaaggaaaaggagatattcagcaagctaggaagcgggcagcacaggagacagaacgtcttctcaaagagttggagcagaatgcaaaccacccacaccggattgaaatacagaacatttttgaggaagcccagtccctcgtgagagagaaaattgtgccattttataatggaggcaactgcgtaactgatgagtttgaagaaggcatccaagatatcattctgaggctgacacatgttaaaactggaggaaaaatctccttgcggaaagcaaggtatcacactttaaccaaaatctgtgcggtgcaagagataatcgaagactgcatgaaaaagcagccttccctgccgctttccgaggatgcacatccttccgttgccaaaatcaacttcgtgatgtgtgaggtgaacaaggcccgaggggtcctgattgcacttctgatgggtgtgaacaacaatgagacctgcaggcacttatcctgtgtgctctcggggctgatcgctgacctggatgctctagatgtgtgcggccggacagaaatcagaaattatcggagggaggtagtagaagatatcaacaaattattgaaatatctggatttggaagaggaagcagacacaactaaagcatttgacctgagacagaatcattccattttaaaaatagaaaaggtcctcaagagaatgagagaaataaaaaatgaacttctccaagcacaaaacccttctgaattgtacctgagctccaaaacagaattgcagggtttaattggacagttggatgaggtaagtcttgaaaaaaacccctgcatccgggaagccaggagaagagcagtgatcgaggtgcaaactctgatcacatatattgacttgaaggaggcccttgagaaaagaaagctgtttgcttgtgaggagcacccatcccataaagccgtctggaacgtccttggaaacttgtctgagatccagggagaagttctttcatttgatggaaatcgaaccgataagaactacatccggctggaagagctgctcaccaagcagctgctagccctggatgctgttgatccgcagggagaagagaagtgtaaggctgccaggaaacaagctgtgaggcttgcgcagaatattctcagctatctcgacctgaaatctgatgaatgggagtactgaaataccagagatctcacttttgatactgttttgcacttcatatgtgcttctatgtatagagagctttcagttcattgatttatacgtgcatatttcagtctcagtatttatgattgaagcaaattctattcagtatctgctgcttttgatgttgcaagacaaatatcattacagcacgttaacttttccattcggatcattatctgtatgatgtggtgtggtttgtttggtttgtccttttttttgcgtttttaatcagaaaacaaaatagaggcagcttttgtagattttaaatgggttgtgcaagcattaaaatgcaggtctttcagaatctagaactaggcataaccttacataatactaggaaaattatgagaaaggggaaatttttggttaaataagagtaaggttcaaacacaagcagtacatgttctgtttcattatgctcgatagaaggcttttttttcacttataaggcctgattggtcctacccagcttaacggggtggggtttttttgtttgttcagacagtctgttcttttgtaaacatttttagttggaaaaacagcatctgcattttccccatcctctacgttttagagaggaatcttgtttttgtgtgcaacataagaaaattatgaaaactaatagccaaaaaacctttgagattgcattaaagagaagggataaaggaccagcaataataccttgtaagttgcttttgtttgtaaaatctgagcttatagttttccttagtgagtaaattcataaggatgggaacatttaaattaagttaatgggcctttaaaaaaaaaaaaaggaaacactcatacctgtagttggaggatgaatactggagacgggttaccaatgtcaggttatactaaaactaaatcagaaagtctgaatgtagcacataatggttctcttctgttgtccaaggctgtaaaatggacagccttgtcacacctccccggtgctgttttacaacgtgagggtagacgctgtcagtaacccagagggaccaggccttcctaggttttctaggcagtcagctgttaaccactcacttagtaaatgtcataactacacctgctccaggaccaatcagtgaaacctgctcggaattaaaggcttcctctgggtgcctgctgaacaactgagctcatgtcatgggcatgtggtggtttctctgttgcctgaaagagccattaaagtcagtcgtgcgtgaagcatctctcttctaaaggatgtgtatttccataaatgctttctgaggatccggtacaaaatgatttcccaaagttctgaagtgccttgagaacatgtgggtccgagtgttataacagactcctcccccgggtcaccttttgcctggtcatcctgttagagtacatctttggaaatccagggtaatattctctttcagagatgctcattgtgtaactctgtgtagggagatagtcactttaaacagctcaaagtagctagctaaaggagtagccttaaatacctaaaagatgacagaagcatagcccttaacaaatcttcagcttgtctctcagtatttcccaatcatgaaaatcccttgctatgtctttcctactagaaatgttctagaatcgctggacggtggggtcagagggcagtcggtatttaggccgtgagcttcccatactactgcaggtccaactcctggcaaccgcgggctcaaggcaggtcattggaatccacgttttggccacagtagttgtaggattgcttttctgtatcataattttagaatgctcttaaaatcttgaggaagagtttttattttttatttatttttgagatggagtctctgttgcccaggctgcagtgcagtggtgccatctcagctcactgcaacctccacctcccaggttcaagcgattctcctgcctcagccacctgagtagctgggagtacaggcatgtggcaccatgcctggctaatttttgtatttttaatagagttgagatttcaccatgatggtcaggctggtctcgaactcctgacctcgtgatccgcccgcctcggccccccaaagtgctgggattaacgggtgtgagccacggcgcccagcccaggaagagtttttaaattagagctctgtttaattataccactgggaaatcatggttacgcttcaggcatattcttccccagagtactacttacattttaaatttcattttgtaaagttaaatgtcagcattccctttaaaagtgtccattgttctttgaaagtagacgtttcagtcattcttttcaaacaagtgtttgtgtaccttttgccaagctgtgggcatcgtgtgtgagtacagggtgctcagctcttccaccgtcattttgaattgttcacatgggtaattggtcatggaaatgatcagattgaccttgattgactgtcaggcatggctttgtttctggtttcaatctgttctcgttccttgtaccggattattctactcctgcaatgaaccctgttgacaccggatttagctcttgtcggccttcgtggggagctgtttgtgttaatatgagctactgcatgtaattcttaaactgggcttgtcacattgtattgtatttttgtgatctgtaatgaaaagaatctgtactgcaagtaaaacctactccccaaaaatgtgtggctttgggtctgcattaaacgctgtagtccatgttcatgccaaaaatggctgggaacgtttgctttatttacattcagtcagcgttgctttcagatcacactttatccacacaggaaagccagtcagcctataatgaagtagttattaaaataaatgtaatgaatatgtctacaaagtatagtttagtggtttattttgctaaaatgcacatatatttgatataatttagtttgagaagttcagctagtttttctcctttgtttgactttgtcaatttctatctggtttttaagggtctgagcttagcttgtgcatgcaaggttttgggtttttttattttttttttgagcacagcttttcaccttttaatttgttgggtatttttctcttaataagagaaatattggccatcgatttttacatataatacaagtgtgtttttccagtacattggttcctgtcccctctctgtgaactgtttgagtattggaacagtatgtcttcaataattcaatgttactttgagatacatgtgttaatatacccttagttattcttgaaataaaaccagtctcttacgcttgcagtgg

SEQ ID NO: 1500 - DNA, 374 bp, HOMO SAPIENS
atgtctggccgtggtaaaggtggaaaaggtttgggtaagggaggagctaagcgtcatcgcaaggttttgcgcgataacatccagggcatcactaagccagctatccggcgccttgctcgtcgcggcggtgtcaagcgaatttctggccttatctatgaggagactcgtggtgttctgaaggtgttcctggagaacgtgattcgtgacgctgtcacttacacagagcacgccaaacgcaagaccgtgacagcaatggatgtggtctacgcgctgaagcgacagggacgcactctttacggcttcggtggctaaggctcctgcttgctgcactcttattttcattttcaaccaaaggcccttttcagggccgccca

SEQ ID NO: 1501 - DNA, 1682 bp, HOMO SAPIENS
gaaggtttttgctgcgccaacgcagtgaccgaaggctccgctcacgcccggcctgatcctgcctgaagatggtgccactggtggctgtggtatcagggccccgtgcccagctctttgcctgcctgctcaggctgggcactcagcaggtcggcccccttcagctgcacaccggggccagccatgcggccaggaaccattatgaggtgctggtgctgggtgggggcagtggcggaatcaccatggctgcccgcatgaagaggaaagtgggtgcagagaatgtggccattgttgagcccagtgagagacatttctaccagccaatctggacactggtgggtgctggtgccaaacaattgtcctcatctggtcgtcccacggcaagtgtgattccatctggtgtagaatggatcaaagctagagtgactgagttgaacccagacaagaactgcattcacacagatgacgacgagaagatctcctaccgatatcttattattgctctcggaatccagctggactatgagaagattaaaggcctacctgaaggtttcgctcatcccaaaatagggtcgaattattcagttaagactgtagagaagacatggaaagctctgcaggacttcaaagagggcaatgccatcttcaccttcccaaatactccagtgaagtgtgctggagcccctcagaagatcatgtacttatcagaagcctacttcaggaagacagggaagcgatccaaggccaatatcattttcaacacttctcttggagccattttcggggttaagaagtatgcagatgccctgcaggagatcatccaggagcggaacctcactgttaactacaagaaaaacctcattgaagtccgagccgataaacaagaggctgtatttgagaacctggacaaaccaggagagacccaagtgatttcatatgaaatgcttcatgtcacacctccaatgagcccaccagatgtcctcaagaccagtcctgtggctgatgctgctggttgggtggatgtggataaagaaactctgcaacacaggaggtacccaaatgtgtttgggattggggactgcaccaaccttcctacgtcaaagaccgctgctgcagtagctgcccagtcaggaatacttgataggacaatttctgtaattatgaagaatcaaacaccaacaaagaagtatgatggctacacatcatgtccactggtgaccggctacaaccgtgtgattcttgctgagtttgactacaaagcagagccgctagaaaccttcccctttgatcaaagcaaagagcgcctttccatgtatctcatgaaagctgacctgatgcctttcctgtattggaatatgatgctaaggggttactggggaggaccagcgtttctgcgcaagttgtttcatctaggtatgagttaaggatggctcagcacttgctcatcttggatggcttctgggccaaaactgcagtcactgaatgaccaagagcagcacgaaggacttggaacctatccttgtaaagagttccttgatgggtaatggtgaccaaatgcctcccttttcagtacctttgaacagcaaccatgtgggctactcatgatgggcttgattctttgggaataataaaatgaaataatacttttattttctgaataaaagtttgtcactgaaaaaaaaaaa

SEQ ID NO: 1502 - DNA, 449 bp, HOMO SAPIENS
ctgcctcctgatgaacacatcttacttaattccctattctgaataagggcagaacctgtgaaaatgactggatatcacttccacggttatattttgttacatggcaatgacaaaaggattctgcatatgtaattaaggactccaatcagtttattttggggtaatcaagattttcctagatgggccaggcatattcagggaaccctttaaatgtagagttttctctagctggttttgaaagaaagaaatagctatgctactcactccctaggaagaggggcagactctagtaatttagagtgatccctaactgatggctgggaagcaaatgggagttcagtccggcaactgcaaggaaccgtattctgccaacaaccagtgaacttgcaagaggaccacagtctcaaatcagactgaagccctggccaacattttgacttcagccttgt

SEQ ID NO: 1503 - DNA, 4423 bp, HOMO SAPIENS
ggaagccgcggggccttctaaggccgaaagtcttcggagcttgcgccagtctcttcgcggcgtccaccacttagacgcaagttgctgaagccggccggggagaaggtgttgttgccggagctgagaccgggcggccacagtccgcagggatgaacctcgagttgctggagtcctttgggcagaactatccagaggaagctgatggaactttggattgtatcagcatggctttgacttgcacctttaacaggtggggcacactgcttgcagttggctgtaatgatggccgaattgtcatctgggatttcttgacaagaggcattgctaaaataattagtgcacacatccatccagtgtgttctttatgctggagccgagatggtcataaactcgtgagtgcttccactgataacatagtgtcacagtgggatgttctttcaggcgactgtgaccagaggtttcgattcccttcacccatcttaaaagtccaatatcatccacgagatcagaacaaggttctcgtgtgtcccatgaaatctgctcctgtcatgttgaccctttcagattccaaacatgttgttctgccggtggacgatgactccgatttgaacgttgtggcatcttttgataggcgaggggaatatatttatacgggaaacgcaaaaggcaagattttggtcctaaaaacagattctcaggatcttgttgcttccttcagagtgacaactggaacaagcaataccacagccattaagtcaattgagtttgcccggaaggggagttgctttttaattaacacggcagatcgaataatcagagtttatgatggcagagaaatcttaacatgtggaagagatggagagcctgaacctatgcagaaattgcaggatttggtgaataggaccccatggaagaaatgttgtttctctggggatggggaatacatcgtggcaggttctgcccggcagcatgccctgtacatctgggagaagagcattggcaacctggtgaagattctccatgggacgagaggagaactcctcttggatgtagcttggcatcctgttcgacccatcatagcatccatttccagtggagtggtatctatctgggcacagaatcaagtagaaaactggagtgcatttgcaccagacttcaaagaattggatgaaaatgtagaatacgaagaaagggaatcagagtttgatattgaagatgaagataagagtgagcctgagcagacaggggctgatgctgcagaagatgaggaagtggatgtcaccagcgtggaccctattgctgccttctgtagcagtgatgaagagctggaagattcaaaggctctattgtatttacccattgcccctgaggtagaagacccagaagaaaatccttacggccccccaccggatgcagtccaaacctccttgatggatgaaggggctagttcagagaagaagaggcagtcctcagcagatgggtcccagccacctaagaagaaacccaaaacaaccaatatagaacttcaaggagtaccaaatgatgaagtccatccactactgggtgtgaagggggatggcaaatccaagaagaagcaagcaggccggcctaaaggatcaaaaggtaaagagaaagattctccatttaaaccgaaactctacaaaggggacagaggtttacctctggaaggatcagcgaagggtaaagtgcaggcggaactcagccagcccttgacagcaggaggagcaatctcagaactgttatgaagaccttcgaagttcttcattctttctcactttgccatcatgtggcctctggacactgtggtcagtcatttgaaaattgactttaatttaaaacaaaggcctgtgcctcccacccaggaggtgggagggtgaattttatgtttaaatgaagaagtgaattatggaagaagagtatacgaccttcccttccctttcaagcataagtccaaatagactctcaggaatgaagatttgtgaagacatcagataggaattttgactcatttaaactttgatgcttagttatgttgctggagaaaagatacttatgttttgctcatctaacttcattgtacccagcgtcattttgacatgtcatttcctatctcccatttgccttcggtcctcaatgcatgtctttgagtgacttcttatctgaaattttgctactggtatcctaggaaagcttttgttggatactctcattttaaacttctcctctccccagatacctcctatatttccatattgtgtgcaaaggatgggcagaaaagaaagtgcttgaaagatttcaaattttcagaaagggaacaacgaaggccctctcttcctctcataccacgttttgctcaagaagctgggctgtaacaattcagggttttcccttgttttcctctcattgcatgtttccctccaatattggttcattgtcatcaatcatggtttttgaagatagctagttttatccatctccagcaaagaatcatcaatagtttatattgctttacctgtgctggcttccagagatggaaacaaacccaggtgtctctcaacaagctacttttttactggggtgggggaatctatgcaaggagtaaagtaaaaccatccagaatcaaagcagcaaccacatagttcaaatcaaagatcaaggtgaattttttgtatcactgcctgtggaaatctatcctcatcagtcattgcatttttccctgcctatacctgtgctcctttttcttactgtgttttcagtcacttcctttctgtgaaaggttgcttagctttttttttgacatttgttgttctttataaaaataacagattggatagatgtgtacatttggtgtttgaaattctctgaaaatcccattaggaaaccaggtgtgaaaagggctcagtagcttctctgagtggcgtttttagctgactggaagtgcttaatctggatcgtcttttttttttttttttttttttcaatattttaaaaggagaatttaaatactgtgcttactgtgaaatatatcagttggtgagccgggcgtggtgggtcacgcctgtaatcccagcactttgggaggccaaggcgggttgatcacccgaggtcaggagttcaagaccagcctggccaacgtggtgaaagcctgtatctattaaaagacaaaaattagctgggcgtggtagtacatgcctgtaatcccagctacactggaggctgagtcaggagaatcacttgaacgtgggaggcagaggttgcagtgagtggagatcgcaccactgccctccagcctaggtgacagaatgagactctatctcaaaaaaaaaaaaaaaatgatatcagttggtggatgctcctataggtagccaaacacattgattacctgttagattttaggatagaaatcaaagtagagcacgtcagcaagagcctctttgtctcactccatcatttaaaaccagtatattcagtagttgaagaaagagctctccctgagtcagttgcaaaacgtctatatttttagatgccactacttttttcttaaatattcattttgagactgtcatgagttagaccagtggttgagattagtagatggctcactagacatgtttttgttttgcagacattatatccattccagtcctctgcactgtacactgcagcagtgtgcaaactatgggacttagagggtttctgccatctttccacgtgtgaagtagcttggtttcctctgcctgtgcatttggatgtttgtgctatgtccacctcctaaactggctactgagaaaatcatcttcagccctgtcagattgtctctggcagtagctcctaataattatttatgtttttggaatttttttttcaacttttaaaaaaccttctatccatttcaatttgaattatttgatttgtacaatatatgtatattctcttcttcctttttgtcatccctgccctgccacccccaaaattttgtttttaaaaatattctgggctgggcatggtggctcacacctgtaatcccagcacttggggaggccgaggctggtggatcatctgaggtcaggtgtttgagaccagcctggtcaacatggtgaaaccccgtctctactaaaaatacaaaaattagctgggcgtggtggcgggcacctgtaatcctagctactcgggaggctgaggcaggagaattgcttgaatccaggaggcagaggttgcagtgagctgagattgcgccactgcactccagcctgggtgacagagcaagactccatctcaaaaaaaaaaaaaaaaaaaaatctgtagttttgtacaagatgagacttagccttgggtacttcttgctgaagctttaatgctttgtaaataaaatcggatgtttattaaagaaaaaaaaaaaaaa

SEQ ID NO: 1504 - DNA, 517 bp, HOMO SAPIENS
  misc_feature (35)..(35): n is a, c, g, or t
  misc_feature (45)..(45): n is a, c, g, or t
  misc_feature (83)..(83): n is a, c, g, or t
  misc_feature (161)..(161): n is a, c, g, or t
aatggaggcatattttcctttgtagaaattcacanctgtgaaganaaagtttcccagtgagttaataagttggcatttgtcanaattctctcgggtcaaagactgagttttttgttcttagtgctaatagaaccaaatcacctgcatttgagtatttaacncgttggaaagccaacccaacttaaggtcttcttttttgtaatgagtaatttgaaagtgaaagcttcttgaagcatgcagtcaaaataaaacgcatgggcgtttatttagtaaagctaaatcgtgtagctttactcagtctgttgaactggcaaatgttaactcccctttattgttatactttcttattaatcatcctattcataaaaatcccatgactggggaaaatgaacccgttagggaaactcactgctatcagtctaatccaagccactatcaataactttcttactggtatccctgcttccacctcgtctagctattatgtgtaccatgaagataactgaagccaacctgc

SEQ ID NO: 1505 - DNA, 8332 bp, HOMO SAPIENS
gtgtgtggatgtgtgagtgagagggaacgagagtaagagaaagaaagaagtgaggggatgtaaactcgaataaatttcaaagtgcctccgagggatgcaacgggcaaaaactgaactgttcaggcttcagattgtaactgacgatctgaggaaaaatgaggtgctcgatgaattttcgtttgtattttttggcgaggcgggggaggtgttgagattttttttttttcccctcggggtgggtgcgagggggatgcatcctagcctgcccgacccggagcaagtcgcgtctccccgccggagcccccccacccatttctttgctgaacttgcaattccgtgcgcctcggcgtgtttccccctccccccttccctccgtcccctcccctccccggagaagagagttggtgttaagagtcagggatcttggctgtgtgtctgcggatctgtagtggcggcggcggcggcggcggcggggaggcagcaggcgcgggagcgggcgcaggagcaggcggcggcggtggcggcggcggttagacatgaacgccgcctcggcgccggcggtgcacggagagccccttctcgcgcgcgggcggtttgtgtgattttgctaaaatgcatcaccaacagcgaatggctgccttagggacggacaaagagctgagtgatttactggatttcagtgcgatgttttcacctcctgtgagcagtgggaaaaatggaccaacttctttggcaagtggacattttactggctcaaatgtagaagacagaagtagctcagggtcctgggggaatggaggacatccaagcccgtccaggaactatggagatgggactccctatgaccacatgaccagcagggaccttgggtcacatgacaatctctctccaccttttgtcaattccagaatacaaagtaaaacagaaaggggctcatactcatcttatgggagagaatcaaacttacagggttgccaccagcagagtctccttggaggtgacatggatatgggcaacccaggaaccctttcgcccaccaaacctggttcccagtactatcagtattctagcaataatccccgaaggaggcctcttcacagtagtgccatggaggtacagacaaagaaagttcgaaaagttcctccaggtttgccatcttcagtctatgctccatcagcaagcactgccgactacaatagggactcgccaggctatccttcctccaaaccagcaaccagcactttccctagctccttcttcatgcaagatggccatcacagcagtgacccttggagctcctccagtgggatgaatcagcctggctatgcaggaatgttgggcaactcttctcatattccacagtccagcagctactgtagcctgcatccacatgaacgtttgagctatccatcacactcctcagcagacatcaattccagtcttcctccgatgtccactttccatcgtagtggtacaaaccattacagcacctcttcctgtacgcctcctgccaacgggacagacagtataatggcaaatagaggaagcggggcagccggcagctcccagactggagatgctctggggaaagcacttgcttcgatctattctccagatcacactaacaacagcttttcatcaaacccttcaactcctgttggctctcctccatctctctcagcaggcacagctgtttggtctagaaatggaggacaggcctcatcgtctcctaattatgaaggacccttacactctttgcaaagccgaattgaagatcgtttagaaagactggatgatgctattcatgttctccggaaccatgcagtgggcccatccacagctatgcctggtggtcatggggacatgcatggaatcattggaccttctcataatggagccatgggtggtctgggctcagggtatggaaccggccttctttcagccaacagacattcactcatggtggggacccatcgtgaagatggcgtggccctgagaggcagccattctcttctgccaaaccaggttccggttccacagcttcctgtccagtctgcgacttcccctgacctgaacccaccccaggacccttacagaggcatgccaccaggactacaggggcagagtgtctcctctggcagctctgagatcaaatccgatgacgagggtgatgagaacctgcaagacacgaaatcttcggaggacaagaaattagatgacgacaagaaggatatcaaatcaattactaggtcaagatctagcaataatgacgatgaggacctgacaccagagcagaaggcagagcgtgagaaggagcggaggatggccaacaatgcccgagagcgtctgcgggtccgtgacatcaacgaggctttcaaagagctcggccgcatggtgcagctccacctcaagagtgacaagccccagaccaagctcctgatcctccaccaggcggtggccgtcatcctcagtctggagcagcaagtccgagaaaggaatctgaatccgaaagctgcgtgtctgaaaagaagggaggaagagaaggtgtcctcagagcctccccctctctccttggccggcccacaccctggaatgggagacgcatcgaatcacatgggacagatgtaaaagggtccaagttgccacattgcttcattaaaacaagagaccacttccttaacagctgtattatcttaaacccacataaacacttctccttaacccccatttttgtaatataagacaagtctgagtagttatgaatcgcagacgcaagaggtttcagcattcccaattatcaaaaaacagaaaaacaaaaaaaagaaagaaaaaagtgcaacttgagggacgactttctttaacatatcattcagaatgtgcaaagcagtatgtacaggctgagacacagcccagagactgaacggcaatctttccacactgtggaacaatgcatttgtgcctaaacttcttttggaaaaaaaaaatataattaatttgtaagtctgaaaaaaaaatatttaatttaaaaaaaattgtaaacttgcaataatgaaaaagtgtacttctgaagaaaactacatgaacgtttttgttggtattcaagtcagctagtgtttataattactggatattgaattaggggaagctcggctgccctagtaacaaaaccagcaaacgtcctgatgacaacgaagtgatgacattagccattccttagggtaggaggaacagatggatcttatagacctatgacaaatatatatataaatatatatataaatatatattaaaaatttagtgactatggtaagcttttgttcatttgtttcagacttttttctcctgtaaaaaaatagtactgattaacttttttaaaagaaagattttactgtaaatatggatttttttttttttggtcttatttctgtccctttccctggtttgttatcgtaacctgtagtgccaactctgcttccagaggggtagtgcaggatgaaatgctgaccctgatgttgcttctcattcataaataagtagaaagttgtttctccagtcttttgggaacacaggacttaaaagtcacatcatgtgtagatattacaagcagcattaccaagacatggcaaaaagagtttgtctgaattgtaatgttgcgtttgtgaacctattctgggattttcagaggtacaaggttagaatgctacaatgttaccactgtgccttccaatgtttatatcatcggaaacataacataatcaaagtggctgtgatttaacaaaatgattaaagtgttacctacctgtgtagccgaagtagtgtgcagtgaggcgtttctgaatacatggtcagatttttggaaaaaaacaaaaacaaaaaaaacaagtaaagttcaaaaaccgtcaaatgagaaaattgcaagtagtgtgacagagctgattgattttgttgctttcttgattttttttttcaaaatgggtttactaaaatgtagatgacttaactgcctcctccttcgtctgaaaaatgccaatattcaatcatcatgcagcattataacaagccttataagtcctaaagcattaagttgcacttttttgaggaggggtagtgcagtatttctctggccagtatgaatgaagtttatacttaccatatttgatagaaacatagatcaagctatggcacagcgactcatcagatagctagctttgacgtctgggcacaattgaaccaacttccatcgtgaatctttataatgattgactttggtgtatagtgcagtaaacaaatagtgctcctagttaagtatttgtcagcatccttttgtctctaacttgtttctatttttacagccacacaattcttggcatgtattaagaaaaaaaaaaatccctgttcaagtagtttttccacctatcagcactgagtaaatgccataaatccattgaaatggtctaaatgttccatctgttctcctgttttgccagttatatagtaatgaaatacatttgtaaattttatgcaacaaatggcaaacgtatcattattttgaaattgtgtatgtaaaagttatatttttacatgtagactcttgttattatgtgttttaatacattgtatcagtttttgtttttttttaaaaactgtggtttaaaaagaagtctcatttaaatgaaatagctacaagaatcagaattttatgttcatttctgaaaatgtaagaacaaataagatagttaccacgtggtcatcttttacaaacccataaacattttgattagctgtgtgtgtgttgaaaaactgtaaatatgttcagtagcgataaaactaaaataactttgatttgttgataagttcctaaaatgtggaggtggattaaaaccttaggagaatagcagaaatcaaacttcatgaaaagttattttggggctttcctgtgaaatgtatgaacaaagaggctcagagaaggacatggaagacaataatgtatactctctcctcctccctgaataatgaaaaccatgtgtatttgttccctccgtatgttaaagatttccttttagtggtacattctgcactcattttgtatagtctaccaaggcgggtatccctaggaacaatattatataggaagcaggtatactctgatcacattcaggataagtgtacagaagaaaatacggtgtttactctttagggaactggaaacactccctgcattgatgtacattttaagaatggcacttttgatacatgttatcataaaggtgcttaatagagctgaattaaagtttttcaaatctgtaaacaaagcaaaaaagtaaattgtagtcatttgattattttttaaattggtgctttatattttgttctcactcagagtaaaagctgcaatttattgttcaccagctttgatgtattcattactcagtaatgcaatacctctattgttgaattccctttggaaataagtgaaaattctaacggccactgaaagctgctcgctaggttttgcttggtggagaaacataatctgcacctatccatattaattgggttgtatccccattaaaaaagaaaaaaagggaatgtggcctttttagtgtgttttttattgttgttgttttgtaattatcaaacccaggtaagatattggtatcctgcactggattttcaaatgaagttcagcagaagacagttaagattaaagtactatacaaaaatttcaaaagggtccatactacgctatctgtatgacgacacttaggctggggatctctttcagaaactcggactttaaaagcaacttggagcagttgatccacctccacattcaagtaatttatgaatatgcagaatagggatctgttcatctagaaatttttaccatttgtcttctgtgtagctgcaaggaacactaatgtttatacaactgtcagtccacccagtggtgcaactggttctgattcagtcttccgattcctttttatttttcactttttcctatttctgaatttttttttttatttgtgatcttgattttgatgaggggttggggagtggggagggagtcgaaccaagacttggagttaagaggattttcatcttttgcatccaacaggcagaatatgatctgtgtccaaaagtgaacttgagtcaggaatgaatcaatttcagcataaacaagcacaaaaatttagtctgctggctgactggaagcaaaaaagtcaagatggaatatgatgaattccaacacaatggggcaccaaggcctttaggcctctctttttattttgctttggttttgtttgtttttctttagagacatgctctttctcatgggacttgaagtggactcatctttgtgcagtgctggttttgccatactcatttcaagtattatagacatatgtaatggtgaaaatatatgaactgtggcctttttcattcttgttacttgtgatgcaattaagtgaagataagaaaaaaaaaaaaaaagcagagatttaccatgtatcagtgcctggctttttgttataaagctttgtttgtctagtgctcttttgctataaaatagactgtagtacaccctagtaggaaaaaaaaaaaactaaatttaaaaataaaaaatatatttggcttatttttcgcaggagcaatccttttataccatgaatattacaaaaaaattgtcagattctgaatatttcttctttgtagatttttggaatcattatgagtaaaagtttgttactttattttactatttaaaagatgttattttaccatgtgttaccaagatgaaactgtatgggtagcttttttgtttgttttttgttttgtttttgtttttgtttttgtttttagttgtaggtcgcagcggggaaattttttgcgactgtacacatagctgcagcattaaaaacttaaaaaaattgttaaaaaaaaaaaaagggaaaacatttcaaaaaaaaaaaaaaagataaacagttacaccttgttttcaatgtgtggctgagtgcctcgattttttcatgtttttggtgtatttctgatttgtagaagtgtccaaacaggttgtgtgctggagttccttcaagacaaaaacaaacccagcttggtcaaggccattacctgtttcccatctgtagttattcgatgaagtcatgtacatgaccgttctgtagcaataaatgtgccatttttataaactgtttctgacacttgtttcatttcattttgcattgtccatatagctatgattctcttctgtaagtaaaacgcatctatatttcattttccaagtgttggaggtattgacagcttaacaaacaaaacatacaaaaaaaatcacaaaaacaaattgaaaagcaaagcacatgattgatcaaggaagagatgcccttaatgaaaatggaacgggatgcatgcaaaacaaaaagaaaactgtctagaggattaactaattgaaggaatataattaatgtgtgtgtaacactgaagctatgcatttgaagagctctgaactgcaccagtgttttcggttgtgctgcaggttgctaagtcaagtcagccttaaccttttgcaccagttggtcggctgtttggcagaacattctcagatcttttcagtcaaaaatctaagatgatttattttgtatcactttgttaaaagctgaatattgttaactacagttaatattaacactgtatttatactttctcaaactacatccgccccaccacttctggttgcctctgttgactattaatccagatgtaaacaaccagatgtttttttctaacttgtacaaactgacgtgtgtcaactatcatggaaggaaaaaaatgtacagattaaaattattcagtgttatgtactgtaagttaatatttttgtagaatggacatcaatctactttgcaaaatttggaggctatttcaacattgcactgtagaaatgtaaagtaatgtatgcaatgtaaaggaaagcccgcggtagctgagcgcttcataacagaatgttctaatcaagtacgtggtatttggggatgtctccaatattgctcttgtattctttctaattgggtttagtgactagttgaaggaaaatgttataacgccatttggttcacatgtgaagtgccctccatagccaaatgttgggatttttttttttttcgtttttggttggactgtttgcagatatttaaattttatgaaatttccaaagattttggttgataacccccttttaccttctaaatgatttgagatgttcttatgttcttactgtgtgttttaaatatatataaaagagccacaagcattt

SEQ ID NO: 1506 - DNA, 3015 bp, HOMO SAPIENS
cagggtttattgttatgtaagttcttgttcagcttcctttgttttctttcacttctgagaatttaactttcgtttctcactcagctcctgtggggaaactcatttgtggagaccagccctctggcttggtgagtgaatctggtttacaccggctcctgccctgccttcactcttctcccctgattcaagactcctctgctttggactgaagcactgcaggagtttgtgaccaagaacttcaagagtcaagacagaaggaagccaagggagcagtgcaatggatttctcagtaaaggtagacatagagaaggaggtgacctgccccatctgcctggagctcctgacagaacctctgagcctagattgtggccacagcttctgccaagcctgcatcactgcaaagatcaaggagtcagtgatcatctcaagaggggaaagcagctgtcctgtgtgtcagaccagattccagcctgggaacctccgacctaatcggcatctggccaacatagttgagagagtcaaagaggtcaagatgagcccacaggaggggcagaagagagatgtctgtgagcaccatggaaaaaaactccagatcttctgtaaggaggatggaaaagtcatttgctgggtttgtgaactgtctcaggaacaccaaggtcaccaaacattccgcataaacgaggtggtcaaggaatgtcaggaaaagctgcaggtagccctgcagaggctgataaaggaggatcaagaggctgagaagctggaagatgacatcagacaagagagaaccgcctggaagaattatatccagatcgagagacagaagattctgaaagggttcaatgaaatgagagtcatcttggacaatgaggagcagagagagctgcaaaagctggaggaaggtgaggtgaatgtgctggataacctggcagcagctacagaccagctggtccagcagaggcaggatgccagcacgctcatctcagatctccagcggaggttgaggggatcgtcagtagagatgctgcaggatgtgattgacgtcatgaaaaggagtgaaagctggacattgaagaagccaaaatctgtttccaagaaactaaagagtgtattccgagtaccagatctgagtgggatgctgcaagttcttaaagagctgacagatgtccagtactactgggtggacgtgatgctgaatccaggcagtgccacttcgaatgttgctatttctgtggatcagagacaagtgaaaactgtacgcacctgcacatttaagaattcaaatccatgtgatttttctgcttttggtgtcttcggctgccaatatttctcttcggggaaatattactgggaagtagatgtgtctggaaagattgcctggatcctgggcgtacacagtaaaataagtagtctgaataaaaggaagagctctgggtttgcttttgatccaagtgtaaattattcaaaagtttactccagatatagacctcaatatggctactgggttataggattacagaatacatgtgaatataatgcttttgaggactcctcctcttctgatcccaaggttttgactctctttatggctgtgcctccctgtcgtattggggttttcctagactatgaggcaggcattgtctcatttttcaatgtcacaaaccacggagcactcatctacaagttctctggatgtcgcttttctcgacctgcttatccgtatttcaatccttggaactgcctagtccccatgactgtgtgcccaccgagctcctgagtgttctcattcctttacccacttctgcatagtagcccttgtgctgagactcagattctgcacctgagttcatctctactgagaccatctcttcctttctttccccttcttttacttagaatgtctttgtattcatttgctagggcttccatagcaaagcatcatagattgctgatttaaactgtaattgtattgccgtactgtgggctggaaatcccaaatctagattccagcagagttggttctttctgaggtctgcaaggaagggctctgttccatgcctctctccttggcttgtagaaggcatcttgtccctatgactcttcacattgtctttatgtacatctctgtgcccaagttttccctttttattaagacaccagtcatactggctcagggcccaccgctaatgccttaatgaaatcattttaacattatattctctacaaagaccttatttccaaataagataatatttggaggtattgggaataaaaactccaacatataaatttgaggaaggcacgatttcactcataacaatcttaccctttcttgcaagagatgcttgtacattattttcctaataccttggtttcactagtagtaaacattattattttttttatatttgcaaaggaaacatatctaatccttcctatagaaagaacagtattgctgtaattccttttcttttcttcctcatttcctctgccccttaaaagattgaagaaagagaaacttgtcaactcatatccacgttatctagcaaagtacataagaatctatcactaagtaatgtatccttcagaatgtgttggtttaccagtgacaccccatattcatcacaaaattaaagcaagaagtccatagtaatttatttgctaatagtggatttttaatgctcagagtttctgaggtcaaattttatcttttcacttacaagctctatgatcttaaataatttacttaatgtattttggtgtattttcctcaaattaatattggtgttcaagactatatctaattcctctgatcactttgagaaacaaacttttattaaatgtaaggcacttttctatgaattttaaatataaaaataaatattgttctgattattactgaaaagatgtcagccatttcaatgtcttgggaaacaattttttgtttttgttctgttttctttttgcttcaataaaacaatagctggctctaaaaaaaaaaaaaaaaaaaaaaaaaaa

SEQ ID NO: 1507 - DNA, 503 bp, HOMO SAPIENS
  misc_feature (69)..(69): n is a, c, g, or t
  misc_feature (92)..(92): n is a, c, g, or t
  misc_feature (96)..(96): n is a, c, g, or t
  misc_feature (183)..(183): n is a, c, g, or t
  misc_feature (185)..(185): n is a, c, g, or t
caaacatatcaacccaaaattccttaaggcacaagcatagaaaagtggtagaaaaccataatgaataanctattatagattaccagtttaanctancttgtggtaataaaaaatgattaaggcaatttactgttcttccacaggggagtgaacaatttatatgtaaaagcagggggagtggangnttcactctaacttccctcccagggatgaagaggagccccctttctgtgcctcacactgtgcctggtgatttaggttggtcatcccgtctaatccccttattacactctgaagttgatcttcccactctcattcaacagataaggaatttgaagctcaaagggcttaagtaatttgtttctggtcactagtagaaatgagaattgaactgtctgcctgcaaacacatactctgttcaagatggcaaatgcttgggttagaatatttttatatgtttgacaggacaaacaatggtaatgatgttcttttggctaatggta

SEQ ID NO: 1508 - DNA, 1090 bp, HOMO SAPIENS
cttggcaaggctaataagaaagcagcttttccaagaaacaatacaatattactggccagatagtattattgattaattcaacaaacagttatgtagcatctactggtaccctggaactgtgctgaactttatagctacacagatgactaagacgcaatttggccttgccagttcatgactgagttatacatgaacagaacaagatcctcatgaaacctctgatatggacatggtcagatgttgaaggccagaggccggctctgctcatctgcacagctgcagcaggacccacgcagggagttaaggatctcgaggaagtgcctccatctgcagcgagtcagtcagcccaagcacgctgtgctctggggagctggggttatggcaagccctttgagccaagaagtgtgaaaaacatacactctactcctgcttacccagatgccacaatgcacagacaactcctggctccggtggaaggaaggatggcagagacattgaatcagaaactccatgttgccaatgtgctggaagatgaccccggctacctacctcacgtctacagcgaggaaggggagtgtggaggggccccatccctcagctctctggccagcttggaacaggagttgcaacctgatttgctggactctttgggttcaaaagcgactccgtttgaggaaatatattcagagtcaggtgttccttcctaaaaaaaaaagtctattttggagaattgaaataattcatggaagggaatcactattcagggatttttcccctttgctcttcttttccctccttaaaagaaaaattaccttctagtcctaggatgaggacacactattagtttgaattaaatgctttgatattctcagatcagccatcttgaaccaaagcaaaaccacaagttacactttcttaaaatttgatttgtcatattttctagagaaacttgaatttaattgtgttattcttagcttccactggcagcctagctttgagggtaaatgaaaatataacccatagattacccagccacttgggaacagcaggtaatactgaagaaaaataaaaatagattttgaaaacgtta

SEQ ID NO: 1509 - DNA, 6419 bp, HOMO SAPIENS
aggggcggaggtgacagcgggctggggactggcggctgcaactgcctgccgcgccgagggaccgccgggcggcggaaagcaggttataaaacatggaggctggctcagtggttcgagccatttttgacttctgccctagcgtatcagaagaactgccgctctttgtgggagatattattgaggtgctggcagtggtggatgaattttggcttctaggaaagaaggaggatgttacaggacaattccccagcagttttgtggaaattgtgaccattcccagtctaaaagagggagagaggctgtttgtgtgcatttgtgaattcacatcccaagagttggataatcttcccctccatcgaggtgacctggtgattctcgatggcattcccactgcaggctggctgcagggccgaagctgctggggcgcacggggcttcttcccatcttcatgtgtccgcgagctctgcctctcctcacagagccggcagtggcactcccagagcgccctgtttcagattccggaatattccatgggacaagcccgggccctaatggggctttctgctcagctggatgaagagctggacttcagggaaggggatgtgatcaccattattggagttcctgaaccaggctggtttgaaggggagttagagggccgaagaggcatttttccagaaggttttgtagagctgttggggcccctgaggactgtggatgagtcagtaagttctggaaatcaagatgactgcattgttaatggtgaagtagatacccctgtaggagaagaagagatagggccggatgaggatgaggaggagccagggacctatggggtcgccctgtacagattccaagccctggagccaaatgagctggatttcgaggtcggggataaaatccgaattctggcgaccttggaagatggctggctggaaggatccctgaagggcaggacaggcatctttccttaccggtttgtgaaattatgtcctgacacacgggtggaggaaaccatggctctgccccaggaaggcagccttgccaggatcccggaaacttctttggattgtttggagaacaccttaggagtagaggaacaaagacatgaaaccagtgaccatgaggccgaggagcctgactgcattatttctgaagcacccacttctcccctcggtcatctgacttcagagtatgacacagacagaaactcttatcaggacgaggacaccgcaggagggcccccgagaagcccaggcgtggagtgggaaatgcctcttgccacagactctcccacatctgaccctacagaagtagtcaatggtatttcctcccaacctcaggtcccttttcatcccaacttgcagaaaagccagtattattctacagtgggagggagccacccgcactcagaacagtaccccgaccttcttcccctagaagcaaggactagagactatgccagcctacctcccaaaagaatgtattcccagctaaaaactcttcagaagccagtgctccctctttacaggggctcttctgtttcagcttcaagggtagtcaaacccagacaatcaagtcctcagctccacaacctagcaagttatactaaaaagcaccacacgtccagtgtttactccatctcagagagattggagatgaagcctggtccgcaagcccaagggcttgttatggaagcagcaacacattcacagggagacggcagcactgacctggactcgaagctgacacaacagctgatcgagtttgagaagagcttggcagggcccggcacagagccagataaaattttacgccacttttcaatcatggactttaactctgagaaggatattgtccgaggttcctcaaagttaatcaccgagcaggagctgccggaaaggagaaaggccctaaggccaccgccacctcgtccctgtactccggtatccacttctccccatttgctggttgaccagaacctaaaacctgcaccacccttggtggtgcgaccctctcgcccagctcccctgcctccctcagcacagcagagaacgaatgcggtatcccccaagctcctatctcgacaccgtcctacctgtgagaccttagaaaaggagggccctggtcatatgggaaggagtctggaccagacctccccatgccccttagtgctggtgaggattgaggaaatggagcgggacttggatatgtacagtagagctcaagaagagctaaacctcatgctggaggagaagcaggatgaatcatcaagagcagagaccctcgaggatctcaagttctgtgaaagtaacattgaaagtttgaatatggaactccagcaactaagagaaatgacgctcctctcctcccagtcttcatcactggtggccccttctgggtctgtgtctgccgaaaatccagagcagaggatgctggagaagagagccaaggtcatagaagaacttcttcagacagaaagagactacattcgggatctggaaatgtgtattgagcggatcatggtacccatgcagcaggcacaggtaccaaacattgattttgagggactttttggaaatatgcagatggtgattaaggtctcgaagcaattattggctgctctggaaatcagcgatgctgtaggacctgtgtttcttggtcaccgggatgagcttgagggaacatacaagatttactgccagaatcatgatgaggccattgcgctgcttgaaatctacgagaaggatgagaagatccagaagcatcttcaggactccttggcagatctgaagagcctatacaacgaatggggatgcacaaattatattaacctgggctccttcctcatcaaaccagtacagagagtaatgcgttacccgctgttgctaatggagttgctgaattccaccccagaatcccacccagataaagtgcctttaaccaatgcagtccttgcggtcaaggaaatcaacgttaacattaatgaatataaacggcgaaaggacctggtcctcaagtaccgtaagggtgatgaagatagccttatggagaaaatttccaaactgaacatccactccatcatcaagaaatccaaccgagttagcagtcacctgaagcatctcactggctttgctcctcagataaaagatgaagtatttgaagaaacagaaaaaaacttccgaatgcaagaaagattgattaagtcttttatccgagacctgtctctctacctccagcacatccgggagtccgcatgtgtgaaagtggtggctgctgtgagcatgtgggatgtgtgcatggagagaggacaccgggacctggagcagtttgagagggtgcatcgctacatcagtgaccagctcttcacaaactttaaggagaggacagagcggcttgtcatctcccccttaaatcagttactgagcatgtttacagggccccataagctggtacagaaacgctttgacaagctcctggacttctataactgtacagaacgggcagaaaagctaaaggacaagaagaccctggaggagctgcagtcggcccggaacaactatgaggccctgaatgcacagctgctggatgagctgcccaagttccaccagtacgcccagggcctcttcaccaactgtgtccacggctatgctgaagcccactgtgactttgtgcaccaggctctggagcaattaaagccactgctttcgttactcaaagtggctggcagagagggaaaccttattgccatcttccacgaagagcacagcagagttctgcagcaactccaggtttttaccttcttcccggagtctcttccagctaccaagaagccatttgagaggaaaaccattgaccgccagtctgctcgaaagccactcctgggcctgccaagttacatgctacagtcagaagaactccgggcctccctcctggccaggtatccccctgaaaaactcttccaggcagaacggaacttcaatgctgctcaagacttggatgtctcacttttggaaggtgacctggtgggtgtgattaagaaaaaagaccccatgggcagccagaaccgctggctgattgacaatggagtcaccaaaggcttcgtgtacagctctttcctaaagccctacaatcctcgccgcagccactccgatgcctccgtgggtagccactcctccacagagtctgagcacggcagctcctcccccaggttcccacgccagaacagcggcagcaccctgaccttcaaccccagcagcatggctgtatcctttacctcggggtcttgccagaagcagcctcaagatgcatctcctccgccaaaagaatgtgaccaaggaactctcagtgcatccctaaatccgagtaattcagagagtagtccttccagatgcccttcagacccagactccacctcccagccaaggtcaggggactctgcagatgtagctagagatgtaaagcaacccactgccacgccgaggagctaccggaacttcaggcatccagaaatagttggctactccgtaccaggacgaaatgggcaaagtcaagacctcgtcaaaggatgtgcaagaacagcccaggctccggaagacagaagtacagagccagatggcagtgaggcagaaggcaaccaggtctattttgctgtctacaccttcaaggcacgaaacccaaatgagctgagcgtgtcagccaatcagaaactcaagatcctcgagtttaaagatgttacaggaaatacagagtggtggttagctgaggttaacgggaagaagggctacgttccctccaattatatccgcaaaaccgagtacacctgagcccacgttgcctgccacccagccttgctgcctttgctttcagtccgccgagggttctggcggcccaccgagagggcgcctgctcctgagacacaggccctgtctgcgttgcttaaccatggcatggtggagcacaccacagatcttgttctcctcgattgggttgtaaaccttgatgctcactagaatctctagaatttgaaatggaccctggggctttgcaaatgacttagtgactatgagaagagagacaagtcttagagctggcttttggaaaggagaaacttgcagtcagaagcccagtgtcctatgtatgcaggaagctgtgctctagcaatagacagtgttggtaatggttgtgctgtacggcgtttggggtggccccatgttccatgctcagctgaccggatgccaactcagatgaaaagaattcatggctctgggcaccccgtgaggcagtgcttgcacatggctgggagtttgtcgggattgaaccaaacctagtgcttcaaagctcctgggacacctccagtgtccagcacacattctcatacatactgcccctaatttctaaagtccctaaagcactacattctgtaaccttgtttcttttactccattcccagattagttatgcaaaattcaactgcgttctacttttagaagtgtttagggtctttattttctgttgacccttcatctgaaagattctcttcccttgttaggtacaatcactgcccccccgcttttttttttgagatggggtcttgctatgttgcccaggctggtcttaaacgcctgggctcaagcaaccctcccgcctccctgctgagattacaggtgtaagccaccataccgcaacctcaatgacacctttctgatggtctttacacagtctgtgatgtctggtggcccccctgccctggactcaataattgatagattttcctagagtaacagtatgagagctccagccattccattaaaagtattagttctgctttgagctgaaaccagttgagcctaatggaagactggatgtctttcttcttcatccaagcaccctaatgactgtttagttacatccatagatgcagacaacataacacctgtgacttacttgaattgggataagccattccagaagtagcttatcctagacttggaaataagatttttttcaccactaacttccatgcttcagagatgacattcaaagccagattcccaagtgcctgatcatacctcccagtctcaggaagatatttgcttaccccttagaccaagaatcttaagatcttccccagctatgaagcctatcttggaatgggaaaccatgaaatttgtcttttaaaagaaagggaagaaatagccttacagcccctgttcctccaagtgcacatttagccttaaaatcctgggagtcgggagacaccgtggagtcctaacatccacagtgtctgctggtcgtggtcagaaggcagtaatgcaagagtccttttgtgaagagtgtttctatgtagagatgtttatatttaagtagttcttttataaataaaagcatttctaatggcaaaaaaaaaaaaaaaaaaa

SEQ ID NO: 1510 - DNA, 2217 bp, HOMO SAPIENS
ggggcggtgccgaggccgggccggagcggggcgaagggggccgagcggcgggccgggccgggccgggcagggccggggcgtgggccggcaggaagatggcgaacgtggggctgcagttccaggcgagcgcgggggactcggacccacagagccggcccctgctgctgctcgggcagctgcaccacctgcaccgcgtgccctggagccacgtccgcgggaagctgcagccccgggtcaccgaggagctctggcaggctgccctgagcacgctcaaccccaaccccacggacagctgtcccctctacctgaactacgccaccgtggctgccctgccctgcagggtgagccggcacaacagcccctcggccgcccacttcatcacgcggctggtgcggacctgcctgccgcccggagcgcatcgctgcattgtgatggtctgcgagcagccggaggtctttgcttccgcctgtgccctggcccgggccttcccgctgttcacccaccgctcaggtgcctctcggcgcttggagaagaagacggtcaccgtggagtttttcctggtgggacaagacaacgggccggtggaggtgtccacattgcagtgcttagcgaatgccacagacggcgtgcggctagcagcccgcatcgtggacacaccctgcaatgagatgaacaccgacaccttcctcgaggagattaacaaagttggaaaggagctggggatcatcccaaccatcatccgggatgaggaactgaagacgagaggatttggaggaatctatggggttggcaaagccgccctgcatcccccagccctggccgtcctcagccacaccccagatggagccacgcagaccatcgcctgggtgggcaaaggcatcgtctatgacactggaggcctcagcatcaaagggaagactaccatgccggggatgaagcgagactgcgggggtgctgcggccgtcctgggggccttcagagccgcaatcaagcagggtttcaaagacaacctccacgctgtgttctgcttggctgagaactcggtggggcccaatgcgacaaggccagatgacatccacctgctgtactcagggaagacggtggaaatcaacaacacggatgccgagggcaggctggtgctggcagatggcgtgtcctatgcttgcaaggacctgggggccgacatcatcctggacatggccaccctgaccggggctcagggcattgccacagggaagtaccacgccgcggtgctcaccaacagcgctgagtgggaggccgcctgtgtgaaggcgggcaggaagtgtggggacctggtgcacccgctggtctactgccccgagctgcacttcagcgagttcacctcagctgtggcggacatgaagaactcagtggcggaccgagacaacagccccagctcctgtgctggcctcttcatcgcctcacacatcggcttcgactggcccggagtctgggtccacctggacattgctgcaccggtgcatgctggtgagcgagccacaggcttcggtgtggccctcctgctggcgctcttcggccgtgcctctgaggaccctctgctgaacctggtgtccccactgggctgtgaggtggatgtcgaggagggggacctggggagggactccaagagacgcaggcttgtgtgagcctcctgcctcggccctgacaaacggggatcttttacctcactttgcactgattaattttaagcaattgaaagattgcccttcatatgggttttggtttgtctttctggtcgtcagcgtggtggtggaaacagctgaagttttaggagacagcttagggtttggtgcgggccacggggaggggaccgggaagcgctggggcttgtttctgtttgttacttacaggactgagacatcttctgtaaactgctacccctggggccttctgcaccccggggtgaggcctcctgcctgcctggtgccctgtcccagccccaggtcctgtgcagggcacctgcgtggctgacagccaggctcttactccagccggggctgccagcgcatccagccagcccagccctgtgaaagatggagctgacttgctgcaggggacctgatttatagggcaagagaagtcacactccggcctctcagaattcacttgaggttcaattaaatacagtcacaccgccccctcaaaaaaaaaaaaaaaaaaaaaaaaaaaaaaaaa

SEQ ID NO: 1511 - DNA, 6107 bp, HOMO SAPIENS
aaatgacgacaacggtgagggttctcgggcggggcctgggacaggcagctccggggtccgcggtttcacatcggaaacaaaacagcggctggtctggaaggaacctgagctacgagccgcggcggcagcggggcggcggggaagcgtatacctaatctgggagcctgcaagtgacaacagcctttgcggtccttagacagcttggcctggaggagaacacatgaaagaaagaacctcaagaggctttgttttctgtgaaacagtatttctatacagttgctccaatgacagagttacctgcaccgttgtcctacttccagaatgcacagatgtctgaggacaaccacctgagcaatactgtacgtagccagaatgacaatagagaacggcaggagcacaacgacagacggagccttggccaccctgagccattatctaatggacgaccccagggtaactcccggcaggtggtggagcaagatgaggaagaagatgaggagctgacattgaaatatggcgccaagcatgtgatcatgctctttgtccctgtgactctctgcatggtggtggtcgtggctaccattaagtcagtcagcttttatacccggaaggatgggcagctaatctataccccattcacagaagataccgagactgtgggccagagagccctgcactcaattctgaatgctgccatcatgatcagtgtcattgttgtcatgactatcctcctggtggttctgtataaatacaggtgctataaggtcatccatgcctggcttattatatcatctctattgttgctgttctttttttcattcatttacttgggggaagtgtttaaaacctataacgttgctgtggactacattactgttgcactcctgatctggaattttggtgtggtgggaatgatttccattcactggaaaggtccacttcgactccagcaggcatatctcattatgattagtgccctcatggccctggtgtttatcaagtacctccctgaatggactgcgtggctcatcttggctgtgatttcagtatatgatttagtggctgttttgtgtccgaaaggtccacttcgtatgctggttgaaacagctcaggagagaaatgaaacgctttttccagctctcatttactcctcaacaatggtgtggttggtgaatatggcagaaggagacccggaagctcaaaggagagtatccaaaaattccaagtataatgcagaaagcacagaaagggagtcacaagacactgttgcagagaatgatgatggcgggttcagtgaggaatgggaagcccagagggacagtcatctagggcctcatcgctctacacctgagtcacgagctgctgtccaggaactttccagcagtatcctcgctggtgaagacccagaggaaaggggagtaaaacttggattgggagatttcattttctacagtgttctggttggtaaagcctcagcaacagccagtggagactggaacacaaccatagcctgtttcgtagccatattaattggtttgtgccttacattattactccttgccattttcaagaaagcattgccagctcttccaatctccatcacctttgggcttgttttctactttgccacagattatcttgtacagccttttatggaccaattagcattccatcaattttatatctagcatatttgcggttagaatcccatggatgtttcttctttgactataacaaaatctggggaggacaaaggtgattttcctgtgtccacatctaacaaagtcaagattcccggctggacttttgcagcttccttccaagtcttcctgaccaccttgcactattggactttggaaggaggtgcctatagaaaacgattttgaacatacttcatcgcagtggactgtgtccctcggtgcagaaactaccagatttgagggacgaggtcaaggagatatgataggcccggaagttgctgtgccccatcagcagcttgacgcgtggtcacaggacgatttcactgacactgcgaactctcaggactaccgttaccaagaggttaggtgaagtggtttaaaccaaacggaactcttcatcttaaactacacgttgaaaatcaacccaataattctgtattaactgaattctgaacttttcaggaggtactgtgaggaagagcaggcaccagcagcagaatggggaatggagaggtgggcaggggttccagcttccctttgattttttgctgcagactcatcctttttaaatgagacttgttttcccctctctttgagtcaagtcaaatatgtagattgcctttggcaattcttcttctcaagcactgacactcattaccgtctgtgattgccatttcttcccaaggccagtctgaacctgaggttgctttatcctaaaagttttaacctcaggttccaaattcagtaaattttggaaacagtacagctatttctcatcaattctctatcatgttgaagtcaaatttggattttccaccaaattctgaatttgtagacatacttgtacgctcacttgccccagatgcctcctctgtcctcattcttctctcccacacaagcagtctttttctacagccagtaaggcagctctgtcgtggtagcagatggtcccattattctagggtcttactctttgtatgatgaaaagaatgtgttatgaatcggtgctgtcagccctgctgtcagaccttcttccacagcaaatgagatgtatgcccaaagacggtagaattaaagaagagtaaaatggctgttgaagcactttctgtcctggtattttgtttttgcttttgccacacagtagctcagaatttgaacaaatagccaaaagctggtggttgatgaattatgaactagttgtatcaacacaaagcaagagttggggaaagccatatttaacttggtgagctgtgggagaacctggtggcagaaggagaaccaactgccaaggggaaagagaaggggcctccagcagcgaaggggatacagtgagctaatgatgtcaaggaggagtttcaggttattctcgtcagctccacaaatgggtgctttgtggtctctgcccgcgttacctttcctctcaatgtacctttgtgtgaactgggcagtggaggtgcctgctgcagttaccatggagttcaggctctgggcagctcagtcaggcaaaacacacaaacagccatcagcctgtgtgggctcagggcacctctggacaaaggcttgtggggcataaccttctttaccacagagagcccttagctatgctgatcagaccgtaagcgtttatgagaaacttagtttcctcctgtggctgaggaggggccagctttttcttcttttgcctgctgttttctctcccaatctatgatatgatatgacctggtttggggctgtctttggtgtttagaatatttgttttctgtcccaggatatttcttataagaacctaacttcaagagtagtgtgcgagtactgatctgaatttaaattaaaattggcttatattaggcagtcacagacaggaaaaataagagctatgcaaagaaagggggatttaaagtagtaggttctatcatctcaattcatttttttccatgaaatcccttcttccaagattcattccctctctcagacatgtgctagcatgggtattatcattgagaaagcacagctacagcaaagccacctgaatagcaatttgtgattggaagcattcttgagggatccctaatctagagtaatttatttgtgtaaggatcccaaatgtgttgcacctttcatgatacatttcttctctgaagagggtacgtggggtgtgtgtatttaaatccatcctatgtattactgattgtcctgtgtagaaagatggcaattattctgtctctttctccaagtttgagccacatctcagccacattgttagacagtgtacagagaacctatctttcctttttttttttttaaaggacaggattttgctgtgttgcccaggctagacttgaactcctgggctcaagtaatccacctcagcctgagtagctgagactacagcccatcttatttctttaaatcattcatctcaggcagagaacttttccctcaaacattctttttagaattagttcagtcattcctaaaacatccaaatgctagtcttccaccatgaaaaatagattgtcactggaaagaacagtagcaatttccataaggatgtgccttcactcacacgggacaggcggtggttatagagtcgggcaaaaccagcagtagagtatgaccagccaagccaatctgcttaataaaaagatggaagacagtaaggaaggaaagtagccactaagagtctgagtctgactgggctacagaataaagggtatttatggacagaatgtcattacatgcctatgggaataccaatcatatttggaagatttgcagattttttttcagagaggaaagactcaccttcctgtttttggttctcagtaggttcgtgtgtgttcctagaatcacagctctgactccaaatgactcaatttctcaattagaaaaagtagaagctttctaagcaacttggaagaaaacagtcataagtaagcaatttgttgattttactacagaagcaacaactgaagaggcagtgtttttactttcagactccgggattcccattctgtagtctctctgcttttaaaaaccctccttttgcaatagatgcccaaacagatgatgtttattacttgttatttacgtggcctcagacagtgtatgtattctcgatataacttgtagagtgtgaaatataagtttaactaccaaataaggtctcccagggttagatgactgcgggaagcctttgatcccaacccccaaggctttgtatatttgatcatttgtgatctaaccctggaagaaaaagagctcagaaaccactatgaaaaaatttgttcagtgttttctgtgttcccgtaggttctggagtctgaggatgcaaagatgaataagataaattctcagaatgtagttataatctcttgttttctggtatatgccatctttctttaacttctctaaaatattgggtatttgtcaaataaccacttttaacagttaccattactgagggcttatacattggtgttataaaagtgacttgattcagaaatcaatccattcagtaaagtactccttctctaaatttgctgttatgtctataaggaacagtttgacctgcccttctcctcacctcctcacctgccttccaacattgaatttggaaggagacgtgaaaattggacatttggttttgcccttgggctggaaactatcatataatcataagtttgagcctagaagtgatccttgtgatcttctcacctctttaaattcccacaacacaagagattaaaaacagaggtttcagctcttcatagtgcgttgtgaaatggctggccagagtgtaccaacaaagctgtcatcgggctcacagctcagagacatctgcatgtgatcatctgcatagtcctctcctctaacgggaaacacctcagatttgcatataaaaaagcaccctggtgctgaaatgaacccctttcttgaacatcaaagctgtctcccacagccttgggcagcagggtgcctcttagtggatgtgctgggtccaccctgagccctgacatgtggtggcagcattgccagttggtctgtgtgtctgtgtagcagggacgatttcccagaaagcaattttccttttgaaatacgtaattgttgagactaggcagtttcaaagtcagctgcatatagtagcaagtacaggactgtcttgtttttggtgtccttggaggtgctggggtgagggtttcagtgggatcatttactctcacatgttgtctgccttctgcttctgtggacactgctttgtacttaattcagacagactgtgaatacaccttttttataaatacctttcaaattcttggtaagatataattttgatagctgattgcagattttctgtatttgtcagattaataaagactgcatgaatccaaaaaaaaaaaaaaaaaa

SEQ ID NO: 1512 - DNA, 4575 bp, HOMO SAPIENS; identical to SEQ ID NO: 960

SEQ ID NO: 1513 - DNA, 513 bp, HOMO SAPIENS
cattcttttcagctgcacatggtacatactcttaaaatcgaccacaattgctttattggccagaaagcaattctcaacaaattcaagaaacctgaaataccggccaggtgtagtggctcacacctgtaatcccaacactttggaaggctgaggtgggcaaatcacttgaggtcaagagtttgagaccagcctggccaacatggcaaaaacccatctcttctaaaaaatataaaaattagccgtgcatggtggcatgcgcctgtaatcccagctacttcggaggttgagtcacgagaattgcttgaacctgggaggaggaggttgcagtgagctgagatcacgccattgcactccagtctggttgacagagtgagactcatctcaaaaaaacaaaaaaaccctgaaataccaaccacactcttggaccacagtgccataaaaataaataccaagaagatctctcaaaaccatataattaagtggaaattaatctactcctgaatgacttgggta

SEQ ID NO: 1514 - DNA, 2797 bp, HOMO SAPIENS
ggattcgatcctgcgcgacggccgcgaaggcgggggcggaggctcggcctgcgcggctgggagcggcttaggggaggagggaagaccggaagccacggttgcgtccccatccttagattcgctcctccgggcagggagcggagacggaggaggaggagggagaggctgaatgttggctcgggagacgtacgaggaggaccgggagtacgagagccaggccaagcgtctcaagaccgaggagggggagatcgactactcggccgaggaaggcgagaaccgccgggaagcgacgccccggggcgggggcgatggcggcggcggcggccggagcttctctcagccggaggcaggtggaagtcatcataaagtttctgtttcacccgtcgtccatgttcgaggactctgtgaatctgtggtggaagcagacctcgtggaagcgctggaaaaatttgggacaatatgctatgtgatgatgatgccatttaaacgacaggctctagtggaatttgaaaacatagatagtgccaaagaatgtgtgacatttgctgcagatgaacccgtgtacattgctggtcaacaggcttttttcaactattctacaagcaaaaggatcactcggccaggaaatactgatgatccatcaggaggcaacaaagttcttctgctctcaattcagaatccgctttatccaattacagtggatgttttatatactgtatgcaaccctgttggcaaagtgcaacgtattgttatattcaagagaaatgggatacaagcaatggttgagtttgaatcagtcctttgtgcccagaaagctaaagcagcactcaatggagctgatatatatgctggatgttgcacactaaaaattgaatatgcacggccaactcgtctaaatgttattaggaatgacaatgacagttgggactacactaaaccatatttgggaagacgagatagaggaaagggtcgccagagacaagccattttgggagaacacccttcttcgtttagacatgatggctatggatcccatggtccattattgcctttaccaagtcgttacagaatgggctctcgagatacacctgaacttgttgcttatccattaccacaggcttcttcctcttacatgcatggaggaaatccctctggttcagttgtaatggttagtggattacatcaactaaaaatgaattgttcaagagtcttcaacctgttctgcttatatggaaatattgagaaggtaaaatttatgaagaccattcctggtacagcactggtagaaatgggtgatgagtatgctgtagaaagagctgtcacacaccttaataatgtcaaattatttgggaaaagacttaatgtttgcgtgtctaaacaacattcagttgttccaagtcaaatatttgagctggaggatggtaccagcagctacaaagattttgcaatgagcaaaaataatcgctttacaagtgctggccaagcatctaagaatataatccagccaccctcctgtgttttgcattattataatgttccattgtgtgtcacagaagagaccttcacaaagttgtgtaatgaccatgaagttcttacattcatcaaatataaagtgtttgatgcaaaaccttcagccaaaacactttctgggctattagaatgggagtgcaaaactgatgcagtagaagcccttacggcactgaatcactatcagataagagtgccgaatggttccaatccctatacattgaagctttgcttttctacatcatcccatttataagaagagaagagcatgttagaatttatgttcacctttattacaatttcaaagctacacttcattaaaaaaaaatctaaaatggttgatctcatgttgccttgcttactttaagatcctgttctgtaataaacatattttgccttgagtaaatttgttgtaagcttaaatattgaattgttttcattttaagatagaatatcataatgtagactatctacagcttcattgtagattatacagatatatgatttctaaccttattactggaatttttcttccacagtaaaaatatatttgcattcttaatgctaattatctgcaagtattttttcattgtgtaagagattaatgcaggtgaaagtattgcattttaatatagaattcctattatatgtttagatgtttaagtatgttgcagttactcatattaaacataacttgtatatttattattttaatgaagtttgagaataacgttacatatgttgaattttaagtactacagatttaactgattttatatttctgaaaggctaacagacatggatacacgtgtacagtatgcattcaaacttatttaaattggtgtatttttttttaagtcactgtccatttgtattgacatgcctctgtttctagtccagtttggagattttataaagttataacaatgagttaatgtgttcattttcatttgttgcatgtgacttaaatacagctagtatttggcattgagattttaatagaggttataattaacagttcctcttatagataataatctgggatccatgggtgggcttcagagaatctgtgtaccccctaaaattgtatgtagaattttggatatttacatttttattttttaactcttggatccatcagtaatatgtatttttctatatggtacaagatttaaggatctaattttatttttattccaaacagatagctatttgtctcaataccatttattaaacattctttctcccactgaaaaaaaaaaaaaaaaaa

SEQ ID NO: 1515 - DNA, 451 bp, HOMO SAPIENS
  misc_feature (76)..(76): n is a, c, g, or t
  misc_feature (96)..(96): n is a, c, g, or t
  misc_feature (117)..(117): n is a, c, g, or t
  misc_feature (125)..(126): n is a, c, g, or t
  misc_feature (133)..(133): n is a, c, g, or t
  misc_feature (139)..(139): n is a, c, g, or t
  misc_feature (146)..(146): n is a, c, g, or t
  misc_feature (151)..(152): n is a, c, g, or t
  misc_feature (154)..(154): n is a, c, g, or t
  misc_feature (156)..(157): n is a, c, g, or t
  misc_feature (165)..(165): n is a, c, g, or t
  misc_feature (172)..(172): n is a, c, g, or t
  misc_feature (185)..(185): n is a, c, g, or t
  misc_feature (208)..(208): n is a, c, g, or t
  misc_feature (425)..(425): n is a, c, g, or t
ccacacctggccatcttaagcaattttaagctcacgtttattttaataaacttcagtagatccttaaaacttctgntaagttgtttaatttttaangtataattaagtaagtatttntaagtagnngcatttnattttngtttttnatttnngngnngggaagtntaagccntgatgaaactgcntggtggaccctgaccaccacccntgcagcacaagccccgcgtttaaaaattatagacccgtgctcacttcagcagcacatacactaaaattggaaccttatagagaagattagcatgacccctgtgcgaggatgacacacaaattcgtgaagcattccatatttttctgaaattgaggcagtaattaatagcctaccaaccaaaaaaagcccaggaccagatggattcacagccaaattntgccacaggtacaaagaggagctggt

SEQ ID NO: 1516 - DNA, 586 bp, HOMO SAPIENS
gtaacggtcctcagcgcaagggtcatttcgtcgctgggaagggacggccctcgcccgcggtgatggtggttagcaagatgaacaaagatgcgcagatgagagcagcgattaaccaaaagttgatagaaactggagaaagagaacgcctcaaagagttgctgagagctaaattaattgaatgtggctggaaggatcagttgaaggcacactgtaaagaggtaattaaagaaaaaggactagaacacgttactgttgatgacttggtggctgaaatcactccaaaaggcagagccctggtacctgacagtgtaaagaaggagctcctacaaagaataagaacattccttgctcagcatgccagcctttaagattgaattagattgtgttgttgtggttttatttctgaaagtaaaacttgccataaattagaaaacaatttcccaaaataaaatccttttttgtatgatggtatacagttttcagtaatgatgtatacattgtattgatttttttccctaaatgtgttattttaataaatatctcatgaatgagtttgaagtttgcttggaaaaaaaaaaaaaaaaaa

SEQ ID NO: 1517 - DNA, 2550 bp, HOMO SAPIENS
cgtggatcccgagaaagaggcgcaggacgaggaggcagaacccgactggcgcgtagagcagcagcacgagcagtaggaagcagtcacccggaagcctgggggcgagaggcgaagtggtcaggcgccgaaggccgagagcacgcggggatcggtctcttcccgccgggtctcttaccggtgcgagtcaaagagccgctccggccccggccctgagggaagctccataactgctgcttcaggagcgcccggccgtcgccgccgccgccattttcgcgcccggccgcaggggctcttgggaaggcggagtctttgggcatccgcccggggtgaggggacccgaagtcctgaggcgcgccggaagggctagcggtcccagcataccccgcggccccttgggccgtctcacaactcgcgtccggcggagaccacaattcccggcattcgtggggcagggaggagtcggcctcccggaatcctggtcccggcgtgcacttctgaaggacttcaggtaccggcgtgccccgcgtcctactgtccgcctgctcgcgtcctgggtgccgcctctgagtagggcgggcgaggaggcagccaaggcggagctgatggctgcgccgagggcggggcggggtgcaggctggagccttcgggcatggcgggctttggggggcattcgctgggggaggagaccccgtttgacccctgacctccgggccctgctgacgtcaggaacttctgacccccgggcccgagtgacttatgggacccccagtctctgggcccggttgtctgttggggtcactgaaccccgagcatgcctgacgtctgggaccccgggtccccgggcacaactgactgcggtgaccccagataccaggacccgggaggcctcagagaactctggaacccgttcgcgcgcgtggctggcggtggcgctgggcgctgggggggcagtgctgttgttgttgtggggcgggggtcggggtcctccggccgtcctcgccgccgtccctagcccgccgcccgcttctccccggagtcagtacaacttcatcgcagatgtggtggagaagacagcacctgccgtggtctatatcgagatcctggaccggcaccctttcttgggccgcgaggtccctatctcgaacggctcaggattcgtggtggctgccgatgggctcattgtcaccaacgcccatgtggtggctgatcggcgcagagtccgtgtgagactgctaagcggcgacacgtatgaggccgtggtcacagctgtggatcccgtggcagacatcgcaacgctgaggattcagactaaggagcctctccccacgctgcctctgggacgctcagctgatgtccggcaaggggagtttgttgttgccatgggaagtccctttgcactgcagaacacgatcacatccggcattgttagctctgctcagcgtccagccagagacctgggactcccccaaaccaatgtggaatacattcaaactgatgcagctattgattttggaaactctggaggtcccctggttaacctggatggggaggtgattggagtgaacaccatgaaggtcacagctggaatctcctttgccatcccttctgatcgtcttcgagagtttctgcatcgtggggaaaagaagaattcctcctccggaatcagtgggtcccagcggcgctacattggggtgatgatgctgaccctgagtcccagcatccttgctgaactacagcttcgagaaccaagctttcccgatgttcagcatggtgtactcatccataaagtcatcctgggctcccctgcacaccgggctggtctgcggcctggtgatgtgattttggccattggggagcagatggtacaaaatgctgaagatgtttatgaagctgttcgaacccaatcccagttggcagtgcagatccggcggggacgagaaacactgaccttatatgtgacccctgaggtcacagaatgaatagatcaccaagagtatgaggctcctgctctgatttcctccttgcctttctggctgaggttctgagggcaccgagacagagggttaaatgaaccagtgggggcaggtccctccaaccaccagcactgactcctgggctctgaagaatcacagaaacactttttatataaaataaaattatacctagcaacatattatagtaaaaaatgaggtgggagggctggatcttttcccccaccaaaaggctagaggtaaagctgtatccccctaaacttaggggagatactggagctgaccatcctgacctcctattaaagaaaatgagctgctgccatcttttgtgggcagttagtcaggtgctgctctttgtggtgtggtgggctctggtctgttctgctcggtgctgggcctgggagcaaagattcccatgcttggctacagatactgacagctggcctctgaaggagggtgaaaacttctgcttgacagttccacatccatagtgcatggtctgatgagtgcggttgctgacatgggtttcttggtaagctcctgaggtaatggcagcctc

SEQ ID NO: 1518 - DNA, 466 bp, HOMO SAPIENS
gcttggagcctcagtagttctggataagtgagagctgtacgggaggttgtaaccatgagctaccctggttggcagttgacatccgaggaccagcactggtcatcgcacagaaagaaaactttacaccttgagatccctccattcttcttaaacttccaagtgtatgtttgatgggagaagaggggaagggatcaacatttaaaggctctggaaggagtcagataactgtttttggcttcaaatgtagaatgaatccctagattttcctctactgagagaatgaaatcttaacccattccgttcccttgttggtactcagaaacggataccccaaagatgcattttgacatgctgaaaggccttagaagctgccttagaagatctgtctaaccttgtcttgttggtgtgtggaagtgggaatgcccacaggtgcacagggagggagtttctgaaattatctgaccga

SEQ ID NO: 1519 - DNA, 3591 bp, HOMO SAPIENS
cgaccacccggcctcggccaataagcgccgccctctcgcccccgtgttactgggtagaagaaaacaaaaacaaacagagcgagaagggccagagactctccgaggcggcggcagagacagaagagcggggtcggggccggctgaccaggaacctgggcgagcagcggcgggggcccgagggattctgaaggaagatttccattaggtaatttgtttaatcagtgcaagcgaaattaagggaaaatggatgtagaaaatgagcagatactgaatgtaaaccctgcagatcctgataacttaagtgactctctcttttccggtgatgaagaaaatgctgggactgaggaaataaagaatgaaataaatggaaattggatttcagcatcctccattaacgaagctagaattaatgccaaggcaaaaaggcgactaaggaaaaactcatcccgggactctggcagaggcgattcggtcagcgacagtgggagtgacgcccttagaagtggattaactgtgccaaccagtccaaagggaaggttgctggataggcgatccagatctgggaaaggaaggggactaccaaagaaaggtggtgcaggaggcaaaggtgtctggggtacacctggacaggtgtatgatgtggaggaggtggatgtgaaagatcctaactatgatgatgaccaggagaactgtgtttatgaaactgtagttttgcctttggatgaaagggcatttgagaagactttaacaccaatcatacaggaatattttgagcatggagatactaatgaagttgcggaaatgttaagagatttaaatcttggtgaaatgaaaagtggagtaccagtgttggcagtatccttagcattggaggggaaggctagtcatagagagatgacatctaagcttctttctgacctttgtgggacagtaatgagcacaactgatgtggaaaaatcatttgataaattgttgaaagatctacctgaattagcactggatactcctagagcaccacagttggtgggccagtttattgctagagctgttggagatggaattttatgtaatacctatattgatagttacaaaggaactgtagattgtgtgcaggctagagctgctctggataaggctaccgtgcttctgagtatgtctaaaggtggaaagcgtaaagatagtgtgtggggctctggaggtgggcagcaatctgtcaatcaccttgttaaagagattgatatgctgctgaaagaatatttactctctggagacatatctgaagctgaacattgccttaaggaactggaagtacctcattttcaccatgagcttgtatatgaagctattataatggttttagagtcaactggagaaagtacatttaagatgattttggatttattaaagtccctttggaagtcttctaccattactgtagaccaaatgaaaagaggttatgagagaatttacaatgaaattccggacattaatctggatgtcccacattcatactctgtgctggagcggtttgtagaagaatgttttcaggctggaataatttccaaacaactcagagatctttgtccttcaaggggcagaaagcgttttgtaagcgaaggagatggaggtcgtcttaaaccagagagctactgaatataagaactcttgcagtcttagatgttataaaaatatatatctgaattgtaagagttgttagcacaagttttttttttttttttttttaagcacttgttttgggtacaaggcatttctgacattttataaacctacatttaaggggaatttttaaaggaaatgttttttcttttttttttgtttttcgagggggcaaggagggacagaaaagtaacctcttcttaagtggaatattctaataagctaccttttgtaagtgccatgtttattatctaatcattccaagttttgcattgatgtctgactgccactcctttctttcaaggacagtgttttttgtagtaaaatcactggtttatacaaagctttatttagggggtaaagttaagctgctaaaaccccatgttggctgctgctgttgagatactgtgctttgggagtaaaaaaagaaagttatttctttgtcttaaagaatttttaaaaaattagtcatgagacttattcatctttccagggaacatactgattggtcttaaaagactagacagttaagtaaaaggtggctggaacatctatttttctacaaaactggaaaaatgaacctggttctagaagaatgtacaccaaaataaaacatgtgaagcagtattgattctttattgggagtacatttttttaggtctcttaaactttaatttcacacagtaaattttgaatctcataaggaagcatatttgaacctagtcaatttaatcttagtgttcccttgaaaactttttttccctacaaaattttaagtgaaaaatacaatagtaaattaagattacactggggaaaaaaatgcaggtatcactttactccattgttatctgacctagagcttaattaagttttagaaatatgtaataccttccatcattccatcatccttaaattctgttaccaaataatggctaatgttacaaaaagttatactccagagacccaaagcttgacatttacctaatgtatgagaaaatattaccaattaacaataaagaatgatcatatttttaacctcttttacatagcctaataactcagcaaggcctcaacgtctgtgctaatttaaactgccaaatattgactgcagcaaacaagaattatattcagaatttatgagggtactgttaggagtatactgcttacaggtttagatatagtctgttagaattaaaaccaagtttagtgttcatatttacctcatgggctttatcaagcccatattacctcagcttatatatagttaccatttttaggtttttaattgtttgacacttggatgataaatgcagtcattttattctcaagtgcttaaaattaatgtaattaaaagcttagctgactacagaataggtgagggtttcttaaaaatgagatttaagggctgggcacggtggctcatgcctgtaatcccagcactttgggaggccgaggtgggcggatcacttgaggttgggagttcatgaccagcttgaccaacatgaagaaaccctgtctctattaaaaatacaaaagtagccaggcatggtggcgcatgcgtgtaatcccagctacttgggaggctgaggcaggagaattgcttgaacctgggaggcagaggttgcagtgagtcgagatggtgccattgctctcgtttgggcaacaagagtgaaactcttgtctcaaaaaaaaaaaaaaatgaggtttaagacagttttgtcattactggtgggatctggtcacacaagatagcattaaacgtgacatggcacataaaattggttaaaaaattttgttttttaattacgtaatgtaaaagcccaacaaacactttatgcaagattggaatgtatcttcaaattcagatttaataaacatgtaaagatcctctgtaaaaaaaaaaaaaaaaaaaaa

SEQ ID NO: 1520 - DNA, 5403 bp, HOMO SAPIENS
ctcgctgccgccggagtttccaggtctcgacttcactgctctgtgtcctctgctccaggaggcccagcctgtgtggccctgtgacctgcaggtattggagagccacagctaagatgccaggaacccctggaagcctagaaatgggactgttgacatttagggatgtggccatagaattctctccggaggagtggcaatgtctggacactgcacagcagaatttatataggaatgtgatgttagagaactacagaaacctggccttcctgggtattgctctctctaagccagacctgattacttatctggagcaaggaaaagagccctggaatatgaagcaacatgagatggtggatgaacccacaggtatatgtcctcattttcctcaagacttttggccagagcagagcatggaagattcttttcaaaaagtattactgagaaaatatgaaaaatgtggacatgagaatttacagttaagaaaaggttgtaaaagtgtggatgagtgtaaggtgcacaaagaaggttataataaacttaaccagtgtctcacaactgcccagagcaaagtatttcaatgtgggaaatatttgaaagtcttctataaatttttaaattcaaacagacatacgataagacatactggaaagaaatgcttcaaatgtaaaaaatgtgtcaagtcattttgcatccgtttacacaaaacccaacataaatgcgtttatattacagagaagtcctgtaaatgtaaagaatgtgaaaaaacctttcattggtcctcaacccttactaatcataaggaaattcatactgaagataaaccctacaaatgtgaagaatgtggcaaagcttttaagcagctctcaacccttactacacataaaataatctgtgctaaagagaaaatctacaagtgtgaagaatgtggcaaagcatttctatggtcctcaaccctaactagacataagaggatacacactggagagaaaccctacaaatgtgaagaatgtggcaaagcttttagccattcttcaacccttgctaaacataagagaattcatactggagagaaaccctacaaatgtgaagaatgtggcaaagcttttagccgttcttcaacccttgctaaacataagagaattcatactggagagaaaccctacaaatgtaaagaatgtggcaaagcttttagcaattcctcaacccttgctaatcataagataactcatactgaagagaaaccctacaaatgtaaagaatgtgacaaagcttttaagcgactctcaacccttactaaacataaaataatacatgctggagagaaactctacaaatgtgaagaatgtggcaaagcttttaatcgatcttcaaatcttactatacataagtttattcatactggagagaaaccttacaagtgtgaagaatgtggcaaagcatttaactggtcctcaagccttactaaacataaaagatttcatactagagagaaacccttcaaatgtaaagaatgtggcaaagcatttatatggtcttcaaccctaactagacataagaggatacacactggagagaagccctacaaatgtgaagaatgtggcaaagcttttaggcaatcctcaacccttactaaacataagataattcatactggagagaaaccctacaaatttgaagaatgtggcaaagcttttagacaatccttaacccttaataaacataagataattcatagtagagagaaaccctacaaatgtaaagaatgtggcaaagcttttaagcaattctcaacccttactacacataaaataattcatgctggaaagaaactctacaaatgtgaagaatgtggcaaagcttttaatcattcctcaagtctttctacacataagataattcatactggagagaagtcttacaagtgtgaagaatgtggcaaagcatttctatggtcctcaaccctaagaagacataagaggatacacactggagagaaaccctacaaatgtgaagaatgtggcaaagcttttagccattcttcagcccttgctaaacataagagaattcatactggagagaaaccctacaaatgtaaagaatgtggcaaagcttttagcaattcctcaacccttgctaatcataagataactcatactgaagagaaaccctacaaatgtaaagaatgtgacaaaacttttaagcgactctcaacccttactaaacataaaataatacatgctggagagaaactctacaaatgtgaagaatgtggcaaagcttttaatcgatcttcaaatcttactatacataagtttattcatactggagagaaaccttacaagtgtgaagaatgtggcaaagcatttaactggtcctcaagccttactaaacataaaagaattcatactagagagaaacccttcaaatgtaaagaatgtggcaaagcatttatatggtcttcaaccctaactagacataagaggatacacactggagagaagccctacaaatgtgaagaatgtggcaaagcttttagccgttcctcaacccttactaagcataagacaattcatactggagagaaaccctacaaatgtaaagaatgtggcaaagcttttaagcactcctcagcccttgctaaacataaaataatacatgctggagagaaactctacaaatgtgaggaatgtggcaaagcttttaatcaatcttcaaatcttacgacacataagataattcatactaaagagaaaccttccaagagtgaagaatgtgacaaagcatttatctggtcctcaacccttactgaacataagagaattcataccagagagaaaacctacaaatgtgaagaatgtggcaaagcatttagccagccttcacaccttactacacataagaggatgcacactggagagaaaccctacaaatgtgaagaatgtggcaaagcttttagccaatcctcaacccttactacacataagataattcatactggagagaaaccctacaaatgtgaagaatgtggcaaagcttttaggaaatcttcaactcttactgaacataagataattcatactggagagaaaccctacaaatgtgaagaatgtggcaaagcatttagccaatcctcaaccctaactagacatacgaggatgcacactggagagaaaccatacaaatgtgaagaatgtggcaaagcttttaatcgatcctcaaagcttactacacataagataattcatactggagagaaaccttacaagtgtgaagaatgtggcaaagcatttatatcatcctcaaccctaaatggacataagagaattcatactagagagaaaccctacaaatgtgaagaatgtggcaaagcatttagccaatcttcaaccctaactagacataagaggttgcacaccggagagaaaccctacaaatgtggagaatgtggcaaagcctttaaagagtcctcagctcttactaaacataagataattcacactggagagaaaccctacaaatgtgaaaaatgtggcaaagcctttaaccagtcttcaatccttactaaccataagaaaattcatactatcacacctgtaatcccactactttgggaggccgaggcgggcggatcacgaggtcaggagatggagaccatcctggctaacacagtgaaaccccttctctactaaaaaatacaaaaaattagccgggcgtggtggcgggcgcctgtagtcccagctatgcgagaggctgaggcaggagaatggcgtgaacccgggaggcggagcttgcagtgagccgagatcacgccactgcactcaagcctgggcgacagagcgagactccgtctcaaaaaaaaaaaaaagaaaattcatactagagagaaaccctacaaatataaagaatgtggcaaatcttttaaccggtcttcaacctttactaaacataaggtaattcatactggagtaaaactctacaaatgtgaagaatgtggcaaatcctttttctggtcctcagccctaaccagacataagaaaattcatactggacagcaaccctacaaacaggaaaaatttggcaaagcctttaaccagttttcacaccttactacagataagataactcatattggagagaaatcttacaagtgtgaataatgtggtaaagtctataaaaagtcctgaattcttaacagacataatattattcatactggagagaaactctacaaacctgaaagatgtgccaacgcttttgacaagtcaaacttttctaaacatcaagaaaatcatgctgctgagaaatcctagaaatgtgaagaatgtgacaaagcctctaaatgattgtcacacttgatcgtaggtaagataattcatactggagaaaactaccagtgtgaacaatgtggccaagctttgaactaatgctcacaccttaatgcataggaaagcatttatgcttgagaaaaagtgaacaaatatagacaaaaagccattaatacctgctcacatcgtactcaaattcagagcgttcatactaaataagaagtgtaattactgtcaaacgactgatcagaaaatatgtctttaaagtacagaagagtattttgaaaaagcattacaaatatgaagaggcattatttatgaccttttctatggaaaggtaaggacattaaaaatgtaagatgcatgatgaaaatttaagtagagaggatctttatggttaacttataatatcgagtgatgcatgaggtagatgttcagattaatattctgcattattatgaaagaaaaacattcttaattttagttaaagtttagtatgatttattgtatttttatgaaatatatgtagcatatttttaaattataaattgcatgtgaacttttcaaccaaacagttttaacatgttaaatactatcatgaattcaatgaagtgttattatgccagtaactttaacctattccaccttactcaagggtgtaggtaaaagatggtaaaaatacactatttggtaagataatggactgacatctctagtgattttttttgccagtgagttttaattgccattaagttaaagaatattgttcccataggctaaatttttatttttattttctcatttaaatgtatttgacttaatttttgtggatacctaatatgtgtacatattatgccatatgtggcatattttgatacggacacacaatatataacaatcgcattagactaaatgcggtctccattacctctagcatttattctttgtattacaaataattcaattctacagttttagttatttttaaatgtacaattaaattgttgttgactacaggattatttttatggtcataataaaacttatatacaaacataagtaaaatccataaaaaaaa

SEQ ID NO: 1521 - DNA, 592 bp, HOMO SAPIENS
catgaagtcctgggggcgccatgggaggagatcccaggtggctcctaatgagccctgcatttccatttgcctgctctagattcccctaaggctactgtgaggctgggggtgggggaacagcaggtataagaggttggggtggctgtaggagggtaggtggcagcatggattctaggcaggctgctgcactgctggtgctgctgctgttaatagacgggggctgtgctgaagggccaggaggccagcaggaagaccagctctccgcggaggaagacagcgaacccctcccaccacaggatgcccagacctctgggtcactgttgcactacctgctccaggcaatggagagacctggccggagccaagccttcctgtttcagccccagaggtttggcagaaatacccagggatcctggaggaatgaatggctgagtccccgggctggagaggggctgaattcccagttctggagcctggctgcccctcaacgctttgggaagaagtgacatgtcatcccttgatatgtctgcatgcaaggtccacacccaaaagtgtcaatgtttgccccccaaataaaattgtctggcttctg

SEQ ID NO: 1522 - DNA, 1439 bp, HOMO SAPIENS
cctgctctaaatcttgtctcggtctctcactctgccttatacccctcagttgaattatttcttctgaggaggcaagaactgaggctgctgcagactgatatggattcaccactgctaacacctcctggttggaactacaggaatagaactggaaagggaaaaaaggcagcattcaccacatcccaatcctgaatccaagagtctaagatagtcccccactcctatctcaggcttagaggattagattaatctcctggagggaagactcttccttgaaacatttttttttatctgcctgtagctattgggataattcgggaaatccacagggacagttcaagtcatctttgtcctctactttctgttgcactctcagccttgttctctttttagaaactgcatggtaactattatatagctaaagaagagcattctgacctctgccctctgccctgggacttcctggatcctcctcttcttataaatacaagggcagagctggtatcccggggagccaggaagcagtgagcccaggagtcctcggccagccctgcctgcccaccaggaggatgaaggtctccgtggctgccctctcctgcctcatgcttgttgctgtccttggatcccaggcccagttcataaatgatgcagagacagagttaatgatgtcaaagcttccactggaaaatccagtagttctgaacagctttcactttgctgctgactgctgcacctcctacatctcacaaagcatcccgtgttcactcatgaaaagttattttgaaacgagcagcgagtgctccaagccaggtgtcatattcctcaccaagaaggggcggcaagtctgtgccaaacccagtggtccgggagttcaggattgcatgaaaaagctgaagccctactcaatataataataaagagacaaaagaggccagccacccacctccaacacctcctgagcctctgaagctcccaccaggccagctctcctcccacaacagcttcccacagcatgaagatctccgtggctgccattcccttcttcctcctcatcaccatcgccctagggaccaagactgaatcctcctcacggggaccttaccacccctcagagtgctgcttcacctacactacctacaagatcccgcgtcagcggattatggattactatgagaccaacagccagtgctccaagcccggaattgtcttcatcaccaaaaggggccattccgtctgtaccaaccccagtgacaagtgggtccaggactatatcaaggacatgaaggagaactgagtgacccagaaggggtggcgaaggcacagctcagagacataaagagaagatgccaaggccccctcctccacccaccgctaactctcagccccagtcaccctcttggagcttccctgctttgaattaaagaccactcatgctcttc

SEQ ID NO: 1523 - DNA, 3080 bp, HOMO SAPIENS
aatgaagggtggcacccaaatccccaatcaatgcctgttcaatcaacaaacatctaacaggacattatgtggtaggcatattgccaggccgtggagatgcgaatataaataggaaccggcccctcatctgcaggcgctcacaacctagttaggaaacagtaaaacaattaagcgcgccgtggagataggcccacttgtcctgggaaatgaggggaagctggggtttgcagtggtttgattgaagggggactacatgttagaggcacagactgggtgcaggtacacccaaaggaacgagaagagtggaaggaaacaacatccacaaagtaaccacatgctggcgtatcgaaggccgtgatttacggttttgagactttacctcgccagcaaaggggggccagtctgttagcggtgcagattggaggggtgacattggaagctgtccaggaaaaagaaaatggaactggggagcagaaggcctacgcaagagggcgggacagacaggacttgtgactagtagctctggactgaggaatcctccctgctttctggtgcgggagagctagtggatgatggtgccaataacctggatggggaaagtaagctccctcctggaatgcttcattcacaacctccattttcagcaacatcccatctactggtgcttcctggtcgagatacaagtttcctgaaactgctgctctgttttgggcctcacccggccaacagctcactagctggcaagcagtagtatcaagatggcggccccctaggactggctagtcatgtgacctcgggtttcccaagtttgaagcccggcagtcctttcgggggcaaggttcacctgtcacgaaacgagtgtcaccccttcgactctcgcaagccaatcggcatctgagactgggccactgcggtgaggcgatcggaagattggtcctttccagtcgcctagctagggccaatcacggagcgtcccatacttcgcgggcccgcccgtaggccggggagaagcaggaatatcgtcacagcgtggcggtattattacctaaggactcgataggaggtgggacgcgtgttgattgacaggcagatttcccctaccgggatttgagaatttggcgcagtgccccgccttagaggtggggccttatttgattgccaagtaatattccccaatggagtactagctcatggtgacgggcaggcagcttgactaatgagtcctcggcgtggccggcgcagctctccaatcgccgggcggcgggccccagtctgagcggcgatggcggcggcggcggcggcggcagcagcagcgggggctgcgggcggtcggggctccgggccggggcggcggcgccatcttgtgcccggggccggtggggaggccggggagggggccccggggggcgcaggggactacgggaacggcctggagtctgaggaactggagcctgaggagctgctgctggagcccgagccggagcccgagcccgaagaggagccgccccggccccgcgcccccccgggagctccgggccctgggcctggttcgggagcccccggcagccaagaggaggaggaggagccgggactggtcgagggtgacccgggggacggcgccattgaggacccggagctggaagctatcaaagctcgagtcagggagatggaggaagaagctgagaagctaaaggagctacagaacgaggtagagaagcagatgaatatgagtccacctccaggcaatgctggcccggtgatcatgtccattgaggagaagatggaggctgatgcccgttccatctatgttggcaatgtggactatggtgcaacagcagaagagctggaagctcactttcatggctgtggttcagtcaaccgtgttaccatactgtgtgacaaatttagtggccatcccaaagggtttgcgtatatagagttctcagacaaagagtcagtgaggacttccttggccttagatgagtccctatttagaggaaggcaaatcaaggtgatcccaaaacgaaccaacagaccaggcatcagcacaacagaccggggttttccacgagcccgctaccgcgcccggaccaccaactacaacagctcccgctctcgattctacagtggttttaacagcaggccccggggtcgcgtctacaggggccgggctagagcgacatcatggtattccccttactaaaaaaagtgtgtattaggaggagagagaggaaaaaaagaggaaagaaggaaaaaaaaaagaattaaaaaaaaaaaaaagaaaaacagaagatgaccttgatggaaaaaaaatattttttaaaaaaaagatatactgtggaaggggggagaatcccataactaactgctgaggagggacctgctttggggagtaggggaaggcccagggagtggggcagggggctgcttattcactctggggattcgccatggacacgtctcaactgcgcaagctgctgcccatgtttccctgccccacttcacccccttgggggctgctcaagggtaggtgggcgtgggtggtaggaggtttttttttttacccagggctctggaaggacaccaaactgttctgcttgttaccttccctccgtcttctcctcgcctttcacagtcccctcctgcctgctcctgtccagccaggtctaccacccaccccacccctcttctccggctccctgcccctccagattgcctggtgatctattttgtttccttttgtgtttctttttctgttttgagtgtctttctttgcaggtttctgtagccggaagatctccgttccgctcccagcggctccagtgtaaattccccttccccctggggaaatgcactaccttgttttggggggtttaggggtgtttttgtttttcagttgttttgtttttttgttttttttttttttcctttgccttttttcccttttatttggagggaatgggaggaagtgggaacagggaggtgggaggtggattttgtttatttttttagctcatttccaggggtgggaatttttttttaatatgtgtcatgaataaagttgtttttgaaaataaaaa

SEQ ID NO: 1524 - DNA, 276 bp, HOMO SAPIENS
gatcacacaggtgctggagtctcccagacccccagtaacaaggtcacagagaagggaaaagatgtagagctcaggtgtgatccaatttcaggtcatactgccctttactggtaccgacaaagcctggggcagggcccagagtttctaatttacttccaaggcacgggtgcggcagatgactcagggctgcccaaagatcggttctttgcagtcaggcctgagggatccgtctctactctgaagatccagcgcacagagcagggggactcagccgtg

SEQ ID NO: 1525 - DNA, 237 bp, HOMO SAPIENS
agggcattaatccccttcatgagggatattctctcatgacttaatcacctgccaaagaccccacctcttaatactacatcagtgatgggttcaatgtatcaattgggtgggagggggcacattcagaccatagcatctagtcattctggttttattaagatttattagacctgaggcatgaaaaatagcatactggatgggacttcagcatcgatgagttgccttagtaatactgtt

SEQ ID NO: 1526 - DNA, 1522 bp, HOMO SAPIENS
agcggcagagcggagcggagctgtgaggcgccagtgcggagcgggcgggcgggcgggcggcgtgaggcggagcgcgggcggccggcgaaactccaagggcggaccgcggcagggagcgatcggcctcgggctgcgggagccggagaccgcggcggcggcggctgctgcagctgcaggaggagcccagggaacaccgcccctgcctgtgctctgcctcgggccatcgctcctccccagggcccagtgcggactcgcctccgtgaagtgtcacaccatgtctgaccggaaggcagtgatcaagaacgcagacatgtctgaggacatgcaacaggatgccgttgactgcgccacgcaggccatggagaagtacaatatagagaaggacattgctgcctatatcaagaaggaatttgacaagaaatataaccctacctggcattgtatcgtgggccgaaattttggcagctacgtcacacacgagacaaagcacttcatctatttttacttgggtcaagttgcaatcctcctcttcaagtcaggctaggtggccatggtgaaggtgtcagtggcggcggcagcgatggcaagcaggcggcgttgctgggactgttttgcactggagccagcatcaggatgtcctctccaatggctgtgctactgcatggactgtatactcgatttcatgtgtatgtcgcagtaaacaaaaccaaacctctttctgtttagttgcctgggggaagaaggctgctttatgtttatttttcaagactttaaaaatattttttggttgtattgcactaggaaatctctcccacctctcccttttctctttctttccctatacaaaataaaaggcccaccatagagactaggcggccgaaagactaggagggctgaggaaaagaaataggtctctggaggtggaactaaaactgtgcagctgcctcttcctggcggtggatgctgctttgggagggccagggaggctgcagggggacagtgttgggattgtcaaggaaaaaggggtaggaaggaaggtggagggattgatctagtaccagggagaatattccactgaactgtgattctatggcttggggcggagggtggggtggggatgccttctttaggggccctgagatgtgtttgtctgtggtgtgtgggagtggggagcagatttgtcttgctgtctttgtcagaatttctaagtaagggctgtgtctttgtggattaccttcttttgttcttcctgccagagatcatgacaggaggatgctggggtaggattagcttgaatcttttttttctttacatttttctcctgtctgctccctgcttagccctcagtttcctcattcctctggagttctcttagagcagcccctgttgttagttggctggcaagggaatttctggtgactgtagttccttagttaggtcttagcaatcaaaccaaattgatgtctcccttgactcttctgtgtatatgtgtgaatatgtgtgtatatgtgtgtgtatgtgt

SEQ ID NO: 1527 - DNA, 6095 bp, HOMO SAPIENS
gtattaatctctggagaagacacatccacagttagcactttcttcagatgctgacgctcggtgaacagttgcctttggtcacaagatttagaagacacagtgtccatcctcccagattggatctctttttcatatggatcttctgtttctatgtctttttaaaaaataactttttgggaaaccttttggattacaactgttcatcctcacctatgcaaagaaagggaagctattgctgggattttgaggagcttttcctaaaaggattgtacaccttagaagtgcttaaggaagagtgatgaagataggcatgaagccttcgtctcacagctgcatgcgtagtcactgttgaagcaaatgcctacctaatttgacactcttggtgtgtttaaaaaatttttttgagtttgcaaataagcatattaagtctactgatggagccttcgggcagtgaacagttatttgaggaccctgatcctggaggcaaatcccaagatgcagaggccagaaagcagacagaatcagaacaaaaattgtctaaaatgacccacaatgctttggagaacattaacgtgattggccaaggcttgaagcatctcttccagcaccagcgcaggaggtcatcagtgtctccacatgatgtgcagcaaattcaggcagatccagaacctgaaatggatctggaaagccagaacgcatgtgctgagattgatggtgtccccacccaccccacagctctgaatcgtgtcctgcagcagattcgagtgccacccaagatgaagagagggacaagcttgcatagtaggcggggcaagccagaggccccaaagggaagtccccaaatcaacaggaagtctggtcaggagatgacagctgttatgcagtcaggccgacccaggtcttcatccacaactgatgcacctaccagctctgctatgatggaaatagcttgtgctgctgctgctgctgctgctgcatgtctaccaggagaggagggaactgcggagcggatcgaacggttggaagtaagcagccttgcccaaacatccagtgcagtggcctccagtaccgatggcagcatccacacagactctgtggatggaacaccagaccctcagcgcacaaaggctgccattgctcacctgcagcagaagatcctgaagctcacagaacaaatcaagattgcacaaacagcccgggacgacaacgttgctgaatacttgaagcttgccaacagtgcagacaaacagcaggctgcccgcatcaagcaagtctttgagaagaagaaccagaaatctgcccaaactatcctccagctgcaaaagaaacttgagcactaccacaggaagctcagagaggtagagcagaatgggatcccccggcagccaaaggatgtcttcagggacatgcaccagggtctgaaggatgtaggagcaaaggtgactggcttcagtgaaggtgtggtggatagtgtcaaaggtgggttttccagcttctcccaggccacccattcagcagcaggcgctgtagtctcaaagcccagagagattgcctcactcattcggaacaaatttggcagtgcagacaacatccccaacctgaaggactctttagaggaagggcaagtggatgatgcggggaaggctttgggagtgatttcaaactttcagtctagcccaaaatatggtagtgaagaagattgttctagtgccacttcaggctcagtgggagccaacagcaccacagggggcatcgctgtaggagcatccagctccaaaacaaacaccctggacatgcagagctcaggatttgatgcactactacatgagatccaggagatccgggaaacccaggccagactagaggaatcctttgagactctcaaggaacattatcagagggactattccttaataatgcagaccttacaggaggagcgatatagatgtgaacgattggaagaacagctaaatgacctaacagagctccaccagaatgaaatcttgaacttgaagcaggaactggcaagcatggaagaaaaaatcgcgtatcagtcctatgaacgggcccgggacatccaggaggccctggaggcatgccagacgcgcatctccaagatggagctgcagcagcagcagcagcaggtggtgcagctagaagggctggagaatgccactgcccggaaccttctgggcaaactcatcaacatcctcctggctgtcatggcagtccttttggtctttgtctccactgtagccaactgtgtggtccccctcatgaagactcgcaacaggacgttcagcactttattccttgtggtttttattgcctttctctggaagcactgggacgccctcttcagctatgtggaacggttcttttcatcccctagatgatgctggcacagaaggcattgttccctaccctctggcgagtgcatgcagcagagagttagacagcaacttacctactctgaagttttctacaacaaaaaaagagttgagtgaatctgtttacatttagaataatgtttttttcttcaagagacgcaattgcaatagtattttttagattttatccaagaagttttttgggcgaaaatcttggatcatttttatgtagcatgattttccttgggatgcaaatcttaaaacagtcctttaatatgaaccaacaatctggagcacaccgaagggcaatctaaattgtggcttgaaggactgcactaaaacccactaaaaagatgcgaaaacctgatgagggcaaaccagttaaacctaacaccctgccttgtctgggctcatcacctctccctatcccagactaactttactgtgaaatcctaccacattccatgtctgaatttttggattcggggtggattttcgttgtccgtggaagaacacatggatctctctggctttctcacccaagttggccacttacgctaatcctggaagtatgatcacttttgaacctgccccttaaccttgacgaggatacaaaagtgaaagcatcatcccccaaaggatcactgcacagtcctactacagtatttttaagtagccctctaaatacttaattttaagcaaaatcccttggccgcacttttaaggtttttttatatgtgtatagttaccaacctaaaaataaaaaatccgaacagcatacttgaagaatgtaatactcaaactctcagtgcttccttatggtttctaataggattttttattattgttattattattattgggtttttttggacagggttgggagggtcttttatttttcctttgaaataaagaagtgatgtttttaaatgaagaaatgtgtggatatttaagtgtgctgctccctcttgtcttgaaacagtttgagtaagaaagtcttgctgtaaatgctgccctctgccgcctttgttttgagatgcagtttaaactccctctggctgctgctgctgctttttggtgtcccgacatacctacgcccccgttttatgggtttggcttagttgaagaggaaagggttgtgcaaggagagcaggaggctgtttccaaaaaccagtgtagtaggatagggattttttttttttttttttgccccaagaaaacgttcacccagtgatcttgggctggggttgtctttaggaaaagttgagactataagagtcataaataagtccttgtgtttccttaatttattttgttaacacccctaattacaaccaaagtgatgatgtggagtcttctgtcttcattttggccccagcattcttaatttcaaagctttattctgtctgcctaagagaatcaaccaaaggtgattctcctaaagagcagtgaaggaaatgtcaggttagcaggacccaagttttgggtgtgaaatgttgccagcttcctataatgtaaacggacttgttaacctaacctaattatgctcagtggacttctatagatggttttgaaaaatgaactgagctgccttcccccgtcgcataaccagttccatcatcctggtggaacttgaacatttagagtttatctagagagcttggttaatctttccatattatttgtagtattggtcacaaatgctgttccctcttagcctcattctgtgcaaccaagtgcatataagatgccctgaaaagagtaacaaagtatgctttgcctgtttccacttaccaggaaattccttcagaactagattagcattgccctgcctgtctgaaaggacagtttacctaatggtgccagcctccttttgctttggcaagctggatttctcagagccagcatgttgtttccataactactttgatattttaactcaggtactccagtcttcaccccaacctcagctgattgtagtacacctgctagctctgttgccccctcaaaactgcacccagagcagggccacaagggtgctttttttctttaaaaaaaaaaaaattagaaccaattcatgttcatgccaaaaacaaattgtccccaagcctatatgtattaaaatgttaactttgcctaaaaatattgcagtgactttttaggcaggagtgccaaaggacactatgaactttttgaactgacagtttctcctaactttctgctttagcgtaattgctcagagtagagagcccccacaaagttatttaaaagatgccctagcagcaatccaccagtttttctaagctagaacctttgagtcccccaaactgcctgaagacttaagttttgtgggcactggaagtcactttgatagatggattgaaactgttcctatttgccctgggacggtttctatctatcaaaggaaggttttcacctgtagaaagccccctgcctccagccaaatagtcccatgctgactttctatcttcctttctcaaactgtcttaggaaggaccttcagtgcagatcaggtgcagtaatggctttcttgtcccttaattattcaccagacccagaagttgtacgcatttaatgctgtttgtaaccatgcatctgttttcattctttgctgtaccttttgctgcccatcctgttacttttgagtttctttcattgtggttgttcttgggttcttttgtcttgtcagagctcttctataacctcgctctaatggcttaacagttgttctgggtggaaacgtcccctcatttgaatgctcctctaaaaaaaaaagaaaagaaaactgtattcattccctttaaaatgaaacattcctggtttatttgtccatgcctctagcctgggtgagtgaagctggctgtgttggcctgggtgattgttcaggttgtagaatgcgcattttacattgtttatgataattgaagggtacttctgtctgctccaatttccattccttggtatactcagtatgtcctagtaaggaaggctttccactctactggctccttaagaagcaaaagtaggttaaattttatacttcactgactagggtcttctctctcccctgttctgaatggagtaaaagtctgatgccaagacaaatattgggagcgagccttcctcactagccatgtccaaataatgagcgtattttcatgtggtcttcactgcatttggttttgtttctgatttcatgttcctttgaggtacagtcagatgaaaatgctgagttctgagagagttccaatgaggagctgcctttcagctttggaaaatatgcaactaaaacaaaaccaaacattattgtaatctgacacaggcaaaattatggttcccacaccccaaccccaaatgaaacctgggattttgaatgtggctctaagagttaacattgctgtctgtatgtcgtgtatgctaggtgatatcctcagtagggattgactactagactgtgtgttttatcaaagtgtgtaagaataaaaactcacttgcacgaattgaaacgtaaagaaatgacacttgtgaacgtgtgaacgttaacactgtagttgatagatcttaagctgctaattgttgagagagatttaaatttatgttctgtctggtcgctgcagattctcagcagcacttttactgtatatagaaattgaaataaagacctcagctattaaaaaaaaaaaa

SEQ ID NO: 1528 - DNA, 4353 bp, HOMO SAPIENS; identical to SEQ ID NO: 931

SEQ ID NO: 1529 - DNA, 2537 bp, HOMO SAPIENS
cccagaaggccgcggggggtggaccgcctaagagggcgtgcgctcccgacatgccccgcggcgcgccattaaccgccagatttgaatcgcgggacccgttggcagaggtggcggcggcggcatgggtgccccgacgttgccccctgcctggcagccctttctcaaggaccaccgcatctctacattcaagaactggcccttcttggagggctgcgcctgcaccccggagcggatggccgaggctggcttcatccactgccccactgagaacgagccagacttggcccagtgtttcttctgcttcaaggagctggaaggctgggagccagatgacgaccccatgcaaaggaaaccaacaataagaagaaagaatttgaggaaactgcggagaaagtgcgccgtgccatcgagcagctggctgccatggattgaggcctctggccggagctgcctggtcccagagtggctgcaccacttccagggtttattccctggtgccaccagccttcctgtgggccccttagcaatgtcttaggaaaggagatcaacattttcaaattagatgtttcaactgtgctcttgttttgtcttgaaagtggcaccagaggtgcttctgcctgtgcagcgggtgctgctggtaacagtggctgcttctctctctctctctcttttttgggggctcatttttgctgttttgattcccgggcttaccaggtgagaagtgagggaggaagaaggcagtgtcccttttgctagagctgacagctttgttcgcgtgggcagagccttccacagtgaatgtgtctggacctcatgttgttgaggctgtcacagtcctgagtgtggacttggcaggtgcctgttgaatctgagctgcaggttccttatctgtcacacctgtgcctcctcagaggacagtttttttgttgttgtgtttttttgtttttttttttttggtagatgcatgacttgtgtgtgatgagagaatggagacagagtccctggctcctctactgtttaacaacatggctttcttattttgtttgaattgttaattcacagaatagcacaaactacaattaaaactaagcacaaagccattctaagtcattggggaaacggggtgaacttcaggtggatgaggagacagaatagagtgataggaagcgtctggcagatactccttttgccactgctgtgtgattagacaggcccagtgagccgcggggcacatgctggccgctcctccctcagaaaaaggcagtggcctaaatcctttttaaatgacttggctcgatgctgtgggggactggctgggctgctgcaggccgtgtgtctgtcagcccaaccttcacatctgtcacgttctccacacgggggagagacgcagtccgcccaggtccccgctttctttggaggcagcagctcccgcagggctgaagtctggcgtaagatgatggatttgattcgccctcctccctgtcatagagctgcagggtggattgttacagcttcgctggaaacctctggaggtcatctcggctgttcctgagaaataaaaagcctgtcatttcaaacactgctgtggaccctactgggtttttaaaatattgtcagtttttcatcgtcgtccctagcctgccaacagccatctgcccagacagccgcagtgaggatgagcgtcctggcagagacgcagttgtctctgggcgcttgccagagccacgaaccccagacctgtttgtatcatccgggctccttccgggcagaaacaactgaaaatgcacttcagacccacttatttctgccacatctgagtcggcctgagatagacttttccctctaaactgggagaatatcacagtggtttttgttagcagaaaatgcactccagcctctgtactcatctaagctgcttatttttgatatttgtgtcagtctgtaaatggatacttcactttaataactgttgcttagtaattggctttgtagagaagctggaaaaaaatggttttgtcttcaactcctttgcatgccaggcggtgatgtggatctcggcttctgtgagcctgtgctgtgggcagggctgagctggagccgcccctctcagcccgcctgccacggcctttccttaaaggccatccttaaaaccagaccctcatggctaccagcacctgaaagcttcctcgacatctgttaataaagccgtaggcccttgtctaagtgcaaccgcctagactttctttcagatacatgtccacatgtccatttttcaggttctctaagttggagtggagtctgggaagggttgtgaatgaggcttctgggctatgggtgaggttccaatggcaggttagagcccctcgggccaactgccatcctggaaagtagagacagcagtgcccgctgcccagaagagaccagcaagccaaactggagcccccattgcaggctgtcgccatgtggaaagagtaactcacaattgccaataaagtctcatgtggttttatctaaaaaaaaaaaaaaaaaaaaaaaaa

SEQ ID NO: 1530 - DNA, 1440 bp, HOMO SAPIENS
cagtcacatttcagccactgctctgagaatttgtgagcagcccctaacaggctgttacttcactacaactgacgatatgatcatcttaatttacttatttctcttgctatgggaagacactcaaggatggggattcaaggatggaatttttcataactccatatggcttgaacgagcagccggtgtgtaccacagagaagcacggtctggcaaatacaagctcacctacgcagaagctaaggcggtgtgtgaatttgaaggcggccatctcgcaacttacaagcagctagaggcagccagaaaaattggatttcatgtctgtgctgctggatggatggctaagggcagagttggataccccattgtgaagccagggcccaactgtggatttggaaaaactggcattattgattatggaatccgtctcaataggagtgaaagatgggatgcctattgctacaacccacacgcaaaggagtgtggtggcgtctttacagatccaaagcaaatttttaaatctccaggcttcccaaatgagtacgaagataaccaaatctgctactggcacattagactcaagtatggtcagcgtattcacctgagttttttagattttgaccttgaagatgacccaggttgcttggctgattatgttgaaatatatgacagttacgatgatgtccatggctttgtgggaagatactgtggagatgagcttccagatgacatcatcagtacaggaaatgtcatgaccttgaagtttctaagtgatgcttcagtgacagctggaggtttccaaatcaaatatgttgcaatggatcctgtatccaaatccagtcaaggaaaaaatacaagtactacttctactggaaataaaaactttttagctggaagatttagccacttataaaaaaaaaaaaaaggatgatcaaaacacacagtgtttatgttggaatcttttggaactcctttgatctcactgttattattaacatttatttattatttttctaaatgtgaaagcaatacataatttagggaaaattggaaaatataggaaactttaaacgagaaaatgaaacctctcataatcccactgcatagaaataacaagcgttaacattttcatatttttttctttcagtcatttttctatttgtggtatatgtatatatgtacctatatgtatttgcatttgaaattttggaatcctgctctatgtacagttttgtattatactttttaaatcttgaactttataaacattttctgaaatcattgattattctacaaaaacatgattttaaacagctgtaaaatattctatgatatgaatgttttatgcattatttaagcctgtctctattgttggaatttcaggtcattttcataaatattgttgcaataaatatccttgaacacaaaaaaaaaaaaaaaaaa

SEQ ID NO: 1531 - DNA, 4228 bp, HOMO SAPIENS
tggagcggcggctgcgcttcggcttcgagcccagctctcctggccccaacgcgggcttagcctcccgccttggctcgggcaggcgcccgtcgacccttcggcccctttcgcccgccctggagctgggggcagggtgccagtggaagcgtggggcttggctctgtgattcattcattctccgccgacgggagcctcagacccgctgtgctctgaagagaggagggaagagggggcagccgcgaatgaagggccgggcaccagccgggctccattgtgctcggcggcggggggcgggaaggggctgagggaggtgggatcgggtcccctcctccagctctccggcgtgcgctgcgcccccagcctgctgccagcctggaaatggctccgtttattctcttcgggagaatgaatcgatcctgcctagccttctcttcgtcctccccacctcttctctgctccgagtcttaggaggagaaacatttaaaaagacagattccaatgtggagtgccgtgcaggttgcgagctgccgggtttgcacttcgaggagattttcctgtgtagtttttttcctaatgtgagcgcagggaagccgtggcattactgcttttgggatttttattcacgtgcacgtcgcgtttggttgctcgctccacccccggagacctggtgtggtggagaaatttgaacccgcagccttagctccgaaaaggccgagttacctggctctccctgagtgtcgaggaggacatgagtgaaatgaccagcgaactcattttttataggactcggtgaagccggattctgcatttccctacttgtagactcattttgtggaatagagttgatcgctgtctcctccgcaaagcattttaactcgaataagcaaatgccgcctctgtttgaacgttttggtatttacaagagagaaatcattttacctaagagaactaattgaattggcagcatccttgaaatacctccggacaaggatctgggggtgggggtggaaaagcaactgcgaaatagcagacggagaaattcctttggaagttattccgtagcataagagctgaaacttcagagcaagttttcattgggcaaaatgggggaacaacctatcttcagcactcgagctcatgtcttccaaattgacccaaacacaaagaagaactgggtacccaccagcaagcatgcagttactgtgtcttatttctatgacagcacaagaaatgtgtataggataatcagtttagatggctcaaaggcaataataaatagtaccatcaccccaaacatgacatttactaaaacatctcagaagtttggccagtgggctgatagccgggcaaacaccgtttatggattgggattctcctctgagcatcatctttcgaaatttgcagaaaagtttcaggaatttaaagaagctgctcgactagcaaaggaaaaatcacaagagaagatggaacttaccagtacaccttcacaggaatccgcaggcggggatcttcagtctcctttaacaccggaaagtatcaacgggacagatgatgaaagaacacctgatgtgacacagaactcagagccaagggctgaaccaactcagaatgcattgccattttcacatagttcagcaatcagcaaacattgggaggctgaactggctaccctcaaaggaaataatgccaaactcactgcagccctgctggagtccactgccaatgtgaaacaatggaaacagcaacttgctgcctatcaagaggaagcagaacgtctgcacaagcgggtgactgaacttgaatgtgttagtagccaagcaaatgcagtacatactcataagacagaattaaatcagacaatacaagaactggaagagacactgaaactgaaggaagaggaaatagaaaggttaaaacaagaaattgataatgccagagaactacaagaacagagggattctttgactcagaaactacaggaagtagaaattcggaacaaagacctggagggacaactgtctgacttagagcaacgtctggagaaaagtcagaatgaacaagaagcttttcgcaataacctgaagacactcttagaaattctggatggaaagatatttgaactaacagaattacgagataacttggccaagctactagaatgcagctaaggaaagtgaaatttcagtgccaattaattaaaagatacactgtctctcttcataggactgtttaggctctgcatcaagattgcacaaaaaaaaaaaaaaaaaaattgaatatcactcctccaggaggaggatcttttgaaattggaattgtatatttcactgtaaattttagaatccagcttgtagctagttggggaaaaaagatgaaaaacttgaactacaaattacctccatgtatattattggccatagttaactagaaagttataaatagacacttaatgcaatcttttttcctgatattagccaatgggagaattaacaatgtctaggtcacatcccctttttgtgttcaacacagtgaagattatctgctttttaaattaatttatttacgatatctagagctgtgttttgtgcaaaaacttagtgatgaaagcctgtcttttgttgtaatctgaataatttctcaggatatttttgcactgctgagaagcagtgccattaccaattaattcttgccaggagtgagagagagctgtatctttaattgaaatatactataactgggtgtatagagttcttcccttttttgtgctggaagatatttcactctggtgactactctggtacactctggtgttctctaatcttgtctgttgtatagtttacttttccatattgattccatgtatttatgagaagatattgtctcccattttattacacattttaaagccaactaacgaaggcagctgagtccctcagaaatttttctttttaagtttctaataaatttgacacacagtactgaaatacagcagcccgtcattgacaggctggtctagcaatgttaagtatatttacagaatatgcagttacatttatttatatattttgcaagaaatcttttctgaatgatcaatgcatttcaatttacgaataataatggttattggggaactgtttattatagataattttaaggtgtatagctattttaaagggggtccatttacatcaaacagctgatcagaggactctatctaaattgtgatcgtggcagatagagatggagtcatgtactctatctggctctacacatcaatcacatcttgattcaaacctcacaaggcaatattctgaattgttaactaggtatttcaaaacaggaattaaattcaataggctcttctcagtgaacaggttttaatgttgttttgatgtaattttaaaagacttttagcaaacatgcatttctttatatgatatatttcttttacgaagctattttaaaagtaagccaagtgctgtctagtctgcttataaagtaggaattgcatcagagtacatatattcttgctgtacaatgcctgtgatgttgaggagggttcttttttaaagtgtatgcttgagtaactgactctatggagtctataaatgcactgacttcttgtttgtaccccaaaatgatcgaattgttaagtacaaaattaagctaattaaccaatttgtaaccattttttcactcataaacagctactcaatactagacaattttgttttttatgtatgtgtatgtacgtaaatacatacatattaatttacattagagtgaaaaataaatggtttgtttctgaagttagtttcttaagtgagttttcaggtgtctctgaaaaatttataacaatcatgtattatatgtgctgtaacatcatgtacgttacctccatctattttaggatattttcctcacctatatattatagggagaataatttagatacacatgctcagagctgagatatttctctgataaatcaggtaacaaaatgtatttgattgatggaattttgaagtaaatgtgtttttatccatcagtttctgagtaacaaagagcaccaagttttaatttaaataggagatttaacactagggatcagggagtttagtatgaagagttaaaaaaatttaaaaaacagtgtaagctgttgaaatggcaagtgaattattttaatgatgtaataaaatatttttaaattttgaaaaaaaaaaaaaaa

SEQ ID NO: 1532 - DNA, 518 bp, HOMO SAPIENS
agcgaggatcttacaagcctgctgaaaggctcctggggacatccaggggtcctgagaccacagtttgagaaagctgatttaaccatttttggattggtgggctgttaggttgtttaaaattttacactgttacaacccttgcaacagtgaaagttctttgtgatgttttctggtgtatgcgtgctagtgttttttctgtaagtagaattgctaggtcatagagttttgcttttttttaagtttgttaaacacattacttttgatgcctgtataatttgcttttgtgcactaatgttggtgtttagattgtttcaactaatgatttggtgaaatatctttgcatgtttttagttgttttgaattattttctttttgagggggctggggggagtccagtaaaaaccagacaactgccagatacattttaagagagctttaacacatggattcttttctaaaatttctaaaaagataattgttagatcaaatattaggaatctttctcaggctattggtac

SEQ ID NO: 1533 - DNA, 1365 bp, HOMO SAPIENS
atgcagctcagcctgggctacacagccaggtgtcagatgtgtctctgctgatctgagtctgcctgtggcatggacctgcatcttccctgaagcatctccagggctgaaaaatcactgaccatggcaccatggtctcatccatctgcacagctgcagccagtgggaggagacgccgtgagccctgccctcatggttctgctctgcctcgggctgagtctgggccccaggacccacgtgcaggcagggaacctctccaaagccaccctctgggctgagccaggctctgtgatcagccgggggaactctgtgaccatccggtgtcaggggaccctggaggcccaggaataccgtctggttaaagagggaagcccagaaccctgggacacacagaacccactggagcccaagaacaaggccagattctccatcccatccatgacagagcaccatgcagggagataccgctgttactactacagccctgcaggctggtcagagcccagcgaccccctggagctggtggtgacaggattctacaacaaacccaccctctcagccctgcccagtcctgtggtgacctcaggagagaacgtgaccctccagtgtggctcacggctgagattcgacaggttcattctgactgaggaaggagaccacaagctctcctggaccttggactcacagctgacccccagtgggcagttccaggccctgttccctgtgggccctgtgacccccagccacaggtggatgctcagatgctatggctctcgcaggcatatcctgcaggtatggtcagaacccagtgacctcctggagattccggtctcaggagcagctgataacctcagtccgtcacaaaacaagtctgactctgggactgcctcacaccttcaggattacgcagtagagaatctcatccgcatgggcatggccggcttgatcctggtggtccttgggattctgatatttcaggattggcacagccagagaagcccccaagctgcagctggaaggtgaacagaagagagaacaatgcaccattgaatgctggagccttggaagcgaatctgatggtcctaggaggttcgggaagaccatctgaggcctatgccatctggactgtctgctggcaatttctttttttctttcttttcttttctttcttttttttttttttttttttttttttgagatggagtcttgctctgtcaccaggctggaatgcagtggcgcaatctgggctcactgcaacctccgcctctcgggttcaagtgattctcctgcctcagcctctggcaatttctagagggaggaatgggtgtttgagtgcagagacactggtctggggtgatccatggagga

SEQ ID NO: 1534 - DNA, 531 bp, HOMO SAPIENS
  misc_feature (299)..(299): n is a, c, g, or t
  misc_feature (309)..(309): n is a, c, g, or t
  misc_feature (392)..(392): n is a, c, g, or t
  misc_feature (485)..(486): n is a, c, g, or t
tgcagagggccatgaggtagaggctggggaaatgagggcttggaggtgcttgaggtatggtctttacctacgtgaaatgttggaggttgagatgaaaactcttgctttgaattcttcatggaggactacatcatttcaatcctgaatctggctcaattctattattcacttattactgtattaaaaacgtttaattggccaggcacagtggttcacgcctgtaatcccagcactttgggaggccaaggcaggcggatcacttgaggtcaggagttcgacaccagcctggccaacatggnaaaaccccgnctctactaaaaatacaaaaattagccaggcgtggtggcacgcacctgtaatcacagctacttaggaggctgaggtggcagaantgtttgaacccaggaggtggaggttgcagtgagccgagatcacaccactgcactcaagccttggcatcagagtgagactctgtctcagtaaannaaaaatacataaataaaaatgcttaactaaccatgatatttgctt

SEQ ID NO: 1535 - DNA, 401 bp, HOMO SAPIENS
  misc_feature (79)..(79): n is a, c, g, or t
cattgagcgcaccctgcatagtgatttctcacacagccccccacatgggatatcttgatgctgtcatgcaacaattacnacacatgcctaagacaaatactttgctctagtgaggaaatttgggaagaactcttatcataaggcttccattagcccctttcattttagggagtagaatttgctgttcccacattaggaatcgattccattctctccaagatcttaagagctaccaattggctgtttccaatgcctagttgtagcttaatcctacatcagtatctcccagaacttgttacagcctaacccagcgatgtggaataggttttatctcgcatatgtactctgatagccatagaaacactgaagcttagaagatgccgaggctgtgttcaagggaa

SEQ ID NO: 1536 - DNA, 978 bp, HOMO SAPIENS
tggctctgaccgcgctggcctgggccggagagcccaggaggcgtgtctcagagaaaagatataagcggcccccggacgctaaagcggtgccagcggcggagtctccaactgggagagctgcagctgccgagaggaggagaacgctgaggtcggtcggaccaacggacgcgctgaccgctgccaactgcagctcgcgctgcctcctgctcgcgccgtgccactaaggtcattcccgcctccgagagcccagagccgagatggaaacggtccaggagctgatccccctggccaaggagatgatggcccagaagcgcaaggggaagatggtgaagctgtacgtgctgggcagcgtgctggccctcttcggcgtggtgctcggcctgatggagactgtgtgcagccccttcacggccgccagacgtctgcgggaccaggaggcagccgtggcggagctgcaggccgccctggagcgacaggctctccagaagcaagccctgcaggagaaaggcaagcagcaggacacggtcctcggcggccgggccctgtccaaccggcagcacgcctcctaggaactgtgggagaccagcggagtgggagggagacgcagtagacagagacagaccgagagaggaatggagagacagagggggcgcgcgcacaggagcctgactccgctgggagagtgcaggagcacgtgctgttttttatttggacttaacttcagagaaaccgctgacatctagaactgacctaccacaagcatccaccaaaggagtttgggattgagttttgctgctgtgcagcactgcattgtcatgacatttccaacactgtgtgaattatctaaatgcgtctaccattttgcactagggaggaaggataaatgctttttatgttattattattaattattacaatgaccaccattttgcattttgaaataaaaaaactttttataccataaaaaaaaaaaaaaaa

SEQ ID NO: 1537 - DNA, 1532 bp, HOMO SAPIENS; identical to SEQ ID NO: 1315

SEQ ID NO: 1538 - DNA, 4422 bp, HOMO SAPIENS
gtttgtagtgtaccaggcggaagtgtgccaaaggtatcggtgctgtcgcttccggtccgggtaaacgaaccttaggtacactggtgtgtggcctcccaagataggcttctgagggcaagtcagcgactgaagacgggagcgccagaatctgtggactcaagagtctagaatcaagtggaaaaaccggaaaaaaggccaggaacctgaatacgacctaatagctgtttccgagggggcaacttccacggagagccttctgccctggtaacggccaaagaggaggagatggcgccagtcagggagcggccgtggcccagacagtgaggaagcgcgaaggcggagcaaccgaggaatcctccggagaagaatcagagccgtcgctaccgccactaccgccaccaccatggaaggagcaaagccgacattgcagctcgtgtaccaggcagtgcaggcgctttaccacgacccagatcccagcggaaaggagcgcgcctctttttggcttggggagctgcagcgttcggttcatgcatgggagatctcagaccagttgttacagatccggcaggatgtggagtcatgctattttgctgcacagaccatgaaaatgaagattcagacctcattttatgagctccccacagactctcatgcctctttacgggactcattgctaacccatatccagaacttgaaagacttgtcacctgttattgtaacgcagctggctttagcaatagcagatcttgccctacagatgccttcctggaagggatgtgtgcaaacactggtggaaaaatacagcaatgatgtgacttctttgccttttttgctggagatccttacagtgttacctgaagaagtacatagtcgttccttacgaattggagctaatcggcgcacagaaattatagaagatttggccttctactctagtacagtagtatctctattgatgacctgtgtagaaaaagcaggaacagatgagaaaatgcttatgaaggtttttcgctgtttgggaagttggtttaacttgggagttttggacagtaacttcatggctaacaataaattactagcactcctttttgaggttttgcaacaggataagacctcgtctaacctacatgaagctgcttcggactgtgtatgctcagctctctatgccattgagaatgtggagactaacttgccattagccatgcaactttttcagggagtgctgacattggagactgcctatcatatggccgtggcacgtgaagatttagacaaagttctgaattactgccgtattttcactgaactatgtgaaacttttcttgaaaaaattgtttgtactccaggccaaggtcttggggaccttcgaactctggagctgctgcttatctgtgcaggccatcctcaatatgaggtagtagaaatttcatttaacttttggtaccgactgggggaacatttgtacaaaactaacgatgaagttattcatggcatcttcaaagcttacattcagaggctgcttcacgccttggctcgacactgccagctggaaccagaccatgagggggttcctgaggagactgatgactttggggagtttcgcatgagggtatcagacctggtaaaggacttgattttcttgatagggtctatggagtgttttgctcagttatattctactctgaaagaaggcaacccaccctgggaggtgacagaagcggttctctttatcatggctgctatagcaaagagtgttgatccggaaaacaatccaacacttgtggaagtcctagaaggagttgtccgcctcccggagaccgtacatacggctgtgcgatacaccagcattgaattggttggagagatgagtgaagtcgttgatcgaaatcctcagttccttgaccctgtgttgggctatttgatgaaaggcctgtgtgaaaagcccctggcttctgctgcagccaaagccattcataacatttgctctgtctgccgagatcacatggctcagcactttaatggactcctggagattgcccgctccctcgattccttcctgttgtctccagaagctgctgtgggcttgctaaaagggacagcacttgtcctagcccgattacctttggataagattaccgaatgtcttagtgaactatgttctgttcaggttatggcattgaaaaagctgttgtctcaagagcccagcaatggcatatcctcagatcccacagtgttcttagatcgccttgcagtgatatttaggcataccaatcccattgtggaaaatggacagactcatccgtgtcagaaagtcatacaggaaatatggccagttttatccgagactctaaataagcaccgagctgataatcggattgtagagcgttgttgcaggtgcctgcgctttgctgttcgctgtgtaggcaaaggatctgcagcactgctgcagccactagtcacacagatggtgaatgtgtaccacgtacatcagcattcctgcttcctgtaccttggcagtatccttgtggatgaatatggcatggaagaaggctgtcggcagggactgctagacatgctccaggcactgtgcatccccacctttcagctcctagaacagcagaatggtctccagaatcaccctgacactgtagatgacctgttccggctagccaccaggtttattcagcgtagccctgtcaccttgctgcggagccaagtggtcatccctatcttacagtgggccattgcctctactaccctggaccaccgggatgccaattgtagtgtcatgaggtttctacgagacctcattcatacaggggtagccaatgatcatgaagaagactttgaattacggaaagaactgattggacaggtgatgaaccagcttggacagcagcttgtcagccagctgctgcacacctgctgcttttgcctccccccctataccctaccagatgtggctgaagtgctctgggagatcatgcaggttgacagaccgactttttgtcgatggttagaaaattccttaaaaggtttgccaaaggaaacaaccgtgggagccgtcacagtgacacacaaacaacttacagacttccacaagcaagtcactagtgctgaggaatgtaaacaagtttgctgggccttgcgagacttcaccaggttgtttcgatagctcacactcctgcactgtgcctgtcacccaggaatgtcttttttaattagaagacaggaagaaaacaaaaaccagactgtgtcccacaatcagaaacctccgttgtggcagaggggccttcaccgccaccagggtgtcccgccagacagggagagactccagccttctgaggccatcctgaggagttcctgtttgggggtgtgagggaaaatcagcgcggattttaaaaagatggctgtggcctgcccggcgtggtgggaggggagctggtttcctggtgaactttctaaaaggaaaaataattttaagtaaagaaaaaagaaaaaaaaggaagactaaacagaaaccagaactgaaacattcacctggtagcaaatgacacatgcacgcacacacacatacacgcacaagcgccagtgcgcacgtgtacacagaaaaacaaaaggacaagctttctgtgaaacaaaatatttacttagggataatgtggggattcacatgaattaaatagctgcaattggaagaagagggtcagggtcatttgttcaggttttctattgttttgtcctctctttcctctcctacccttccttctctttctctctcccctccttttaaatgcaaatgagtagaaatttcttctaccttccccagctgtttcttcccacctttagagttgtttagacaaggaggagtaagcaaggaacttgttctgctttctatcgtggtcacattggtgatgctcgggacctgccagggtcagaatttatggatatctgaaccctgaccccgttcattctctcagtccacttccaatccacatcagtttgttgtctgccttggagagaagagccaaaactggggtgggcgggtgggtggggagtgcaggatataaatgtgtaagtttttgttttttaaggtttttttcttagtgaattattcacccacagacatgagagaaaaaaagagggagggtgtgtggagaaaaaatgtttacagggctaacaagggatgatgtgtcatttagtatgttactaaaaagtgtggaaatgacttgattttaaggggagggtgaggccgaagagggaagcccaaagcagatcttaatgtttcaaaggagtgcagcccttcacagccatcagatatgagggcactgttctgtctggtgttgtagccatctcaagaacaaatcaacagcaacaaaagagaaagaataaatttttaaaatttaaccagtaaaaaaaaaa

SEQ ID NO: 1539 - DNA, 4376 bp, HOMO SAPIENS
tgaccttctctcctccctgtgtctttttttttcctttagagatgggggtcttgctctgtcactccagctggagcacagtggtgcaatcggagctcactgactgcggcctgcaactcctgggctcaagtgattctgccgcctcagcctctcaacgtgctgcgattagagagtctgtagaagaggcgacaccagggcttccaaatgaacaaccgaaaggaagatatggaaatcacgtcccactaccggcacctgctgcgggagctcaacgagcagaggcagcacggcgtcctgtgcgacgtctgcgtggtcgtggagggcaaggtcttcaaggcgcacaagaacgtcctgctgggcagcagccgctacttcaagacgctctactgccaggtgcagaagacgtcggagcaggccacggtcacgcacctggacatcgtcacggcccagggcttcaaggccatcatcgacttcatgtactcagcgcacctggcgctcaccagcaggaacgtcatcgaggtgatgtcagccgccagcttcctgcagatgacggacatcgtgcaagcctgccacgacttcatcaaggcggcgctggacatcagcatcaagtcggacgcctcagatgagcttgcggagttcgagatcggcgcctcgtccagcagcagcacggaagctctcatctcggccgtgatggctgggaggagcatctccccgtggctggcacggcgaacgagtcctgccgattcttccggagactcggccatcgccagctgtcacgacggagggagcagctacgggaaagaggatcaggagcccaaggccgatggccctgatgatgtttcttcacagcctctatggcctggagacgtgggctacgggcctctgcgcatcaaggaagagcaggtttcaccgtctcagtacggagggagcgagctgccttctgccaaggacggtgcagtacagaactctttctcagagcagagtgctggtgatgcctggcagcccacgggccgaaggaagaatcggaaaaacaaagagaccgtccggcacatcacacagcaggtggaagatgacagccgggccagctccccggtgccgtccttcctgccgacgtcggggtggccgttcagcagccgagactcaaatgcggacctgtccgtcaccgaagccagcagctccgacagccgaggagagagggccgagctctatgcacaggtggaggagggtctcctgggaggagaagccagctatctgggccctcccctcaccccagagaaggacgacgccctgcatcaggccaccgcggtggccaacctgcgcgcggcgctcatgagtaagaacagcctgctgtcgctgaaggccgacgtgctgggggatgacggctccctgctgttcgagtacctgcccagaggggcccactcgctgtccctgaatgagttcacggtgatcaggaagaagttcaagtgtccgtactgcagcttctcggccatgcaccagtgcatcctcaagcgacacatgcgctcgcacacgggagagcggccctacccctgcgagatctgcgggaagaagttcacgcggcgcgagcacatgaagcgccacacgctggtccacagcaaggacaagaagtatgtgtgcaaggtgtgcagccgcgtcttcatgtccgccgccagcgtgggcatcaggcatggctccaggcgccacggtgtgtgcaccgactgtgctggccgcggcatggccgggcccctggaccatggcggcggaggcggcgagggctctccagaggcgctgttcccaggcgacgggccctatctggaggaccctgaggacccacgaggggaggcggaggagctgggcgaggacgacgagggcctggcccctgaggatgcgctgttggcggacgacaaggatgaggaagactcgccgcggccgcgcagccccccaggaggccctgacaaggacttcgcctggctctcctaggcccgcccgccggcagggtcggtggctgcctcgctccgtccacccgtgtgtgtgtccggtgggtctccactgcggggccagggccacgctcacccctctcgcggcccctcctctgcttccccctgaacccaccccccacggaaaccagccctgcgggctaagcaggtgcgaccccagcaagaggggtgctctgggaccagacatgaagtgagttgggggagggcacagggtgggtttgagtgaagggagagcacggtcctaagtccccagcaggtggtgcgggtgtgtgagtggcccctgtgatggccagcctggcttggacacgtgatgggcctgtggccgggtccagtgggcactgggcggggtggtgtgttcggcccagaggcccctggcctgagcaggtgcagagttttacagacacccggtcagcccggctggagcccgccctcccctcccctagcagccaggtcactgcctgtggctgcagccgtggcccgtggtgcagccgtggcccatggcagcctgtagaatccaggtgcacagagagccctgccaccgtcttacctctgggctttggtgcttaacacacaacacagctgcagaccctgctggaggccgagggctccaggtgctatcttaggtggacacagccctgggggctccttccaggaggggaccctcagccctgtgccccccaccacttcaggccacaccaggttccctctgcaagggcctcggctcagtcgtgtgcacttcctcggagagccttgggctgccacgtccaccccgggctctgcccgtcctgttctgcccatggcccagcccggccgctcctgctgacccctcctggacgggttggagctgggctcctgcctttgctgctaacactggaggcggtgttcctaactgcagtgtgctgcttacacctccccgcgtgggtaaccaaatttttaagtagtcagagacatatcgaggtagttacataaaattattttgtttggcattatttttctcactcgaagaaactatatagggttgtttttcctttagcttgtgctcaagtcctcttgctgtgttttcagaagcactcacatgttctttcttttcctgagtgaaaagcaaaggtcccacggtgtgtgctgtggtgcaccgcctggctttgggggtcccggaggcaggctgcctagactcacagcctcgggaccgttgccacggcctgtcttctcgttcaggcctgcctctgacagcactcaccatgaggacattccatccttcaccccctcctctggcacaggccaccactgcggtgctgtgccttcagatgggaggtgggcgcggtggccgcctccttccctccaggacctgcccgtgtgaagaccccccggagtgctgagcttcagggctgcgtggaaagagtttttactctctttttctagcctgtataccaggcttttccccacattgtcaggtagagcaccagcttccctgaccgctgctgctcggggagggctggggctggccgggggtcctgtggaggagtacatggaggactccaggtacagcgcaggagtcacggcttttgttttttgacattggcccccggttctaccaatgacagggtgccctggctggagctgtcatcacacacacccctcagctcggaggctgtgggctcctcaaagctggagaaagaggccaagatttttctgcacacggagtgtggggataggagccgggccaagcgctggcccctcagcggtgagccctgcccactcttaccgagcaaggtgggtggctctggcacgagtcccccagggggagagcatggctaccagggagctgcagcggagccctccagccctcaccccaggccagccccaccccggcctctttgagaattctcagaactttgtacctttcccctgatttttaaaccctttttctaaacagactgactttcttacaaaatgcatttggaaaccagacctttgctacccaccaatgtctctgggttttgtaccagtccctgctctcaggccaccctgcccaggacccaggcccgcctccccctccacactcaggatgtcctgctccatctggccggctcactccgtgtggcctgcctttgctgaccgttttggggttccccgccggagctacaggggcattttcttccctaaaaccaacagtgtcccactgacctccccaagtgtttgctgcgtggcagatttcctgttcttgttcgcagtttgccgactgaagagtgtgggatttccgaggcccaggtgagcacgtccatctcaggaggcgtggagggaaaagacatgtcatgaagggttttttttatgtgactgatttttttttaaatcgatgttcaaactaataaatatttttttatgaagagg

SEQ ID NO: 1540 - DNA, 6210 bp, HOMO SAPIENS
gagttcgcggccggtggcggcggtggcgacagcggcgacctagggatcgatctggagggacttggggagcgtgcagagacctctagctcgagcgcgagggacctcccgccgggatgcctggggagcagatggaccctactggaagtcagttggattcagatttctctcagcaagatactccttgcctgataattgaagattctcagcctgaaagccaggttctagaggatgattctggttctcacttcagtatgctatctcgacaccttcctaatctccagacgcacaaagaaaatcctgtgttggatgttgtgtccaatcctgaacaaacagctggagaagaacgaggagacggtaatagtgggttcaatgaacatttgaaagaaaacaaggttgcagaccctgtggattcttctaacttggacacatgtggttccatcagtcaggtcattgagcagttacctcagccaaacaggacaagcagtgttctgggaatgtcagtggaatctgctcctgctgtggaggaagagaagggagaagagttggaacagaaggagaaagagaaggaagaagatacttcaggcaatactacacattcccttggtgctgaagatactgcctcatcacagttgggttttggggttctggaactctcccagagccaggatgttgaggaaaatactgtgccatatgaagtggacaaagagcagctacaatcagtaaccaccaactctggttataccaggctgtctgatgtggatgctaatactgcaattaagcatgaagaacagtccaacgaagatatccccatagcagaacagtccagcaaggacatccctgtgacagcacagcccagtaaggatgtacatgttgtaaaagagcaaaatccaccacctgcaaggtcagaggacatgccttttagccccaaagcatctgttgctgctatggaagcaaaagaacagttgtctgcacaagaacttatggaaagtggactgcagattcagaagtcaccagagcctgaggttttgtcaactcaggaagacttgtttgaccagagcaataaaacagtatcttctgatggttgctctactccttcaagggaggaaggtgggtgttctttggcttccactcctgccaccactctgcatctcctgcagctctctggtcagaggtcccttgttcaggacagtctttccacgaattcttcagatcttgttgctccttctcctgatgctttccgatctactccttttatcgttcctagcagtcccacagagcaagaagggagacaagataagccaatggacacgtcagtgttatctgaagaaggaggagagccttttcagaagaaacttcaaagtggtgaaccagtggagttagaaaacccccctctcctgcctgagtccactgtatcaccacaagcctcaacaccaatatctcagagcacaccagtcttccctcctgggtcacttcctatcccatcccagcctcagttttctcatgacatttttattccttccccaagtctggaagaacaatcaaatgatgggaagaaagatggagatatgcatagttcatctttgacagttgagtgttctaaaacttcagagattgaaccaaagaattcccctgaggatcttgggctatctttgacaggggattcttgcaagttgatgctttctacaagtgaatatagtcagtccccaaagatggagagcttgagttctcacagaattgatgaagatggagaaaacacacagattgaggatacggaacccatgtctccagttctcaattctaaatttgttcctgctgaaaatgatagtatcctgatgaatccagcacaggatggtgaagtacaactgagtcagaatgatgacaaaacaaagggagatgatacagacaccagggatgacattagtattttagccactggttgcaagggcagagaagaaacggtagcagaagatgtttgtattgatctcacttgtgattcggggagtcaggcagttccgtcaccagctactcgatctgaggcactttctagtgtgttagatcaggaggaagctatggaaattaaagaacaccatccagaggaggggtcttcagggtctgaggtggaagaaatccctgagacaccttgtgaaagtcaaggagaggaactcaaagaagaaaatatggagagtgttccgttgcacctttctctgactgaaactcagtcccaagggttgtgtcttcaaaaggaaatgccaaaaaaagaatgctcagaagctatggaagttgaaaccagtgtgattagtattgattcccctcaaaagttggcaatacttgaccaagaattggaacataaggaacaggaagcttgggaagaagctacttcagaggactccagtgttgtcattgtagatgtgaaagagccatctcccagagttgatgtttcttgtgaacctttggagggagtggagaagtgctcagattcccagtcatgggaggatattgctccagaaatagaaccatgtgctgagaatagattagacaccaaggaagaaaagagtgtagaatatgaaggagatctgaaatcagggactgcagaaacagaacctgtagagcaagattcttcacagccttccttacctttagtgagagcagatgatcctttaagacttgaccaggagttgcagcagccccaaactcaggagaaaacaagtaattcattaacagaagactcaaaaatggctaatgcaaagcagctaagctcagatgcagaggcccagaagctggggaagccctctgcccatgcctcacaaagcttctgtgaaagttctagtgaaaccccatttcatttcactttgcctaaagaaggtgatatcatcccaccattgactggtgcaaccccacctcttattgggcacctaaaattggagcccaagagacacagtactcctattggtattagcaactatccagaaagcaccatagcaaccagtgatgtcatgtctgaaagcatggtggagacccatgatcccatacttgggagtggaaaaggggattctggggctgccccagacgtggatgataaattatgtctaagaatgaaactggttagtcctgagactgaggcgagtgaagagtctttgcagttcaacctggaaaagcctgcaactggtgaaagaaaaaatggatctactgctgttgctgagtctgttgccagtccccagaagaccatgtctgtgttgagctgtatctgtgaagccaggcaagagaatgaggctcgaagtgaggatccccccaccacacccatcagggggaacttgctccactttccaagttctcaaggagaagaggagaaagaaaaattggagggtgaccatacaatcaggcagagtcaacagcctatgaagcccattagtcctgtcaaggaccctgtttctcctgcttcccagaagatggtcatacaagggccatccagtcctcaaggagaggcaatggtgacagatgtgctagaagaccagaaagaaggacggagtactaataaggaaaatcctagtaaggccttgattgaaaggcccagccaaaataacataggaatccaaaccatggagtgttccttgagggtcccagaaactgtttcagcagcaacccagactataaagaatgtgtgtgagcaggggaccagtacagtggaccagaactttggaaagcaagatgccacagttcagactgagagggggagtggtgagaaaccagtcagtgctcctggggatgatacagagtcgctccatagccagggagaagaagagtttgatatgcctcagcctccacatggccatgtcttacatcgtcacatgagaacaatccgggaagtacgcacacttgtcactcgtgtcattacagatgtgtattatgtggatggaacagaagtagaaagaaaagtaactgaggagactgaagagccaattgtagagtgtcaggagtgtgaaactgaagtttccccttcacagactgggggctcctcaggtgacctgggggatatcagctccttctcctccaaggcatccagcttacaccgcacatcaagtgggacaagtctctcagctatgcacagcagtggaagctcagggaaaggagccggaccactcagagggaaaaccagcgggacagaacccgcagattttgccttacccagctcccgaggaggcccaggaaaactgagtcctagaaaaggggtcagtcagacagggacgccagtgtgtgaggaggatggtgatgcaggccttggcatcagacagggagggaaggctccagtcacgcctcgtgggcgtgggcgaaggggccgcccaccttctcggaccactggaaccagagaaacagctgtgcctggccccttgggcatagaggacatttcacctaacttgtcaccagatgataaatccttcagccgtgtcgtgccccgagtgccagactccaccagacgaacagatgtgggtgctggtgctttgcgtcgtagtgactctccagaaattcctttccaggctgctgctggcccttctgatggcttagatgcctcctctccaggaaatagctttgtagggctccgtgttgtagccaagtggtcatccaatggctacttttactctgggaaaatcacacgagatgtcggagctgggaagtataaattgctctttgatgatgggtacgaatgtgatgtgttgggcaaagacattctgttatgtgaccccatcccgctggacactgaagtgacggccctctcggaggatgagtatttcagtgcaggagtggtgaaaggacataggaaggagtctggggaactgtactacagcattgaaaaagaaggccaaagaaagtggtataagcgaatggctgtcatcctgtccttggagcaaggaaacagactgagagagcagtatgggcttggcccctatgaagcagtaacacctcttacaaaggcagcagatatcagcttagacaatttggtggaagggaagcggaaacggcgcagtaacgtcagctccccagccacccctactgcctccagtagcagcagcacaacccctacccgaaagatcacagaaagtcctcgtgcctccatgggagttctctcaggcaaaagaaaacttatcacttctgaagaggaacggtcccctgccaagcgaggtcgcaagtctgccacagtaaaacctgtaggggcaggagagtttgtgagcccctgtgagagtggagacaacaccggtgaaccctctgccctggaagagcagagagggcctttgcctctcaacaagaccttgtttctgggctacgcatttctccttaccatggccacaaccagtgacaagttggccagccgctccaaactgccagatggtcctacaggaagcagtgaagaagaggaggaatttttggaaattcctcctttcaacaagcagtatacagaatcccagcttcgagcaggagctggctatatccttgaagatttcaatgaagcccagtgtaacacagcttaccagtgtcttctaattgcggatcagcattgtcgaacccggaagtacttcctgtgccttgccagtgggattccttgtgtgtctcatgtctgggtccatgatagttgccatgccaaccagctccagaactaccgtaattatctgttgccagctgggtacagccttgaggagcaaagaattctggactggcaaccccgtgaaaatcctttccagaatctgaaggtactcttggtatcagaccaacagcagaacttcctggagctctggtctgagatcctcatgactggtggtgcagcctctgtgaagcagcaccattcaagtgcccataacaaagatattgctttaggggtatttgatgtggtggtgacggacccctcatgcccagcctcggtgctgaagtgtgctgaagcattgcagctgcctgtggtgtcacaagagtgggtgatccagtgcctcattgttggggagagaattggattcaagcagcatccaaaatataaacacgattatgtttctcactaaagatacttggtcttactggttttattccctgctatcgtggagattgtgttttaaccaggttttaaatgtgtcttgtgtgtaactggattccttgcatggatcttgtatatagttttatttgctgaacttttatgataaaataaatgttgaatctctttggttgtagtaa

SEQ ID NO: 1541 - DNA, 1675 bp, HOMO SAPIENS
acctcatttcctgtgtcctctctttctttggcaatccaaagaaagtcatctttcagattgtctgctcagagttcatctcaaagcctggcaaggattggagaggtcaataagagtcagcgcctttaaaaagaaatctactcactcttctgtgtgcataaggccgagcagaggttcttcgtctcaagaggaactgacttctgttgagcactcaacacgccacagagaccagccatcttgcaacctcacctcacagcatggagagaggagaccaacctaagagaaccaggaatgaaaacattttcaactgcttatacaaaaaccctgaggcaacttttaagctgatttgctttccctggatgggaggtggctccactcattttgccaaatggggccaagatactcatgatttgctggaagtgcactccttaaggcttcctggaagagaaagcagagttgaagaacctcttgaaaatgacatctcccagttagttgatgaagttgtttgtgctctgcagccagtcatccaggataaaccatttgcattttttggccacagtatgggatcctacattgcttttaggactgcactaggtctaaaagaaaacaatcaaccagaaccattgcatttatttttgtcaagtgcaactcctgtacattcaaaggcctggcatcgcattcccaaagatgatgaattgtcagaagaacaaataagtcattaccttatggaatttggaggcacccccaagcattttgctgaagccaaggaatttgtgaaacaatgtagtcccatcataagggcagatctgaacattgttagaagttgcacctctaacgtaccatctaaggctgttctttcctgtgacttgacatgttttgttggatctgaagacatagcaaaggacatggaagcctggaaagatgtaaccagtggaaatgctaaaatttaccagcttccagggggtcacttttatcttctggatcctgcgaacgagaaattaatcaagaactacataatcaagtgtctagaagtatcatcgatatccaatttttagatattttccctttcacttttaaaataatcaaagtaatatcatactcttctcagttattcagatatagctcagttttattcagattggaaattacacattttctactgtcagggagattcgttacataaatatatttacgtatctggggacaaaggtcaagccagtaaagaatacttctggcagcactttgggaggccaaggcgggcggatcacgaggtcaggagatcgagaccgtcctggctaacaccgtgaaaccccatctctactaaaaatacacaaaattagccgggcgtggtggtgggcacctgtagtcccagctactcgggaggctgaggcaggagaatggtgtgaacctgggaggtggagcttgcagtgaaccgagatcgctccactgcactccagcctgggtgacagatccagactctgtctcaaaaaaaaaaaaaaaaaaaatacttctggcagagtcttttatcttcctattaaaatctcacttgattctcctttatgggaagtttgtcgacaaaattcatgattagtaaattatccattttttccttcagttagtttaatggtgaagatgattaacaggggaaatgcttgaagtaaatgattgtttcaatggc

SEQ ID NO: 1542 - DNA, 3882 bp, HOMO SAPIENS
cacataccctaaagaaccctgggatgactaaggcagagagagtctgagaaaactctttggtgcttctgcctttagttttaggacacatttatgcagatgagcttataagagaccgttccctccgccttcttcctcagaggaagtttcttggtagatcaccgacacctcatccaggcggggggttggggggaaacttggcaccagccatcccaggcagagcaccactgtgatttgttctcctggtggagagagctggaaggaaggagccagcgtgcaaataatgaaggagcacgggggcaccttcagtagcaccggaatcagcggtggtagcggtgactctgctatggacagcctgcagccgctccagcctaactacatgcctgtgtgtttgtttgcagaagaatcttatcaaaaattagcaatggaaacgctggaggaattagactggtgtttagaccagctagagaccatacagacctaccggtctgtcagtgagatggcttctaacaagttcaaaagaatgctgaaccgggagctgacacacctctcagagatgagccgatcagggaaccaggtgtctgaatacatttcaaatactttcttagacaagcagaatgatgtggagatcccatctcctacccagaaagacagggagaaaaagaaaaagcagcagctcatgacccagataagtggagtgaagaaattaatgcatagttcaagcctaaacaatacaagcatctcacgctttggagtcaacactgaaaatgaagatcacctggccaaggagctggaagacctgaacaaatggggtcttaacatctttaatgtggctggatattctcacaatagacccctaacatgcatcatgtatgctatattccaggaaagagacctcctaaagacattcagaatctcatctgacacatttataacctacatgatgactttagaagaccattaccattctgacgtggcatatcacaacagcctgcacgctgctgatgtagcccagtcgacccatgttctcctttctacaccagcattagacgctgtcttcacagatttggagatcctggctgccatttttgcagctgccatccatgacgttgatcatcctggagtctccaatcagtttctcatcaacacaaattcagaacttgctttgatgtataatgatgaatctgtgttggaaaatcatcaccttgctgtgggtttcaaactgctgcaagaagaacactgtgacatcttcatgaatctcaccaagaagcagcgtcagacactcaggaagatggttattgacatggtgttagcaactgatatgtctaaacatatgagcctgctggcagacctgaagacaatggtagaaacgaagaaagttacaagttcaggcgttcttctcctagacaactataccgatcgcattcaggtccttcgcaacatggtacactgtgcagacctgagcaaccccaccaagtccttggaattgtatcggcaatggacagaccgcatcatggaggaatttttccagcagggagacaaagagcgggagaggggaatggaaattagcccaatgtgtgataaacacacagcttctgtggaaaaatcccaggttggtttcatcgactacattgtccatccattgtgggagacatgggcagatttggtacagcctgatgctcaggacattctcgataccttagaagataacaggaactggtatcagagcatgatacctcaaagtccctcaccaccactggacgagcagaacagggactgccagggtctgatggagaagtttcagtttgaactgactctcgatgaggaagattctgaaggacctgagaaggagggagagggacacagctatttcagcagcacaaagacgctttgtgtgattgatccagaaaacagagattccctgggagagactgacatagacattgcaacagaagacaagtcccccgtggatacataatccccctctccctgtggagatgaacattctatccttgatgagcatgccagctatgtggtagggccagcccaccatgggggccaagacctgcacaggacaagggccacctggcctttcagttacttgagtttggagtcagaaagcaagaccaggaagcaaatagcagctcaggaaatcccacggttgacttgccttgatggcaagcttggtggagagggctgaagctgttgctgggggccgattctgatcaagacacatggcttgaaaatggaagacacaaaactgagagatcattctgcactaagtttcgggaacttatccccgacagtgactgaactcactgactaataacttcatttatgaatcttctcacttgtccctttgtctgccaacctgtgtgccttttttgtaaaacattttcatgtctttaaaatgcctgttgaatacctggagtttagtatcaacttctacacagataagctttcaaagttgacaaacttttttgactctttctggaaaagggaaagaaaatagtcttccttctttcttgggcaatatccttcactttactacagttacttttgcaaacagacagaaaggatacacttctaaccacattttacttccttcccctgttgtccagtccaactccacagtcactcttaaaacttctctctgtttgcctgcctccaacagtacttttaactttttgctgtaaacagaataaaattgaacaaattagggggtagaaaggagcagtggtgtcgttcaccgtgagagtctgcatagaactcagcagtgtgccctgctgtgtcttggaccctgccccccacaggagttgtacagtccctggccctgttccctacctcctctcttcaccccgttaggctgttttcaatgtaatgctgccgtccttctcttgcactgccttctgcgctaacacctccattcctgtttataaccgtgtatttattacttaatgtatataatgtaatgttttgtaagttattaatttatatatctaacattgcctgccaatggtggtgttaaatttgtgtagaaaactctgcctaagagttacgactttttcttgtaatgttttgtattgtgtattatataacccaaacgtcacttagtagagacatatggcccccttggcagagaggacaggggtgggcttttgttcaaagggtctgccctttccctgcctgagttgctacttctgcacaacccctttatgaaccagttttggaaacaatattctcacattagatactaaatggtttatactgagcttttacttttgtatagcttgataggggcagggggcaatgggatgtagtttttacccaggttctatccaaatctatgtgggcatgagttgggttataactggatcctactatcattgtggctttggttcaaaaggaaacactacatttgctcacagatgattcttctgaatgctcccgaactactgactttgaagaggtagcctcctgcctgccattaagcaggaatgtcatgttccagttcattacaaaagaaaacaataaaacaatgtgaatttttataataaaatgtgaactgatgtagcaaattacgcaaatgtgaagcctcttctgataacacttgttaggcctcttactgatgtcagtttcagtttgtaaaatatgtttcatgctttcagttcagcattgtgactcagtaattacagaaaatggcacaaatgtgcatgaccaatgtatgtctatgaacactgcattgtttcaggtggacattttatcattttcaaatgtttctcacaatgtatgttatagtattattattatatattgtgttcaaatgcattctaaagagacttttatatgaggtgaataaagaaaagcatgattagattaaaaaaa

SEQ ID NO: 1543 - DNA, 331 bp, HOMO SAPIENS
  misc_feature (34)..(34): n is a, c, g, or t
  misc_feature (36)..(41): n is a, c, g, or t
  misc_feature (43)..(43): n is a, c, g, or t
  misc_feature (45)..(46): n is a, c, g, or t
  misc_feature (48)..(58): n is a, c, g, or t
  misc_feature (60)..(61): n is a, c, g, or t
ggtaaatacctgaggttcgttgtctcacgccaangnnnnnnangnngnnnnnnnnnnngnnatggagtccctgtctgaccgggccatgttgtatgttccttgctgtacacgtggttgacaaagaaaagggaagatggagctgcgatgttggacatgcctggcccccaggacatacagccctgccgagcaaataatgaacgtaactcacaaacttcctgcttatcatcaaacgcacgcatccacttatcatcaaacacctcgggtgacagaagaatgcaggtcagctccctgctgccttggcattatcaatcagcccaggaaccatcctata

SEQ ID NO: 1544 - DNA, 1488 bp, HOMO SAPIENS
accactgtggttctactatgccttctgaccccgtcttggacttcaactgggagaatgtggagccatttgaacaggctcctcttctggagcatattttcttctgtcacttgtagaaaagctgtattggattgtgaggcaatgaaaacaaatgaattcccttctccatgtttggactcaaagactaaggtggttatgaagggtcaaaatgtatctatgttttgttcccataagaacaaatcactgcagatcacctattcattgtttcgacgtaagacacacctgggaacccaggatggaaaaggtgaacctgcgatttttaacctaagcatcacagaagcccatgaatcaggcccctacaaatgcaaagcccaagttaccagctgttcaaaatacagtcgtgacttcagcttcacgattgtcgacccggtgacttccccagtgctgaacattatggtcattcaaacagaaacagaccgacatataacattacattgcctctcagtcaatggctcgctgcccatcaattacactttctttgaaaaccatgttgccatatcaccagctatttccaagtatgacagggagcctgctgaatttaacttaaccaagaagaatcctggagaagaggaagagtataggtgtgaagctaaaaacagattgcctaactatgcaacatacagtcaccctgtcaccatgccctcaacaggcggagacagctgtcctttctgtctgaagctactacttccagggttattactgttgctggtggtgataatcctaattctggctttttgggtactgcccaaatacaaaacaagaaaagctatgagaaataatgtgcccagggaccgtggagacacagccatggaagttggaatctatgcaaatatccttgaaaaacaagcaaaggaggaatctgtgccagaagtgggatccaggccgtgtgtttccacagcccaagatgaggccaaacactcccaggagctacagtatgccacccccgtgttccaggaggtggcaccaagagagcaagaagcctgtgattcttataaatctggatatgtctattctgaactcaacttctgaaatttacagaaacaaactacatctcaggatggagtctcactctgttgcccaggctggagttcagtagcgcgatcttggctcacttcaatctccatcttcccagttcaagcgattctcatgcctcgacctcccgagtagctgggattacaggtgcccgctaccacgcccagctaatttttgtatttttagtagagatggggtttcactatggtggccaggctggtcttgaactcctgacctcagatgatctgcctgcctcggcctcccaaagtgctggaactacaagcctgagccaccgtgcccggccctgaatcgctttagtaaataaagggtctccaagaataaattcatccgaacatgcaaaaaaaaaaaaaaaaaaaaaaaaaaaaaaaaaaaaaaaaa

SEQ ID NO: 1545 - DNA, 449 bp, HOMO SAPIENS
  misc_feature (263)..(263): n is a, c, g, or t
  misc_feature (273)..(273): n is a, c, g, or t
gtttttgaaacctgactatacttggagtcttgggaacacatcttacagtgtttcctcacactgtgagataaaatggctactttttcttgaagtttttgtcttctaaaatgaacaattcaaatatagttataaaatggagtatttattttgtacttttaaaaaatggtttaaggtgaggctttgtttattcctaatatgtgaataatactgatgtgaaaaatgtgagtcccagcactttgggaggccagggcgggcggatcacnaggtcagganatcgagaccatcgtggctaacacggtgaaaccccatctctactaaaaatacaaaaaattagccaggcgtggtggcgggcccctgtagtcccagctacttgggaggctgaggcaggagaatggcgtgaacccagaaggcggagcttgcagtgagccgagatcagatcacgacactgc

SEQ ID NO: 1546 - DNA, 2030 bp, HOMO SAPIENS
gcgcgatggcggcggctcctttaggcagctgaaaggggatttaggcccggaagatccgagtccatccgcggcggggagagggcaagcgggaccggtaggggccggagcagcggcggcggcgctcggactgtcccatccgccccgtattgaggcgctgggagcggcggggcgacaggaaagcgatggtgaaagcggggccgtgaggggggcggagccgggagccggacccgcagtagcggcagcagcggcgccgcctcccagagttcagacccaggaagcggccgggagggcaggagcgaatcgggccgccgccgccatggagctgagagtcgggaacaggtaccggctgggccggaagatcggcagcggctccttcggagacatctatctcggtacggacattgctgcaggagaagaggttgccatcaagcttgaatgtgtcaaaaccaaacaccctcagctccacattgagagcaaaatctacaagatgatgcagggaggagtgggcatccccaccatcagatggtgcggggcagagggggactacaacgtcatggtgatggagctgctggggccaagcctggaggacctcttcaacttctgctccaggaaattcagcctcaaaaccgtcctgctgcttgctgaccaaatgatcagtcgcatcgaatacattcattcaaagaacttcatccaccgggatgtgaagccagacaacttcctcatgggcctggggaagaagggcaacctggtgtacatcatcgacttcgggctggccaagaagtaccgggatgcacgcacccaccagcacatcccctatcgtgagaacaagaacctcacggggacggcgcggtacgcctccatcaacacgcaccttggaattgaacaatcccgaagagatgacttggagtctctgggctacgtgctaatgtacttcaacctgggctctctcccctggcaggggctgaaggctgccaccaagagacagaaatacgaaaggattagcgagaagaaaatgtccacccccatcgaagtgttgtgtaaaggctacccttccgaatttgccacatacctgaatttctgccgttccttgcgttttgacgacaagcctgactactcgtacctgcggcagcttttccggaatctgttccatcgccagggcttctcctatgactacgtgttcgactggaacatgctcaaatttggtgccagccgggccgccgatgacgccgagcgggagcgcagggaccgagaggagcggctgagacactcgcggaacccggctacccgcggcctcccttccacagcctccggccgcctgcgggggacgcaggaagtggctccccccacacccctcacccctacctcacacacggctaacacctccccccggcccgtctccggcatggagagagagcggaaagtgagtatgcggctgcaccgcggggcccccgtcaacatctcctcgtccgacctcacaggccgacaagatacctctcgcatgtccacctcacagattcctggtcgggtggcttccagtggtcttcagtctgtcgtgcaccgatgagaactctccttattgctgtgaagggcagacaatgcatggctgatctactctgttaccaatggctttactagtgacacgtcccccggtctaggatcgaaatgttaacaccgggagctctccaggccactcacccagcgacgctcgtgggggaaacatactaaacggacagactccaagagctgccaccgctggggctgcactgcggccccccacgtgaactcggttgtaacggggctgggaagaaaagcagagagagaattgcagagaatcagactccttttccagggcctcagctccctccagtggtggccgccctgtactccctgacgattccactgtaactaccaatcttctacttggttaagacagttttgtatcattttgctaaaaattattggcttaaatctgtgtaaagaaaaaaaaaaaaaaaaaaaaaaaaaaaaaaaaaaaaaaaaaaaaaaaaaaa

SEQ ID NO: 1547 - DNA, 3589 bp, HOMO SAPIENS; identical to SEQ ID NO: 1201

SEQ ID NO: 1548 - DNA, 1865 bp, HOMO SAPIENS; identical to SEQ ID NO: 850

SEQ ID NO: 1549 - DNA, 1679 bp, HOMO SAPIENS; identical to SEQ ID NO: 225

SEQ ID NO: 1550 - DNA, 5601 bp, HOMO SAPIENS
ggcccggctgcgaggaggaggcggcggcggcgcaggaggatgtacttggtggcgggggacagggggttggccggctgcgggcacctcctggtctcgctgctggggctgctgctgctgctggcgcgctccggcacccgggcgctggtctgcctgccctgtgacgagtccaagtgcgaggagcccaggaactgcccggggagcatcgtgcagggcgtctgcggctgctgctacacgtgcgccagccagaggaacgagagctgcggcggcaccttcgggatttacggaacctgcgaccgggggctgcgttgtgtcatccgccccccgctcaatggcgactccctcaccgagtacgaagcgggcgtttgcgaagatgagaactggactgatgaccaactgcttggttttaaaccatgcaatgaaaaccttattgctggctgcaatataatcaatgggaaatgtgaatgtaacaccattcgaacctgcagcaatccctttgagtttccaagtcaggatatgtgcctttcagctttaaagagaattgaagaagagaagccagattgctccaaggcccgctgtgaagtccagttctctccacgttgtcctgaagattctgttctgatcgagggttatgctcctcctggggagtgctgtcccttacccagccgctgcgtgtgcaaccccgcaggctgtctgcgcaaagtctgccagccgggaaacctgaacatactagtgtcaaaagcctcagggaagccgggagagtgctgtgacctctatgagtgcaaaccagttttcggcgtggactgcaggactgtggaatgccctcctgttcagcagaccgcgtgtcccccggacagctatgaaactcaagtcagactaactgcagatggttgctgtactttgccaacaagatgcgagtgtctctctggcttatgtggtttccccgtgtgtgaggtgggatccactccccgcatagtctctcgtggcgatgggacacctggaaagtgctgtgatgtctttgaatgtgttaatgatacaaagccagcctgcgtatttaacaatgtggaatattatgatggagacatgtttcgaatggacaactgtcggttctgtcgatgccaagggggcgttgccatctgcttcactgcccagtgtggtgagataaactgcgagaggtactacgtgcccgaaggagagtgctgcccagtgtgtgaagatccagtgtatccttttaataatcccgctggctgctatgccaatggcctgatccttgcccacggagaccggtggcgggaagacgactgcacattctgccagtgcgtcaacggtgaacgccactgcgttgcgaccgtctgcggacagacctgcacaaaccctgtgaaagtgcctggggagtgttgccctgtgtgcgaagaaccaaccatcatcacagttgatccacctgcatgtggggagttatcaaactgcactctgacagggaaggactgcattaatggtttcaaacgcgatcacaatggttgtcggacctgtcagtgcataaacaccgaggaactatgttcagaacgtaaacaaggctgcaccttgaactgtcccttcggtttccttactgatgcccaaaactgtgagatctgtgagtgccgcccaaggcccaagaagtgcagacccataatctgtgacaagtattgtccacttggattgctgaagaataagcacggctgtgacatctgtcgctgtaagaaatgtccagagctctcatgcagtaagatctgccccttgggtttccagcaggacagtcacggctgtcttatctgcaagtgcagagaggcctctgcttcagctgggccacccatcctgtcgggcacttgtctcaccgtggatggtcatcatcataaaaatgaggagagctggcacgatgggtgccgggaatgctactgtctcaatggacgggaaatgtgtgccctgatcacctgcccggtgcctgcctgtggcaaccccaccattcaccctggacagtgctgcccatcatgtgcagatgactttgtggtgcagaagccagagctcagtactccctccatttgccacgcccctggaggagaatactttgtggaaggagaaacgtggaacattgactcctgtactcagtgcacctgccacagcggacgggtgctgtgtgagacagaggtgtgcccaccgctgctctgccagaacccctcacgcacccaggattcctgctgcccacagtgtacagatcaaccttttcggccttccttgtcccgcaataacagcgtacctaattactgcaaaaatgatgaaggggatatattcctggcagctgagtcctggaagcctgacgtttgtaccagctgcatctgcattgatagcgtaattagctgtttctctgagtcctgcccttctgtatcctgtgaaagacctgtcttgagaaaaggccagtgttgtccctactgcatagaagacacaattccaaagaaggtggtgtgccacttcagtgggaaggcctatgccgacgaggagcggtgggaccttgacagctgcacccactgctactgcctgcagggccagaccctctgctcgaccgtcagctgcccccctctgccctgtgttgagcccatcaacgtggaaggaagttgctgcccaatgtgtccagaaatgtatgtcccagaaccaaccaatatacccattgagaagacaaaccatcgaggagaggttgacctggaggttcccctgtggcccacgcctagtgaaaatgatatcgtccatctccctagagatatgggtcacctccaggtagattacagagataacaggctgcacccaagtgaagattcttcactggactccattgcctcagttgtggttcccataattatatgcctctctattataatagcattcctattcatcaatcagaagaaacagtggataccactgctttgctggtatcgaacaccaactaagccttcttccttaaataatcagctagtatctgtggactgcaagaaaggaaccagagtccaggtggacagttcccagagaatgctaagaattgcagaaccagatgcaagattcagtggcttctacagcatgcaaaaacagaaccatctacaggcagacaatttctaccaaacagtgtgaagaaaggcaactaggatgaggtttcaaaagacggaagacgactaaatctgctctaaaaagtaaactagaatttgtgcacttgcttagtggattgtattggattgtgacttgatgtacagcgctaagaccttactgggatgggctctgtctacagcaatgtgcagaacaagcattcccacttttcctcaagataactgaccaagtgttttcttagaaccaaagtttttaaagttgctaagatatatttgcctgtaagatagctgtagagatatttggggtggggacagtgagtttggatggggaaatgggtgggagggtggtgttgggaagaaaaattggtcagcttggctcggggagaaacctggtaacataaaagcagttcagtggcccagaggttatttttttcctattgctctgaagactgcactggttgctgcaaagctcaggcctgaatgagcaggaaacaaaaaaggccttgcgacccagctgccataaccaccttagaactaccagacgagcacatcagaaccctttgacagccatcccaggtctaaagccacaagtttcttttctatacagtcacaactgcagtaggcagtgaggaagccagagaaatgcgatagcggcatttctctaaagcgggttattaaggatatatacagttacactttttgctgcttttattttcttccaagccaatcaatcagccagttcctagcagagtcagcacatgaacaagatctaagtcatttcttgatgtgagcactggagcttttttttttttacaacgtgacaggaagaggagggagagggtgacgaacaccaggcatttccaggggctatatttcactgtttgttgttgctttgttctgttatattgttggttgttcatagtttttgttgaagctctagcttaagaagaaactttttttaaaaagactgtttggggattctttttccttattatatactgattctacaaaatagaaactacttcattttaattgtatattattcaagcacctttgttgaagctcaaaaaaaatgatgcctctttaaactttagcaattataggagtatttatgtaactatcttatgcttcaaaaaacaaaagtatttgtgtgcatgtgtatataatatatatatatacatatatatttatacacatacaatttatgttttcctgttgaatgtatttttatgagattttaaccagaacaaaggcagataaacaggcattccatagcagtgcttttgatcacttacaaattttttgaataacacaaaatctcattctacctgcagtttaattggaaagatgtgtgtgtgagagtatgtatgtgtgtgtgtgtgtgtgtgtgtgtgcgcgcgcacgcacgccttgagcagtcagcattgcacctgctatggagaagggtattcctttattaaaatcttcctcatttggatttgctttcagttggttttcaatttgctcactggccagagacattgatggcagttcttatctgcatcactaatcagctcctggattttttttttttttttttcaaacaatggtttgaaacaactactggaatattgtccacaataagctggaagtttgttgtagtatgcctcaaatataactgactgtatactatagtggtaacttttcaaacagcccttagcacttttatactaattaacccatttgtgcattgagttttcttttaaaaatgcttgttgtgaaagacacagatacccagtatgcttaacgtgaaaagaaaatgtgttctgttttgtaaaggaactttcaagtattgttgtaaatacttggacagaggttgctgaactttaaaaaaaattaatttattattataatgacctaatttattaatctgaagattaaccatttttttgtcttagaatatcaaaaagaaaaagaaaaaggtgttctagctgtttgcatcaaaggaaaaaaagatttattatcaaggggcaatatttttatcttttccaaaataaatttgttaatgatacattacaaaaatagattgacatcagcctgattagtataaattttgttggtaattaatccattcctggcataaaaagtctttatcaaaaaaaattgtagatgcttgctttttgttttttcaatcatggccatattatgaaaatactaacaggatataggacaaggtgtaaatttttttattattattttaaagatatgatttatcctgagtgctgtatctattactcttttactttggttcctgttgtgctcttgtaaaagaaaaatataatttcctgaagaataaaatagatatatggcacttggagtgcatcatagttctacagtttgtttttgttttcttcaaaaaagctgtaagagaattatctgcaacttgattcttggcaggaaataaacattttgagttgaaatcaaaaaaaaaaaaaaaaaa

SEQ ID NO: 1551 - DNA, 767 bp, HOMO SAPIENS; identical to SEQ ID NO: 176

SEQ ID NO: 1552 - DNA, 2718 bp, HOMO SAPIENS; identical to SEQ ID NO: 657

SEQ ID NO: 1553 - DNA, 6191 bp, HOMO SAPIENS
gcagggagtgcgggtcggttctgcgtgcgctgccggacgaggctcccgccgccgattgacccgcgctccgcccgtagtcgggccgggaccttggtagctaatgtccgaagaaagtgactctctgagaaccagcccttctgtggcctcactctctgaaaatgagctgccaccaccacctgagcctccgggctatgtgtgctcactgacagaagacctggtcaccaaagcccgggaagagctgcaggaaaagccggaatggagacttcgagatgtgcaggcccttcgtgacatggtgcggaaggagtaccccaacctgagcacatccctcgacgatgccttcctgctgcgcttcctccgagcccgcaagtttgattacgaccgggccctgcagctcctcgtcaactaccacagctgtagaagaagctggcccgaagtcttcaataacttgaagccatcagccttaaaagatgtccttgcttccgggttcctcaccgtgctgccccacactgaccccaggggctgccatgtcgtctgcatccgcccagacagatggataccaagcaactatccaattactgaaaacatccgagccatatacttgaccttagaaaaactcattcagtctgaagaaacccaggtgaatggaattgtaattcttgcagactacaaaggagtgagtttatcaaaagcatctcactttggcccttttatagccaaaaaggtgattggcatcctccaggatggtttccccattcggataaaagcagtccatgtggtgaatgaacctcgaatatttaaaggcatttttgccatcataaaaccatttctaaaggagaaaatagcaaacagattcttcctccatgggtctgacttgaactctctccacacaaaccttccaagaagcatcctccccaaggagtatgggggcacggctggggagctggacactgccacctggaacgcggtactgctggcttcagaagacgattttgtgaaagagttctgccaacctgttcctgcctgtgacagcatcctgggccagacgctgctgcccgagggcctgacctcagatgcacagtgtgacgactccttgcgagctgtgaagtcacagctgtactcctgctactagcccgtcccccagggtcaccatctttaattcttttccttcttttctttggagaggcacaaggagaatttaagggtccatggattcagtcttgctccttgtaattaaactgcaggatggaggaacagcctgagatatgagcatgagcccattttggggtaagcctttggttactttaattactccatggaagacatggaaaatgtccccactgattcttaaacatttggaatcccagtctgcaactattaatctggaggctatatctattttgttttgctttttggttggggggtggtgatctggttcttacacatcttggaagcaagaacaatcaggaccaaagtcactttgatcccacttttccaggagaaaaaccacctgtttggccagtgagaactacttgtatgaaataatttggccaaaccttcagtgtgaccaaatgtgagactgggagtttgtgtttttcacaggaaccctaagtatagacctctgctgctcatcaggaaacttactggagatgaaggccccagctgttgtcaccgggtttggaaagcaccttaactgaatcatgtaagcatcaggacataagcagcactttgtggtcaaatgtggaagccggagacttcaaagcacctctgggacccactggttgaagtttgcaatagaaacttaagttttcccaaatccataaagccttagccctggttctcaatagaatcagggacctagcaggaaatgattttactcaacctaaaatgctggatcccaggcccgtgtagctataagaattctggcctggatcccaggtgtacaactatggacaagatatgggcctctactttctcctctataaaatgaggctggatgaaatgtcagctagggccattttggctgctgaggctctgggatttggtttagttactgaatgttagattttctgcctagaaagataactatctagatacaagtggttggatcctgtttttgtttgtggtacatgtgtctttccaagagagatgtgtcaccaattagccctgcctttaaagaaactattatgtgtattcctgggactcactgacaccaattttctttttatagtgatggttcaattttgaaaagatggcttttgtgaggccaggttaaggtgaccaggatcttgtatgatgaattccttccatccctgagactctggtactatattgtaaacctggctacagtagttaattacttgagattctttaattttggtctctgagctgggcgtggtggttcatgcctgtaatcccagcactttgggaggccaaggtgtgcggatcacaaggtcaggagttcgagacccgcctggccaagatggtgaaaccccatctctactaaaaatacaaaaattagctgggcgtggtggcgggctcctgtagtcccagctactcgggaggctgaggcagaagaatcacgtgaacccaggaggcagaagtggcagtgagccaagatcgcaccactgcactccagcctgggcgacagagcaagactctgcctcaaaaaaaaaaaaaaaaaaaaaaaatttttttttttttggtctctggaaatgaacacaagggcaggttattcctgggtcacttctgggcccccctgccctcccagccccacttgagtttctctctctggtgtgggtgaaccagtcagcctgaatgttctgcatttcagcactttagaacctccctgtgaagattttagccttagcccaaacatcaaattagacggttcacatgatggtttttgacctatttcctttctaatgtattccacatgatcatggtgttaaatagtgaaaagtactgtgttgtgtgtgcaccttctccgtgcatttattagactaaccagtcaagcagacagctcagttagggagaaaacaatactctgaaatttgaaggccaatctgttgttactaagctgtttatctctattgcctttttaaatgtctggataagttgttggtggaaattaagttacttaacctcattaataccaattctagagaaagttcttttcaccatggatagtaaccctggatcctctacggtactggctgagctggaagtgccaaaaagcactcctggctgcttctggttccatctgatgatgatgtgacacacactgctgaaaaggcccaagcagggcaagtgggatggctgaaggagggaaggagggggttcagaacccactggcctggatgggagaactgggtggaggcttccccaagagggaagacagataaacaaaacaaaacaaaaactgggtaaagaggaatgaatcactcagccctgatgtttcaattctacactgcattcctggccagtcgcatttgttttaatgcaggcatggccacagctctcctagagaattatctcaaagaccagaagggacctggagaggcctatttcttaggtttttccagttggacaaggaaggagtggtttcactcagcttctagaaggagttggagcctaagtttatctgcctccgggagctgcttgctttgttttggctccgaagaggtatcagatagttttgacacctcaggaaacttgaaccaagctgtgaaaccaagacctccctgcgtgaaaatcaaggtggtctccttgtggcttcaccaggatgtttgtgtcaggctgtctcagcagggtggggaatgaccagccagggagcacagtgagccttactcagcactggggagcgcactggtgaggcaaacccatgaacctcaagaactgggagtatgttccttcagggagaagttctggcccattgcacaaacacttggaaattaacttttccctaaattcaagatagtgtggtgtcggaaggaaatgggacagtaaattaggagacgcgggctccacctttaccttactacgtggcctttgatgagctggcttaacatccctgagtgattccatgatagagatctatactccaaactttattcctggtatctagttggcttcactgccacagacactgtactctctctttttagaagtttttttccttttttttccccctcaattggcttatttagtaaatttaggtctgaatgaattggtacctaaaagcttccaaatctatacatttcagaatatgggaattttcttcctcttcttcccccatatcccaacatggaattctggaaaactgtgcctcttcccctgttctgccttcatgggggagagactggatgaaatctacaaaaacagccaaaagtgccaccctggcttcatgtcttgaatttctaacttgctcttggcaaaggtcgctttattttttaatttttttccttgcattttcttttttattctattgctgctgcaaaaattaaggcaaaagtagctttcgatctttcatatttcatcctggtttcacaaggagtcacttatcttaggaggtctgtaagtcaggttacaaggccgggagcggtggctcacacctgtaatcccaacactttgagcggctgaggtgggtgtatcacctgaagtccggagtttgagaccagcctggccaacatggtgaaaccccgtctctactaaaaatacaaaaaattggctgggcatggtggtgggtgcctgtaatcccagctacttgggaagctgaagcaggagaatcacttaaacccaggtggcggaggttgcagtgagccgacatcgcgccattgcactccagcctgggtgacgagtgaaactccatctcaaaaataaaaattgaaaaatcaggttacaaaacaccatttttcccgaaataagacaataagaggcttttctctgaattcctttatattgagcctttcagaattctccctgggtgggcaatttctttaaatagtatttgaccctcagatcaatcctgggaatttttttcatttgggtagcaaaagctagagtattgctgtggcgattataatacttttaaaaagttttaccattttaaagttgccaacatttaattaaggttttcctttgaagcctcctttaatttagggagtaaaatgttagctaaaccaattatatactatatactatacactgtatctcctgtggccatgagaggtgtggctataccgaacagaaacatgcctactgttcaggaaagatgtcagttctggtaacacctctctgtattgggatctgttaattttgtaaatctaaattcttctgctcttggccaggtgcagtagttcatgccctgtaatcctagaactttgggaggctgaagggggggcggatcatttgaggtcaggagtttgagaccagcctggccaacatggtgaaaccccatctctactaaaaagtacaaaaattagctgggtgtggtggtgcgtgcctgtaatcccaactacttgggaggctgaggcaggagaatcgcttgaacctgggaggcagcggttgcagtaagccaagactatgccactgcactcccgcctgggtgacaaagcaatattctgtgtcaaataaataaattcattcttctgctctcctgacttagagaaatggtttgcttaaaatgctagtaacaaacatcacagtcaacaggagcttgcttcatgcgaaggatcaatgtgatttgtggatggagatgatagtgatgaaattcctgtttcatggggctgtttttcttttcatctcactgggcagcaggtttagtgaggcagtgagatgctgctgctgtggattcttgtagctatgcctcggcttcttggcatatcaggtaggaacctgttacaagtgaaatacttgaaacctctctgaccaagagcctctgatggagtgggaggtgagctaattctctgaccagcttggggcactgtttcagccactggtcacattccttgcttcaaactgaaattcagtttggctttgagtatagggatacatggtggattcatgtacttcagtgtttgttttgaccaaagtttatttttctagtgcattttctaagtcaaagtggtgaaaatatgtaataattttagtatgcatgactcagtctgaaacaataaaaatctctgaaaaatgtg

SEQ ID NO: 1554 - DNA, 1531 bp, HOMO SAPIENS
aaaagtcattgaagagcttgtggggctgtgggacctgcgccctctggaggaattccatacacccactcaactctggcaaataggaaattgtcaagtaggagacaaggagcaaagtcctatcacagcgggaggggacgccagcgcctgcagaggctgagcagggaaaaagccagtgccccagcggaagcacagctcagagctggtctgccatggacatcctggtcccactcctgcagctgctggtgctgcttcttaccctgcccctgcacctcatggctctgctgggctgctggcagcccctgtgcaaaagctacttcccctacctgatggccgtgctgactcccaagagcaaccgcaagatggagagcaagaaacgggagctcttcagccagataaaggggcttacaggagcctccgggaaagtggccctactggagctgggctgcggaaccggagccaactttcagttctacccaccgggctgcagggtcacctgcctagacccaaatccccactttgagaagttcctgacaaagagcatggctgagaacaggcacctccaatatgagcggtttgtggtggctcctggagaggacatgagacagctggctgatggctccatggatgtggtggtctgcactctggtgctgtgctctgtgcagagcccaaggaaggtcctgcaggaggtccggagagtactgagaccgggaggtgtgctctttttctgggagcatgtggcagaaccatatggaagctgggccttcatgtggcagcaagttttcgagcccacctggaaacacattggggatggctgctgcctcaccagagagacctggaaggatcttgagaacgcccagttctccgaaatccaaatggaacgacagccccctcccttgaagtggctacctgttgggccccacatcatgggaaaggctgtcaaataatctttcccaagctccaaggcactcatttgctccttccccagcctccaattagaacaagccacccaccagcctatctatcttccactgagagggacctagcagaatgagagaagacattcatgtaccacctactagtccctctctccccaacctctgccagggcaatctctaacttcaatcccgccttcgacagtgaaaaagctctacttctacgctgacccagggaggaaacactaggaccctgttgtatcctcaactgcaagtttctggactagtctcccaacgtttgcctcccaatgttgtccctttccttcgttcccatggtaaagctcctctcgctttcctcctgaggctacacccatgcgtctctaggaactggtcacaaaagtcatggtgcctgcatccctgccaagcccccctgaccctctctccccactaccaccttcttcctgagctgggggcaccagggagaatcagagatgctggggatgccagagcaagactcaaagaggcagaggttttgttctcaaatattttttaataaatagacgaaaccacgaaaaaaaaaaaaaaaaaaaaaaaaaaaa

SEQ ID NO: 1555 - DNA, 296 bp, HOMO SAPIENS
  misc_feature (138)..(138): n is a, c, g, or t
  misc_feature (263)..(263): n is a, c, g, or t
  misc_feature (265)..(265): n is a, c, g, or t
  misc_feature (268)..(269): n is a, c, g, or t
ggtggagcagaattctggacccctcagtgttccagagggagccattgcctctctcaactgcacttacagtgaccgaggttcccagtccttcttctggtacagacaatattctgggaaaagccctgagttgataatgtncatatactccaatggtgacaaagaagatggaaggtttacagcacagctcaataaagccagccagtatgtttctctgctcatcagagactcccagcccagtgattcagccacctacctctgtgccntnaannggaggtcaaattccgggtatgcactca

SEQ ID NO: 1556 - DNA, 529 bp, HOMO SAPIENS
  misc_feature (28)..(28): n is a, c, g, or t
  misc_feature (33)..(34): n is a, c, g, or t
  misc_feature (45)..(45): n is a, c, g, or t
  misc_feature (51)..(51): n is a, c, g, or t
  misc_feature (61)..(61): n is a, c, g, or t
  misc_feature (98)..(98): n is a, c, g, or t
  misc_feature (343)..(343): n is a, c, g, or t
tccctctgccacatacctaaattaatcntgcannacgacagtatncctgcntttgtataanctagaaatttcagttaataatgccctgaattgacttncctcatagctcttaaaacttctggttatatgtgtcaagatgaatattttgataaaagaataagtaaagcatcatgttcaggaaagtaagtgttgcagaagaaatgagcaatgatatggtctgatgtcctctacatttgatatatactatatatcaatttgatatatagtatgtatctgattgtagttaactccaggagattttccccttatcttagagtttgaaccatatagtgaccatgtattntcgaagaaaaatgaagggtatttccccttacaaaaagaaaaaggagtaaagatcataagcaggaagttcatggacacactaacaaaaataaatgaaatagtaattataatcataattgtttatacattacaatgtgtttcaccattttcaatatttaagtttttcccacactttgaatgttttctg

SEQ ID NO: 1557 - DNA, 527 bp, HOMO SAPIENS
  misc_feature (28)..(28): n is a, c, g, or t
  misc_feature (66)..(66): n is a, c, g, or t
  misc_feature (77)..(77): n is a, c, g, or t
  misc_feature (79)..(79): n is a, c, g, or t
  misc_feature (89)..(89): n is a, c, g, or t
  misc_feature (91)..(91): n is a, c, g, or t
  misc_feature (127)..(127): n is a, c, g, or t
aacctcactccacagtgggcaagttttnacttcagaataacttttgaaataaatttccccggaacngctcgcccctntnaacaggactntnaggctccactacgttgctgttattcctgacagagtnatgaaaggaaatttaaacaagtggcattttgtaaaaccaccccagcctgtgtgactttcaatgcctgtccgatttggctgggaaaatattttagatccccagggctacatactgttttttataccctcctctttgtgtcagtgatggaaaaggtgtcaatctgctctgaatctctctgaacacctcaggaaataggcttttggctcgcagagaggggatgagaaatagttttgaaccaccaagtctcttggagggtgtcagcagccccttgaagtaaaagtgtggctgcaaacccagctctctgcattagccaggtgaacctgagcatgctgcatacaccctcagtcttggtttcttaatatgtaaaatgggaatgaatatgcgcacctcgtggggtggt

SEQ ID NO: 1558 - DNA, 3292 bp, HOMO SAPIENS
ctgtcccactgggcaggtgcctctgacggagaggaggcgtcgtcgggaagtatgtggccgtggctgctctggcatgatcctgaagactggcacgaaggggaatggagccgcacagagaatttcaggcatcagaggggaagcgcaggtttgtctacagattttgagcgttcgaagttgacccctgactaagtatactttgctgctccctcagcctttgaaaaaatgtctgtcacatatgatgattccgttggagtagaagtgtccagcgacagcttctgggaggtcgggaactacaagcggactgtgaagcggatcgacgatggccaccgcctgtgcagcgacctcatgaactgcctgcatgagcgggcgcgcatcgagaaggcgtatgcgcagcagctcactgagtgggcccggcgctggaggcagctcgtggagaaagggccccagtacgggaccgtggagaaggcctggatggccttcatgtccgaggcagagagggtgagcgagctgcacctcgaggtgaaggcctcactgatgaacgatgacttcgagaagatcaagaactggcagaaggaagcctttcacaagcagatgatgggcggcttcaaggagaccaaggaagctgaggacggctttcggaaggcacagaagccctgggccaagaagctgaaagaggtagaagcagcaaagaaagcccaccatgcagcgtgcaaagaggagaagctggctatctcacgagaagccaacagcaaggcagacccatccctcaaccctgaacagctcaagaaattgcaagacaaaatagaaaagtgcaagcaagatgttcttaagaccaaagagaagtatgagaagtccctgaaggaactcgaccagggcacaccccagtacatggagaacatggagcaggtgtttgagcagtgccagcagttcgaggagaaacgccttcgcttcttccgggaggttctgctggaggttcagaagcacctagacctgtccaatgtggctggctacaaagccatttaccatgacctggagcagagcatcagagcagctgatgcagtggaggacctgaggtggttccgagccaatcacgggccgggcatggccatgaactggccgcagtttgaggagtggtccgcagacctgaatcgaaccctcagccggagagagaagaagaaggccactgacggcgtcaccctgacgggcatcaaccagacaggcgaccagtctctgccgagtaagcccagcagcacccttaatgtcccgagcaaccccgcccagtctgcgcagtcacagtccagctacaaccccttcgaggatgaggacgacacgggcagcaccgtcagtgagaaggacgacactaaggccaaaaatgtgagcagctacgagaagacccagagctatcccaccgactggtcagacgatgagtctaacaaccccttctcctccacggatgccaatggggactcgaatccattcgacgacgacgccacctcggggacggaagtgcgagtccgggccctgtatgactatgaggggcaggagcatgatgagctgagcttcaaggctggggatgagctgaccaagatggaggacgaggatgagcagggctggtgcaagggacgcttggacaacgggcaagttggcctatacccggcaaattatgtggaggcgatccagtgatgagtcggggacaggccagcggggggacggaggcggcgggcccaggagcctcagccagccacgtgggcatccactccttttcctgcaagagatgatggttccattgctcttggcttcatggtgttcctggaaggcagatgagctggtcatttcgcctgggactcggcacctttccgagtgcagctggagggatctgagcgcaggaagacgcagaacaacagaaatagccgcccctccccgcccactgtgcctgttggcctatcatagatctctatgttcttgactttgtctctcctttccgagtcaatggtgggttacactgatcttgttccactgattactctctctgacgagtccatcacctgcaacttaaatgaacaagcttacatcccattttgagtgaagattttgaggtttttaatttaaaggctgtgtacagttatacttttttatacacctgttcatttctacttaaattatggcacagattgatgcgcaccagtcttgaggaaacgatctccctattcccttaccctgttactcagccacgccgtgtgtaggcttagcctcaggtggcagatgtttgaggaaaggaattatgccaggaaggtgggaccgggttatggtcgggtttctattgggaatgctctttgtgcttttgggcatctgaatggaagctttacatagaaccttaggtagaactcccccaaatcgccatatttaaaaattattttcactctattcttgcttaaaactgtactcttttgcaaattaacaattttatcactgattcagagttaaaaagaagactaacttttcaagcaaatgcatctgtaaagatgctttagattagactgtcatgtctcagtgtctatctgtatatattatttgatattcagagaatctaaagcactcgtctactgttttaatgagatttaacagcttttaacagtgagtttcgtttgtaaactgcttgaagtctgtggcattcaggcacacgtctggctggccggctgggtctcctcccgggctcagtgggcctggggcctctctgacgtggtgcctgctggagggaggctcgtcgtcaccagctgactgctggtccggcttctgaccggcctttgtcctggctccgtagcagaacactgtaaaagtgcccgcgtctttgcagtagttgcagatttcagtcgtcgtgttacttgtgcacaaacagaagctgggtcttacccgcagcacgagtgtctcgggctgcccggagtcgcccgggagcaggtgctgcagccagagttacgcgggggccacgcgggccggcgggggtggggggaacgtgggggaacctgtgtttcacgtgactcagcagtgcccgccgccgtcaccagctatgcattcactccgtttccagtgagcagatgtcttgcttggaaagtggacctgtgtctgtgtctgtcctgagaacttaccagcagaaatcctcatttctgtgctacggatttaccaaaaattgtcaagtctttttcagtttaacagttcctttacatgtgtagtatttgaggaaaaaaatcaataaacagttgatctcgtgcatatggaaaaaaaaaaaaaaaaaaaa

SEQ ID NO: 1559 - DNA, 1813 bp, HOMO SAPIENS
attatctccagcacagcactgcctcctggtgcggattatattccagttttcaaaaggaaccatagaagatacaagcaatacgattttattttggagggatttctagcatcataggtcaaagacgttattaagtatcgactctgaaaaagcaactataaatactgcaaatcgactaagccagaggacgcaaatatatcctgcgtgttgtgtgctggactgtggttgagacttcatggtcgtgctctgggctcatgggggcagctgactgctcataattaagattgctgttgccgctgcctgtgttccaaagagaacacaagaggacagagctaaggtgtaggaatgcggaagaacttgcagaaactagagctagtcttcggattgaaatgaattaccaataaagggttgggaaatggatcaaggagagggaagcgttttgatggtccctgctccgaggttcagcccatttgcagttgctgataaccttgtcaggtcaccagataaaggcaagtcttgtcaccctcaggcacctggctgcgaagtaataaaacggttgccttatcatctaaaggtggagtgagtcaaacctcagcccagggtaattatagtaaactgaaattgcctgtcctttacaaaaaaaaaggcggagggagagagaaaggaaaagggcttaaggcaggaaattgtgtttgtctttctccttggatttaaaaaagaaacgagcaaaacagcaaaaagttttccagggagtgagaaaagcagcccggctagactcccctcaccctgggttaacaggattgccgacagatcaggcccacgtgatggtcaagaaaagaggctcaagctgatgaaaatccaagaaatcttcttaggagccttcctttctaaatgtaaatgactgagtcattgctttgctaaggagggaaggaagttacaatcacaccaagtgactcattcattgctgttagctccggcagttggatgaaaagttttagcaaaagcagcaacaaatgtactttaaatactagcacagtaagggaattcctgtctttcaggatgaatgccatccacacaaaagagctcctgttgacatctcatttacaatctcccccaggacacagacaagaccctttcaataaatccagctcagaaacacctattgttcaaaatcttcaactcgccacaggctaccaccactccctatggctttgcaaaattaaagatttagaagaaggatggggcggtggaagctatgaaaagaggcaggaaaaaagttcctttgacccgatgctgtcagagagcgtgcatgaagaagaaagttaatggtatttccatttatataagaagcgcctaagaaatgcctgtgacgttcgtgaactagtgattgtgaattccaaatttgatgccaactttatgtgtaaagaagctaactcctgccaacatcgtggctgaatgaacagctgggactatgcttaacccattcccagcttataaaagccccatggcagctgcagtgaagcatcaggtgagtctgatatgggctgtctgttccctcggggatttgaatcttgcctgtcctttccaagtggagtcttgtgcctaagtgctagagcccactccttcctccccactgattcccttctttccatttctgccatttcccttcttcttttaataaaacttggacattttctggagttacatgtttttcttgggatgtacttcaaattaaggagcatatttatgtttacaaacacacgcacacgcacacacacacacacatacacacaaaagaatcgggcatttctcaagt

SEQ ID NO: 1560 - DNA, 3235 bp, HOMO SAPIENS
ggcgccggccgcgcgctgctcggggcccgactgcggcgcgagggcggcgcgggagcgacgctggcccggaccgaggaaactatgccccagacgtccgttgtcttctccagcatccttgggcccagctgtagcggacaggtgcagcctggcatgggggagcgtggaggcggggccggtggcggctccggggacctcatcttccaagatggacacctcatctctgggtccctggaggccctgatggagcaccttgttcccacggtggactattaccccgataggacgtacatcttcacctttctcctgagctcccgggtctttatgccccctcatgacctgctggcccgcgtggggcagatctgcgtggagcagaagcagcagctggaagccgggcctgaaaaggccaagctgaagtctttctcagccaagatcgtgcagctcctgaaggagtggaccgaggccttcccctatgacttccaggatgagaaggccatggccgagctgaaagccatcacacaccgtgtcacccagtgtgatgaggagaatggcacagtgaagaaggccattgcccagatgacacagagcctgttgctgtccttggctgcccggagccagctccaggaactgcgagagaagctccggccaccggctgtagacaaggggcccatcctcaagaccaagccaccagccgcccagaaggacatcctgggcgtgtgctgcgaccccctggtgctggcccagcagctgactcacattgagctggacagggtcagcagcatttaccctgaggacttgatgcagatcgtcagccacatggactccttggacaaccacaggtgccgaggggacctgaccaagacctacagcctggaggcctatgacaactggttcaactgcctgagcatgctggtggccactgaggtgtgccgggtggtgaagaagaaacaccggacccgcatgttggagttcttcattgatgtggcccgggagtgcttcaacatcgggaacttcaactccatgatggccatcatctctggcatgaacctcagtcctgtggcaaggctgaagaaaacttggtccaaggtcaagacagccaagtttgatgtcttggagcatcacatggacccgtccagcaacttctgcaactaccgtacagccctgcagggggccacgcagaggtcccagatggccaacagcagccgtgaaaagatcgtcatccctgtgttcaacctcttcgttaaggacatctacttcctgcacaaaatccataccaaccacctgcccaacgggcacattaactttaagaaattctgggagatctccagacagatccatgagttcatgacatggacacaggtagagtgtcctttcgagaaggacaagaagattcagagttacctgctcacggcgcccatctacagcgaggaagctctcttcgtcgcctcctttgaaagtgagggtcccgagaaccacatggaaaaagacagctggaagaccctcaggaccacccttctgaacagagcctgaggcggatgcagcccgcgacgccagaggaagcacgtgcactaactgggtttaaattttgactgatgtgggttgagatgaggaggcctcactggttggggtccattttgtatataacttttatgagaaaaaaatggtaattatttcacgcatcaacctttggcacttacaaagttttttttgtttattttaaataacagggcagggccctgctttggggagggggaggggagagtatcatgggagatggtatccatgataacatcttattctaatgaaatgtagatttttattttctacttttgattattaacatcttatgaaaaaaatattttaaaaaacccagccaaaaccaacgtgagccctgcctgctcggacgcctttccagccagtgtctctgacgtcggggttagtgccttagagggtactggggtctggtcttcctgctctgtggtttgggctgcggtgagtcccactccacctgggcgcctgccctcaggagcctgggctgcgaggctccataggagggctggtggctgggaggtcgcgtccgcacacttctggaagtgagcctttgagtacgggctgtccaaagtttacattttcattttcctttcagggatttgtggggtcagggaggggcagggggcacctggcagcatattttctgtgacaatgtgtccagcaaatcattcttcaactacattttagaaaggaggaaatctaaaataaggtaagggagggaagcatggagttgtcagttttctgggctgtgactgaaagacacactgagctgtgatgaagaaaaatacatggccgactccagggtggtgacatttagagctagtcttgaaacctatcatctacagaggggagggcagccaacagccctcttcccacctgggtaggcagcgccctaattggaattggaaacagaaaattcgccaggccatactgctggagcccattcagataaaactgcccaatactgagaggtgttttctacacccagctagaggagcacactccattttcccatgtctgacttcgtggtgtgagccctgggccctactgaccatggcgcaggacagctgtccttcagaaagcacacggtcaatccacgtggaccgtctccctcgcaggaactccgcatccttgtccctctgcattcccagtttccgcaggagccttgatcaatggggaagcctgggtgaggatgggccaggtcccaattcccaaagctcctggaagagcctgaagacattgggaaaggctgggcctggggaggaggcagccctgggcccgctgcccatgcctctggtcctgggtggagcaggaatagttccactgtattgtcacagtgtgtttgcactttctgaggttctagctagtacagattgtatattgatagtacatattgctttgtttatgtctttgagatgagaaaggcttaaaacttgagaatatatatttggaatacagccttagaacggtttctgtacacacccacgtgcacttcacgggtgatcagttctagtacctacttgaaacagtgtctgtctgctactttattttcccaatttgatacataccctgatttgatgttttggtatttgagatgaactctgagtatgaagctgtaccataatgcaggacgtcagttttggtgtgactggacatacttgcttcaataaaagaatacatcactccc

SEQ ID NO: 1561 - DNA, 251 bp, HOMO SAPIENS
  misc_feature (146)..(146): n is a, c, g, or t
gaaggatcctgtatttggtaaatttgggtgtaattatgagtttaatgtatgcctttttggcagtatcctttctggcttcatcatgctatatccccattgtccacaacattgactggtgcttagtaaggtgctcaaggacgcatcanatgaatgaacaaagactagagacagagttgcctggccttattctttaaatacccacactataggactgcaacaaaatacagagccctagtgattagaagacttca

SEQ ID NO: 1562 - DNA, 375 bp, HOMO SAPIENS
tcaaatcctactctggaccctattcttgctttggtgggaaatgtggcctaagtaattattggaggaccctctgcttctttggaatctctgaagtattaggaggccaatctggtatggggaaaatgaaggaggccctctctccttcagttcatcacggctgctgctaacccattcctgtcccagctgatagggtatctgagaagatgggtgattcttctccctccaagccaagcttgacaagactagaagctgtgaggtatctgatctggcctctgtagatgaacaattgagccacaccctgaagttttctcacctccccaatgtattgccatgaggataaggacaggtccctattggtcatgacatcccttgctg

SEQ ID NO: 1563 - DNA, 510 bp, HOMO SAPIENS
tcccaggaaatttagtacccatcaaagaggagtcacagacaatgaatacttcaaaatgcttgagcctcaaaataatgaaagcgggcaaaattaatcaagaatcaagcaatgaacaactagtctataacacaacatttttctactttcaagaaaacacaagcattcttacacattgaacaccaagccacccttgtctagcagttaccacaagtttcatgaataaagtcacctgcatataaattcaacatgcagattaacactctataccttcttcctcccaaaagcccagtaaaaaagcaggagtacaaattacaaaaccagaaaaattaaaataggaagaaacaatactgaagagctcaataaatgtattgaacatggtaagaagagtggtatctgccttagcagggctatcacagatgagtgacagtaggactgaccctgcagaattcaggcaggcctaggatttagaggcaagagtgtggcatggagctacacagaggcaagtaattt

SEQ ID NO: 1564 - DNA, 2005 bp, HOMO SAPIENS
cgggcatgtcctgatctggcggccgctcctaccaccctgggcagccgagcagagtcgtccccagcgggtctccctccctgcctccctgactttgcaacaccgcgttccgggaggaccggcctcggcgagggaggaggcgggggagctgcgaacacccagacccaaaccctgacatgctctggggcggagaggaggaagccaggagctgagcgcgccgcgggggctgcttcgccctccggctccgagcgccgggctccgggcgccctgccctgcgcctgggcagcagccttgctggtcttgggggcgccccccgcttcccgccccgggggtccgcggccggcaggaccatgctgctgaaagagtaccggatctgcatgccgctcaccgtagacgagtacaaaattggacagctgtacatgatcagcaaacacagccatgaacagagtgaccggggagaaggggtggaggtcgtccagaatgagccctttgaggaccctcaccatggcaatgggcagttcaccgagaagcgggtgtatctcaacagcaaactgcctagttgggctagagctgttgtccccaaaatattttatgtgacagagaaggcttggaactattatccctacacaattacagaatacacatgttcctttctgccgaaattctccattcatatagaaaccaagtatgaggacaacaaaggaagcaatgacaccattttcgacaatgaagccaaagacgtggagagagaagtttgctttattgatattgcctgcgatgaaattccagagcgctactacaaagaatctgaggatcctaagcacttcaagtcagagaagacaggacggggacagttgagggaaggctggagagatagtcatcagcctatcatgtgctcctacaagctggtgactgtgaagtttgaggtctgggggcttcagaccagagtggaacaatttgtacacaaggtggtccgagacattctgctgattggacatagacaggcttttgcatgggttgatgagtggtatgacatgacaatggatgaagtccgagaatttgaacgagccactcaggaagccaccaacaagaaaatcggcattttcccacctgcaatttctatctccagcatccccctgctgccttcttccgtccgcagtgcgccttctagtgctccatccacccctctctccacagacgcacccgaatttctgtccgttcccaaagatcggccccggaaaaagtctgccccagaaactctcacacttccagaccctgagaaaaaagccaccctgaatttacccggcatgcactcttcagataagccatgtcggcccaaatctgagtaactttatataaatatctcatggggttttatattttcatttgttgttgttgtttttttttaagaatcttctgatagagaaaaagactgctttgtcactcaaacatgttccttcgacctttcagtgtgcatgtgactcagtaacttcacatagaatatgattccctaagtatgctacacagcatcatattagatgtaagatgtaagacttgcaaaggacagaaggaatcttctgtaaccacatagctgtatgccagagaggaagccttgttattgggcatttgatgaggtttggcatggacttcaaggataaatgaatgaaaactttgcaccacttttgttacaaggtacggtagaaaatagtgaagtcagtttcctctcatcaaatctaaaattctccaaaatactctcaggcataacatacttagctgttaaattttgaactgctaattactaatacttgaataccaatagttactgagattcctattttgtggttagtctgactcaggatttggagcctaattaactctaaacttttgaaaattttaatcatcaagctatagaggctccaagtgcaattaataataactcatttataccttccacagaatttaataaagattctacttgtttctgtcttttaaaaaaaaaaaaaaaaaa

SEQ ID NO: 1565 - DNA, 7984 bp, HOMO SAPIENS
atatcccagtggcccccgtgcggcgactttagctgctgctgtctcagccgctccacagcgacggcggcggctgcggcttagtcggtggcggccggcggcggctgcgggctgagcggcgagtttccgatttaaagctgagctgcgaggaaaatggcggcgggaggatcaaaatacttgctggatggtggactcagagaccaataaaaataaactgcttgaacatcctttgactggttagccagttgctgatgtatattcaagatgagtggattaggagaaaacttggatccactggccagtgattcacgaaaacgcaaattgccatgtgatactccaggacaaggtcttacctgcagtggtgaaaaacggagacgggagcaggaaagtaaatatattgaagaattggctgagctgatatctgccaatcttagtgatattgacaatttcaatgtcaaaccagataaatgtgcgattttaaaggaaacagtaagacagatacgtcaaataaaagagcaaggaaaaactatttccaatgatgatgatgttcaaaaagccgatgtatcttctacagggcagggagttattgataaagactccttaggaccgcttttacttcaggcattggatggtttcctatttgtggtgaatcgagacggaaacattgtatttgtatcagaaaatgtcacacaatacctgcaatataagcaagaggacctggttaacacaagtgtttacaatatcttacatgaagaagacagaaaggattttcttaagaatttaccaaaatctacagttaatggagtttcctggacaaatgagacccaaagacaaaaaagccatacatttaattgccgtatgttgatgaaaacaccacatgatattctggaagacataaacgccagtcctgaaatgcgccagagatatgaaacaatgcagtgctttgccctgtctcagccacgagctatgatggaggaaggggaagatttgcaatcttgtatgatctgtgtggcacgccgcattactacaggagaaagaacatttccatcaaaccctgagagctttattaccagacatgatctttcaggaaaggttgtcaatatagatacaaattcactgagatcctccatgaggcctggctttgaagatataatccgaaggtgtattcagagattttttagtctaaatgatgggcagtcatggtcccagaaacgtcactatcaagaagcttatcttaatggccatgcagaaaccccagtatatcgattctcgttggctgatggaactatagtgactgcacagacaaaaagcaaactcttccgaaatcctgtaacaaatgatcgacatggctttgtctcaacccacttccttcagagagaacagaatggatatagaccaaacccaaatcctgttggacaagggattagaccacctatggctggatgcaacagttcggtaggcggcatgagtatgtcgccaaaccaaggcttacagatgccgagcagcagggcctatggcttggcagaccctagcaccacagggcagatgagtggagctaggtatgggggttccagtaacatagcttcattgacccctgggccaggcatgcaatcaccatcttcctaccagaacaacaactatgggctcaacatgagtagccccccacatgggagtcctggtcttgccccaaaccagcagaatatcatgatttctcctcgtaatcgtgggagtccaaagatagcctcacatcagttttctcctgttgcaggtgtgcactctcccatggcatcttctggcaatactgggaaccacagcttttccagcagctctctcagtgccctgcaagccatcagtgaaggtgtggggacttcccttttatctactctgtcatcaccaggccccaaattggataactctcccaatatgaatattacccaaccaagtaaagtaagcaatcaggattccaagagtcctctgggcttttattgcgaccaaaatccagtggagagttcaatgtgtcagtcaaatagcagagatcacctcagtgacaaagaaagtaaggagagcagtgttgagggggcagagaatcaaaggggtcctttggaaagcaaaggtcataaaaaattactgcagttacttacctgttcttctgatgaccggggtcattcctccttgaccaactcccccctagattcaagttgtaaagaatcttctgttagtgtcaccagcccctctggagtctcctcctctacatctggaggagtatcctctacatccaatatgcatgggtcactgttacaagagaagcaccggattttgcacaagttgctgcagaatgggaattcaccagctgaggtagccaagattactgcagaagccactgggaaagacaccagcagtataacttcttgtggggacggaaatgttgtcaagcaggagcagctaagtcctaagaagaaggagaataatgcacttcttagatacctgctggacagggatgatcctagtgatgcactctctaaagaactacagccccaagtggaaggagtggataataaaatgagtcagtgcaccagctccaccattcctagctcaagtcaagagaaagaccctaaaattaagacagagacaagtgaagagggatctggagacttggataatctagatgctattcttggtgatctgactagttctgacttttacaataattccatatcctcaaatggtagtcatctggggactaagcaacaggtgtttcaaggaactaattctctgggtttgaaaagttcacagtctgtgcagtctattcgtcctccatataaccgagcagtgtctctggatagccctgtttctgttggctcaagtcctccagtaaaaaatatcagtgctttccccatgttaccaaagcaacccatgttgggtgggaatccaagaatgatggatagtcaggaaaattatggctcaagtatgggtgggccaaaccgaaatgtgactgtgactcagactccttcctcaggagactggggcttaccaaactcaaaggccggcagaatggaacctatgaattcaaactccatgggaagaccaggaggagattataatacttctttacccagacctgcactgggtggctctattcccacattgcctcttcggtctaatagcataccaggtgcgagaccagtattgcaacagcagcagcagatgcttcaaatgaggcctggtgaaatccccatgggaatgggggctaatccctatggccaagcagcagcatctaaccaactgggttcctggcccgatggcatgttgtccatggaacaagtttctcatggcactcaaaataggcctcttcttaggaattccctggatgatcttgttgggccaccttccaacctggaaggccagagtgacgaaagagcattattggaccagctgcacactcttctcagcaacacagatgccacaggcctggaagaaattgacagagctttgggcattcctgaacttgtcaatcagggacaggcattagagcccaaacaggatgctttccaaggccaagaagcagcagtaatgatggatcagaaggcaggattatatggacagacatacccagcacaggggcctccaatgcaaggaggctttcatcttcagggacaatcaccatcttttaactctatgatgaatcagatgaaccagcaaggcaattttcctctccaaggaatgcacccacgagccaacatcatgagaccccggacaaacacccccaagcaacttagaatgcagcttcagcagaggctgcagggccagcagtttttgaatcagagccgacaggcacttgaattgaaaatggaaaaccctactgctggtggtgctgcggtgatgaggcctatgatgcagccccagcagggttttcttaatgctcaaatggtcgcccaacgcagcagagagctgctaagtcatcacttccgacaacagagggtggctatgatgatgcagcagcagcagcagcagcaacagcagcagcagcagcagcagcagcagcaacagcaacagcaacagcaacagcagcaacagcagcaaacccaggccttcagcccacctcctaatgtgactgcttcccccagcatggatgggcttttggcaggacccacaatgccacaagctcctccgcaacagtttccatatcaaccaaattatggaatgggacaacaaccagatccagcctttggtcgagtgtctagtcctcccaatgcaatgatgtcgtcaagaatgggtccctcccagaatcccatgatgcaacacccgcaggctgcatccatctatcagtcctcagaaatgaagggctggccatcaggaaatttggccaggaacagctccttttcccagcagcagtttgcccaccaggggaatcctgcagtgtatagtatggtgcacatgaatggcagcagtggtcacatgggacagatgaacatgaaccccatgcccatgtctggcatgcctatgggtcctgatcagaaatactgctgacatctctgcaccaggacctcttaaggaaaccactgtacaaatgacactgcactaggattattgggaaggaatcattgttccaggcatccatcttggaagaaaggaccagctttgagctccatcaagggtattttaagtgatgtcatttgagcaggactggattttaagccgaagggcaatatctacgtgtttttcccccctccttctgctgtgtatcatggtgttcaaaacagaaatgttttttggcattccacctcctagggatataattctggagacatggagtgttactgatcataaaacttttgtgtcacttttttctgccttgctagccaaaatctcttaaatacacgtaggtgggccagagaacattggaagaatcaagagagattagaatatctggtttctctagttgcagtattggacaaagagcatagtcccagccttcaggtgtagtagttctgtgttgaccctttgtccagtggaattggtgattctgaattgtcctttactaatggtgttgagttgctctgtccctattatttgccctaggctttctcctaatgaaggttttcatttgccattcatgtcctgtaatacttcacctccaggaactgtcatggatgtccaaatggctttgcagaaaggaaatgagatgacagtatttaatcgcagcagtagcaaacttttcacatgctaatgtgcagctgagtgcactttatttaaaaagaatggataaatgcaatattcttgaggtcttgagggaatagtgaaacacattcctggtttttgcctacacttacgtgttagacaagaactatgatttttttttttaaagtactggtgtcaccctttgcctatatggtagagcaataatgctttttaaaaataaacttctgaaaacccaaggccaggtactgcattctgaatcagaatctcgcagtgtttctgtgaatagatttttttgtaaatatgacctttaagatattgtattatgtaaaatatgtatatacctttttttgtaggtcacaacaactcatttttacagagtttgtgaagctaaatatttaacattgttgatttcagtaagctgtgtggtgaggctaccagtggaagagacatcccttgacttttgtggcctgggggaggggtagtgctccacagcttttccttccccaccccccagccttagatgcctcgctcttttcaatctcttaatctaaatgctttttaaagagattatttgtttagatgtaggcattttaattttttaaaaattcctctaccagaactaagcactttgttaatttggggggaaagaatagatatggggaaataaacttaaaaaaaaatcaggaatttaaaaaaacgagcaatttgaagagaatcttttggattttaagcagtccgaaataatagcaattcatgggctgtgtgtgtgtgtgtatgtgtgtgtgtgtgtgtgtatgtttaattatgttaccttttcatcccctttaggagcgttttcagattttggttgctaagacctgaatcccatattgagatctcgagtagaatccttggtgtggtttctggtgtctgctcagctgtcccctcattctactaatgtgatgctttcattatgtccctgtggattagaatagtgtcagttatttcttaagtaactcagtacccagaacagccagttttactgtgattcagagccacagtctaactgagcaccttttaaacccctccctcttctgccccctaccacttttctgctgttgcctctctttgacacctgttttagtcagttgggaggaagggaaaaatcaagtttaattccctttatctgggttaattcatttggttcaaatagttgacggaattgggtttctgaatgtctgtgaatttcagaggtctctgctagccttggtatcattttctagcaataactgagagccagttaattttaagaatttcacacatttagccaatctttctagatgtctctgaaggtaagatcatttaatatctttgatatgcttacgagtaagtgaatcctgattatttccagacccaccaccagagtggatcttattttcaaagcagtatagacaattatgagtttgccctctttcccctaccaagttcaaaatatatctaagaaagattgtaaatccgaaaacttccattgtagtggcctgtgcttttcagatagtatactctcctgtttggagacagaggaagaaccaggtcagtctgtctctttttcagctcaattgtatctgacccttctttaagttatgtgtgtggggagaaatagaatggtgctcttatctttcttgactttaaaaaaattattaaaaacaaaaaaaaaataaatttttttgcaatcctttcctcagacctggctccaggctaactggaaggcagcactcccttttttatatagtagaaaaatgaagtttattataagtttttatattttctacttgttcatttggtgcaaactcaagatttcttttaataggtgcagtctttgagataatttgtttttacctgtattgccctttatcttttttaggtaattctttgtactcctgctgtctacctctcctcacaccccagcaccccccattttttcaaaccttggtatctgttgggtgaacagtataatcttttcatctgcttttagaatgtgggatatttccagtacctactttttttttttttttttgctgaatccaaagatatataaataaaatatatatattttataaagatcagaatgatataaaggagatacatgtttcttcctttaaaaaataaacggaagttacattgttaatgttcatattatgatgccacttttctaaactgcatctggattgaaaggtgtaaatatcaataacagtgctacttagttatcagtatttaatatctgaggtgagttgggggtatctatattaggggtagggtattacagaagataattggcttgatgtcctagaagttctttgatccagaggtgggtgcagctgaaagtaaacagaatggattgccagttacatgtatgcctgcccagttccctttttatttgcagaagctgtgagttttgttcacaattaggttcctaggagcaaaacctcaaggattgatttattgttttcaactccaaggcacactgttaataaacgagcagggtgttttctctcttcctttctaatatatggagtttcgaagaataaaatatgagagcaatatttaaattctcaggaattgacttatactcttgagaatgaattcagtttcaatcaagtttacattatgttgcttaaaaaaatagaaattattctttatcttgcaaagaattgaaaccacatgaaatgacttatgggggatggtgagctgtgactgctttgctgaccattttggatgtcattgtaaataaaggtttctatttaaaattgga

SEQ ID NO: 1566 - DNA, 3846 bp, HOMO SAPIENS
tttcggcctcgggacgccgtgacgttgcgttcctccagtcccttgccacctccctctttcttcccctctggggaagctcagtgctggacttccgaagaccttttacgacattgagtctcggagttggtctcagcgccggatccacttttcggcaaagtgacgtggacgtcaacagcaatggcggaaggagaagatgtgccgccgctgccaacgtcgagcggcgacggctgggaaaaagatcttgaagaagctctggaagcaggaggttgtgatcttgaaacgttgagaaatataattcaaggaagaccgctgcctgctgatctgagggccaaagtttggaagattgctctgaatgttgcaggaaaaggtgatagtttggcatcatgggatggtattttagacttgccagaacagaacactattcacaaagattgcctgcagtttattgaccagctttcagtgccagaggagaaggcagcagaattacttttggatattgaatctgtaattaccttttattgtaaatcacgtaacattaaatatagcacatcccttagctggatacatctactgaaaccattggtgcatcttcaactgccacgcagcgatttatacaactgcttttatgccataatgaataagtacattcccagggattgttcccagaaagggagaccatttcatctcttcaggttgctcatccaataccatgagcctgagctttgttcttatcttgatacaaagaaaattactccagactcctatgcactcaactggcttggaagtctttttgcatgttactgttccactgaagtcactcaggcaatatgggatggatatctacaacaagcagatccattttttatttatttcttaatgttaattatccttgttaatgcaaaagaagttattttaacacaagagtcagacagcaaagaagaagttatcaagttcttggaaaatactccatccagtctgaatatagaagatatagaagaccttttctctctggctcagtattattgcagcaaaacaccggcttcttttaggaaggataatcaccatctctttggtagtactttgttgggaattaaggatgatgatgcagatctgagtcaggctctttgtctggccatctccgtgtcagagatccttcaagcgaatcagctacaaggggaaggagtccggttctttgtggtggattgccgtcctgcagaacaatataatgctgggcatttatcaactgctttccacttagattcagacctgatgcttcagaatccatctgagtttgcacagtcagtaaaatccttgctggaagcacagaagcagtccattgagtctggctccatagctggtggggagcacctctgttttatgggcagtggcagggaggaagaagacatgtatatgaacatggtcctggcacactttttacagaaaaacaaagaatatgtgagtattgccagtggaggatttatggcactgcagcagcacctggcagacattaatgtggatggaccagaaaatggatatggccattggattgctagtacctcaggctcaaggagcagtatcaattctgttgatggtgaatctcctaatggctcaagtgatagaggaatgaaatcactagtaaataaaatgactgtggctttgaagacaaaatccgttaatgtcagggaaaaagttatcagttttatagagaatacatcaactcctgtggatcggcatgtgagcagcagtgacagagtgggcaagccttaccgtggcgtaaagcctgttttcagcattggggatgaagaagaatacgacacagatgaaattgacagttcttcaatgtcagatgatgatagaaaagaggttgtaaacattcagacttggataaacaaaccagatgtcaaacatcattttccttgtaaagaagtaaaagaaagtggacacatgtttcccagtcatctgttggttactgcaacacatatgtactgtttaagggagattgtttcacggaaaggattggcttatatacagtctcgacaagcgctgaattctgtagttaaaattacatccaaaaaaaaacatcctgaactcattaccttcaagtatggaaatagcagtgcttcaggaatagaaatcttggcaatcgaaaggtatttgattccaaatgcaggggatgcaactaaagccataaaacagcagatcatgaaagttttggatgctttggaaagttaatataaaagaaaattatataaaaagaaattaagacaaccaagagaaacatggacatatacctcctgactgaatactaactggagacctttcatttgctcatggggctgcttaaatagcaggtctaagaaagtgtaaattattataatcaatctgtggacagtaaactttttaaaaatttttcttctgcattttggttttataaaatgatgtattataaaggtcagttattaaattactttgaagtaactgaccctgtgcccttatggactaagtaagggtacagaatgcagttctgttttgaagagctgttttaagggaacatgcatcactttcgggatcaaaaacaactgtacacatacatatctgcagtgtcttcactgaaaattagagatagaattagttgaagagacttccttaattgctacattgttttactcactgagcaatatcagaaactaaaacatagattaataattcactcactgtttctattcttcttaaaaagagtgaaatctttttaatggaatggttgaagattcctgccaactcaaaatacagtacagctagtaaaatgttgaaacatcagtttctaaatcacctttgctccattagctaattttttggacactaaatgcttcaaagataagaaacttcatcctaatgatttctaaagagcagttaaaagcattaaaataagtaggtaggctgttaagattaaaattaacattttggggacagaattgtgtctgtaaaaatgtcattggttttattacaagcggattattttattcatattttaaaacaaatgtttaagccacattgatttatcctcattgaggattatggtctgtgaccacagtaatatccacttatataaatgccaaataatcagagagcttataaagtacaattgtttttgtcatcattttctgaatttctttctcttcttttggttttgtcctctcattgaagttccagtggtttgaaattagttttggacacattgtcttaatgtactgaaaattgctctgctgtattttgcagcgttcttcatttaatttataatggtccatattagacacatttggtaagagaagtccaggaacacatttagggccatggaatagtattttgtaaaatccatttgggaagttgcaatacccacaatctgacatgtcctaaaatgtaagggattatctctaaggggttgatgggagaaatatttagatgtaccctgttaacagccagtcattttgatttacttatggaaatcaagtgaataaaaggcaacataatttgggaaattttattctaatatctaataaaaacagtttgagtggttgaagacatctgcatgaaattgcacctaggtgcattacttgatataactctcccctaaaactgttgtaattgcattttttcccttttcttggcacccctttagaaatgtactgaagtctcatttttcacccatttcagccatgggacatttttcataatattaatgtaaagatgtttgtgttactgtttataaattacaattgtaaataaattactagtttgcccaaaaaaaaaaaaaaaaaaaaaaaaaaaaaaaaaaaaaaaaaaaaaaaa

SEQ ID NO: 1567 - DNA, 3772 bp, HOMO SAPIENS
gccaggctcgccgcggggcgctgagcaggccgggacaccgcggccgaggttatcgttaggcatctcccaggcgaccggctccgcagcaagatggcggacgagaaggacagggaagagataatagtagcagaatttcacaaaaaaatcaaagaggcatttgaagtctttgaccatgagtcgaataatacagtggatgtgagagagattggaacaattatcaggtcattaggatgctgtcctacggaaggagagctgcatgatctgattgcagaggtagaggaagaagaacccactggatacattcgattcgaaaaatttcttccggtgatgacagaaatactactagaaagaaaatacagaccaattccagaagatgtccttcttcgagcttttgaggttttagattcagctaaacgtgggtttcttactaaggacgagctgatcaagtatatgactgaagaagatggagtttcgctccgtcgcccaggctgaagtgcagtggcgtgatcttggctcgttgcaacctccacctcccgggttcaagagattctcctgcctcagcctcctgagcagctgggatgacaggcacacaccaccacgcctggctaatttctgtatttttagtagagacggggtttcaccatggtctggtgacctcctggtctcgaactcctgacctcaagtgatcctcccgcctcagcctcccaaagttctgggattacaggcatgagccaccgcacccggctgcttccttaactcttgatctcctctctgtatcttgctttgtctagctgttctcttctctccatattcatccaaacatttgcttagaagtacccagaagcatggcgttgaatgtggtacaccttgaacgaagggtgaagaaacgaggcagagtgacttagtagcaagtgacagcacacagtttaaattttaatattagcccatttacaaacaacagcttatataatagtcattcacatacctcaacactcaccatcccctccccactttttttctggagacagggtttcactgtcaccccagctggaatgcaggtggcatgatcacagctcactgtagcatcgacctcctggactcaaggggtcctcgcgcctcagcctcctgagtagctgggaccacaggtgcatgccaccacgcccagctaatgtttttttttattttttgtagagacagggtctggctatgttgcttaggctggtctcaaactcctgggttcaagcgatcctgccacctcagcctcccaaagtgttaggattacagatgtgagccactgtgcccagccaacattcaccccattcaagtgtgcaattcaatggattctagtatcttcacagtgctgtgcaactatcactcctatctacttacaaagcatttccatcatcttaaaaagaatccccatgtccaatagcagttccccttcccccaccgtcatcctcgggcaaccgctaatcttcctgtgtgtctgtggatttgcctcttcagggcatttcacataaacacaatcatacaatatgtggccttctgtgtctggcttctttcatttagtgtaaggcttttgaggttcatccatgttgtaatgtatatccttagttcattcttttttgttaagctcacaaataaaaagcctcactttttatttgaggcaaggagactggctacagggattacagttccagcagtcaaaacgcaactccaagtggcactatttggaccgtaggttttgcttcattttggctggaaaagggtattcaggatgtacttctcccagccggacaagaaaaagggcaaagaaaactggaagagacgtctcgtctacacaaactgctctttggacacagcatcaacctgaccacacccgtgctggccagtctgcaggttgctgacccgccgttaagggacacaggccatactacacttgctagaaaaactgaggcaggaaaaagaggtgcaaggcactgggggaagagcaggtacctatagctttaaagctcagtgttgaaggggtaatccttgcaggaggcacagctcaccaagacacagaccctcccgttcctgttgtagctgactacagtggtcacatcaggctgctcagttgaaagtcgaagtcctccaagttttcagcagtgcgttccagcatcaccaccgaaatgatgataggaattaccaccaaattcctatgcatgggaaaccagatcagaacctgggctgcgtttttatttgtttattttttttactgtgcttggctgtgattgctttggtgctgggatcccccagacctgtcacgagagctgaggggactacaggcagtcaccaccttgcctttggattggcagccctggattaacttctcctgaggtgggtgcaggtggcactcactgtggttaaccactgtttttaagccaggtttctttttttctgtctgtcatatatatatatatatatttagagacagggtctcactctatcactcaggcctggagtgtagtggcatgatcataactcactgcagcctcgagttcctgggctcaagtgatcctcccgccttggcctcccaaagtgctgggattacaggctgagacaccacacctggtcttaagccaggtttctttaccatctcttggagatggctgcagttggagattccaaaagctttcagagcccttcatccaccagctcctccatgtggccacccatgtgacatgaagttggtgtcactaggtaccacgttgtctgtcccatccaacaggaaaaatagcctgttggccagtgaataaggtaggaatccaggtggtcccctgagggtcttctgacaggctcctttatcaggctcttctcatggtatgagcaccgcagcttgctgacagtggcaacgttctcaagcttcacagactccgtcacttggcctggaggggaattctaggtgtccagccccaggacaggcattttggcaccatgattgagcacgatatggtgagccatcctcacaggattaagaagaattctggacagaaatatagttgtaagtaagcatcagtcagcctgcactttgacccacttccttgtaaccaacagtgacgtagcactaggtaacatttgcatccccgttgttcctatagatacaatttctgaccttagaatcacaaggcttttgtttaaaatagatgggatctctgacattagaatcataagatttttgtttaagacttgcttaagatgtttttcagatcctgaattccagcaaaacagccgacaccaaccagtttgaagacccccacagaggaatgtgatcagcatgaaaatacagcttcgtctccctctcccatgactccaccctgcacacttcgaccaatcaaccatctccacactccagtctccactcccaaacccttaaaaaccccagccccaaactcctcagggagatggatttgacgtttcctcccatttcctccttcggtggccctacgatgaaacctctttctctgctacaaccctatgcctcggcgtattcactttctggtcccatccagcgatggacccatcgtggttaccgtggctggccaagcctgctgtgcttcacagaccccactcaggatcacaccacttcgttccactgtttggagatgccatgtttgcttatcccttcatcagctgatgagcatttgtgctgttttcactttttggctattacgaaaatgttgctacgagcatccatgatattcgcccatttaaaaaagtgtttttcaccatt

SEQ ID NO: 1568 - DNA, 2018 bp, HOMO SAPIENS
gagaggcaggcccatcgcaaggctgactgatccttcaaaggagcctcccagctaaaagccagcaggagagagaccttggccaccaagggtctgccagctcctggtggtccccactccagccacctgccagctcgagcctgaccctcgcctccaccctggctgctgcctgtaccgctctcagggctctgccagcagacagccttggcacacaggcacaagggctggagcccagagatgagagtgcccaagggagatgtgagcctggcgggctgcccgctaacctgtcgctgaagccccagaagcgggccctcaggccaggcctaccctgcctccggcccagcatgcgcctgtcggtgcggagggtgctgctggcagccggctgcgccctggtcctggtgctggcggttcagctgggacagcaggtgctagagtgccgggcggtgctggcgggcctgcggagcccccggggggccatgcggcctgagcaggaggagctggtgatggtgggcaccaaccacgtggaataccgctatggcaaggccatgccgctcatcttcgtgggtggcgtgcctcgcagtggcaccacgttgatgcgcgccatgctggacgcgcaccccgaggtgcgctgcggcgaggagacccgcatcatcccgcgcgtgctggccatgcgccaggcctggtccaagtctggccgtgagaagctgcggctggatgaggcgggggtgacggatgaggtgctggacgccgccatgcaggccttcatcctggaggtgattgccaagcacggagagccggcccgcgtgctctgcaacaaggacccatttacgctcaagtcctcggtctacctgtcgcgcctgttccccaactccaagttcctgctgatggtgcgggacggccgggcctccgtgcactccatgatcacgcgcaaagtcaccattgcgggctttgacctcagcagctaccgtgactgcctcaccaagtggaacaaggccatcgaggtgatgtacgcccagtgcatggaggtaggcaaggagaagtgcctgcctgtgtactacgagcagctggtgctgcaccccaggcgctcactcaagctcatcctcgacttcctcggcatcgcctggagcgacgctgtcctccaccatgaagacctcattggcaagcccggtggtgtctccctgtccaagatcgagcggtccacggaccaggtcatcaagcctgttaacctggaagcgctctccaagtggactggccacatccctggggatgtggtgcgggacatggcccagatcgcccccatgctggctcagctcggctatgacccttatgcaaacccccccaactatggcaaccctgaccccttcgtcatcaacaacacacagcgggtcttgaaaggggactataaaacaccagccaatctgaaaggatattttcaggtgaaccagaacagcacctcctcccacttaggaagctcgtgatttccagatctccgcaaatgacttcattgccaagaagagaagaaaatgcatttaagtggaaatcggacctctaatccaagcatattgcttgctattaatcgccaaaacaggactgctgatgaggaatgtatttgcatatgtttgcaaaagctgaatcattgaaaacgtaccttgaaactctctatctctggacactccagggtagagaatgaagggtatggaagtagtccggcttttgaaacttaggtattttatatttttcccctcaagaacttttttttaagagacagatttgccatcctccttaatttgcaggactgccttggtggctttgtttgctgggacaaggcccacaacctgtgcctctcctattgacccttactttgaattcaaagaatctatttaagagtttaatatatgaggctttctttgattcctcctcagttctacctagtttcacagaggaaaaaaatactctttgaataaagtgaacagaggctcatttgtttgtgccttactttactgaaaaaaaaaaaaaaaaaa

SEQ ID NO: 1569 - DNA, 5083 bp, HOMO SAPIENS
ggtccgcggcggagcgagcgagcggccggcaggttgggaggagcggccgaaggttgaatgcctttgagaacttgatgcataaaatttgcatgactcctcactcctttctggatctctcattggactcaagccagcatggctcacaccacaaaggttaacggcagtgcctcaggaaaagcaggtgatattctcagtggagaccaggacaaggaacagaaagacccttactttgtggagaccccctatggttatcaactagacttagatttcctcaaatatgtggatgacatacagaagggaaataccatcaaaagactgaacatccagaagaggcggaagccgtccgtgccatgcccagaacccaggaccacatctggtcagcaaggtatatggacttccactgaatccctctcatcctccaacagtgatgacaacaagcagtgccccaacttcctcatagccagaagtcaagttacatcaactccaatctcaaagccacctccccctctggagacctcactcccttttcttaccatcccagaaaatcgacagctgccacctccctcaccacaactcccaaagcataaccttcatgtcaccaagacactgatggagacccggagaagactggaacaggagagagccaccatgcagatgacaccgggtgagttcagaaggcccaggctggccagttttggaggcatgggcaccacaagctccctcccttcttttgtgggttctggaaaccacaatcctgccaagcaccagcttcagaatggataccaaggtaatggggattatggtagctatgccccagctgctcccaccacttcctccatggggagctccatccgccacagccccctgagctcagggatctccaccccagtgaccaacgtgagccccatgcacctgcagcacatccgcgagcagatggccattgctctgaaacgcctgaaggagctggaggagcaggtgcgaaccatccctgtgctccaggtaaagatctctgtcttgcaagaagagaaaaggcagttggtctcacagctgaaaaaccaaagggctgcatcccagatcaatgtctgtggtgtgaggaagcggtcctatagtgcggggaacgcctcccagctggaacagctctcccgggcccgaagaagtggcggggaattatacattgactatgaggaggaagaaatggagaccgtagaacagagcacgcagaggataaaggagttccggcaacttacagcagacatgcaagccctggagcagaagatccaggacagcagctgtgaggcctcctcagagctcagggagaatggagagtgccggtctgtggctgtgggtgccgaggagaacatgaacgacatcgtcgtgtaccacagaggctccaggtcctgtaaggatgcagctgtagggacacttgttgagatgagaaattgtggggtcagcgtgacagaggccatgcttggagtgatgactgaagctgacaaagaaattgagctgcaacagcagaccatagaatccttgaaggaaaagatctatcgcctagaagtacagcttagagaaaccacccatgaccgggagatgactaaactgaaacaagagctgcaggctgctggatcgaggaaaaaggttgacaaagccacgatggcccagccgcttgttttcagtaaggtggtggaggcagtggtgcagaccagagaccaaatggtcggcagtcacatggacctggtggacacgtgtgttgggacctccgtggaaacaaacagtgtaggcatctcctgccagcctgaatgtaagaataaagtcgtagggcctgagctgcctatgaattggtggattgttaaggagagggtggaaatgcatgaccgatgtgctgggaggtctgtggaaatgtgtgacaagagtgtgagtgtggaagtcagcgtctgcgaaacaggcagcaacacagaggagtctgtgaacgacctcacactcctcaagacaaacttgaatctcaaagaagtgcggtctatcggttgtggagattgttctgttgacgtgaccgtctgctctccaaaggagtgcgcctcccggggcgtgaacactgaggctgttagccaggtggaagctgccgtcatggcagtgcctcgtactgcagaccaggacactagcacagatttggaacaggtgcaccagttcaccaacaccgagacggccaccctcatagagtcctgcaccaacacttgtctaagcactttggacaagcagaccagcacccagactgtggagacgcggacagtagctgtaggagaaggccgtgtcaaggacatcaactcctccaccaagacgcggtccattggtgttggaacgttgctttctggccattctgggtttgacaggccatcagctgtgaagaccaaagagtcaggtgtggggcagataaatattaacgacaactatctggttggtctcaaaatgaggactatagcttgtgggccaccacagttgactgtggggctgacagccagcagaaggagcgtgggggttggggatgaccctgtaggggaatctctggagaacccccagcctcaagctccacttggaatgatgactggcctggatcactacattgagcgtatccagaagctgctggcagaacagcagacactgctggctgagaactacagtgaactggcagaagctttcggggaacctcactcacagatgggctccctcaactctcagctcatcagcaccctgtcgtctatcaactctgtcatgaaatctgcaagcactgaagagctgaggaaccctgacttccagaaaaccagtctgggtaaaatcacaggcaattatttgggatatacctgtaagtgtgggggccttcagtcaggaagtcccttaagctcccagacatcccagcctgagcaagaagtggggacctcagaaggaaagccaatcagcagcctggatgccttccccactcaggaaggtacgctgtctccagtgaacctgacagacgaccagatcgccgctggcctctatgcatgtacaaacaatgaaagtacactgaagtccatcatgaagaagaaagatggtaacaaagattcaaatggcgcaaaaaagaatcttcagtttgttggcattaatggagggtatgaaacaacttcaagtgatgattccagctcagatgaaagctcttcttccgagtcagatgacgagtgtgatgtcattgagtatcctcttgaagaagaggaggaggaggaggatgaagacactcggggaatggcagaagggcaccatgcagttaatattgaaggtttgaagtctgccagggtggaagatgaaatgcaggttcaagaatgtgaacctgagaaggtggaaatcagagagaggtatgaattaagtgaaaagatgttgtctgcatgcaacttactgaaaaatactataaatgaccccaaagctttgaccagcaaagatatgaggttctgtctgaacaccctccagcacgagtggttccgcgtgtccagtcagaagtcagccattccagccatggtgggggactacatagctgcttttgaggccatttccccagatgtcctccgctatgtcatcaacttggcagacggcaacggcaacacagccctccattacagcgtgtcccactccaacttcgagattgtgaagctgctgttagatgccgatgtgtgtaatgtggatcaccagaacaaggcaggctacacccccatcatgttggcggccctcgccgctgtggaagcagagaaggacatgcggattgtggaagaactcttcggctgtggggatgtgaatgccaaagctagtcaggcgggacagacggccctcatgctggcggtcagtcacggacggatagacatggtgaagggccttctggcctgtggggctgatgtcaacatccaggatgacgagggctccacggccctcatgtgtgccagcgagcacgggcacgtggagattgtcaagctgctgctggcccagcccggctgcaacggtcacctagaggacaacgatggcagcactgcgctctcaatcgccctggaagcaggacacaaggacatcgctgttcttctgtatgcccatgtcaactttgcaaaagcccagtctccgggcacccctaggcttggaaggaagacgtctcctggccccacccaccgaggttcatttgattgattgtatgcaaatagccctttatttacatgccactattaagctgctaattgttcctgttggggtgacagatactgaatgtatacgtattgtgcctgagctcaccagcaaacagaagcatcaagcccaggggtaaaggctgaagctttcacagtgcagagactgctagcctgggcacacacacctcctttctggccgtcttctgtgtagggcacactttaacccagtctctgttgctgttgagtctctgctccgttttgtacagtcacagggaattctgatctgaaggggcaccttctgttcactcccacaaagtggtgtctggttctcactgagacgttttaagatttttccacaaatatttatatgtactaaatgtggaaccattagaaagttcttccaaaatctcattccagcatagttttggatttttcttttgtcttattttaaaataaggaagtcgagatgactttgatcattggtaacttgggcctgggccagacaaagtataaaacttacaaaagaatattctcatttggtcttaactaggtagatgtaatatatgactttttataaaaagggtatctatatgaacttgacacagtattttcagcttttgtattccatactaaagccatgaagaactacacgtaacatcatcatttgtattaattgcacaactccaatgctaaaggttggattgtgttagaggaatcggctctgtatttgcctctagagaaacacagtgttctctttgtatttatggattcctttttaccgtgtcacatttactttggtcctctatgtatttaaatgtttgaagtgccttagactcttgccatattttcaaaataaaattccattaagctctaaaaaaaaaaaaaaaaaaaaa

SEQ ID NO: 1570 - DNA, 5217 bp, HOMO SAPIENS
ctcggggccacggtccccccgcagcgctagtcccgggcccgcgagcaccggcccccgccacccgcaggttgcggagggaggagggcgggagcgggcggcgcggagccgggaggcgggggaggggccggcgtccgaggcggcggcggcggcggctggagcagcctctggcagcagcggggagaatgggagtgcggggcgccagaccgccgcggggtgtcacggccgccacgaagcctgcgaggcgcggggccggcgcccgcggcttttaaacccgggaaggcgcggcggcggcggcggcggcgggcagatcgcggcgcgcaccaggcgccggggcggcggccgaatggagagaaagggctcggcggccggggccaaggggaacccgagcccgcccgcggccggagaggggcagcggccaccgccgccgctgtgcgtcccgggcggcggcggaggagccccagcgaggggccaggtcggggcggcggccgagccggccgagctcatccgacgagcgcacgagttcaaaagccaaggggcgcagtgctacaaggacaagaaattccgtgaagccataggcaaataccaccgggcgttgctggagctgaaggggctgctgccgccccccggggaacgggagcgggactcgcgcccggcctccccggctggggccctgaagcccggccgcctctcggaggagcagagcaagacggtggaagccatcgagatcgactgttacaacagcctggcagcctgcctgctccaggctgagctggtaaactatgaacgagtcaaggaatattgcctcaaagtcttgaagaaggaaggggagaacttcaaggccctttaccggtctggtgtggccttctaccaccttggggactatgacaaagcactctactacctgaaagaagcaaggacccaacaaccaacagacaccaacgtgattcggtatatccagctgacggagatgaaactcagccgatgctcccagagagaaaaagaagccatgtaaccaggaagcagctccagagctgcgcccacgcctgaccggggacttccaggcatcccctggcagagagccccgtcctggattctgtccctttctccccacttcttctggctcctcatttttcctcctgttgcaccccagctctttgtctcctcccagtacgaaaaggagagatgcaaatttggaatctggtaggtcgcccagacaatggagacatcctctcctctagcaggtcagcgactgagaggggcctgacttctgctgggacagctggagaggagtctcatgggctgggatgctgttgtggctttgactttggccagtgcttctgacagaggcggagcctggcaagtgtaccatcccacaggcagcaggcacacagcccatgggctggatccttccacactttcctgacagaccagaaccagagcatctcgaggcaactgttagaaatccagggacgagacaaacagagaagcgctggtgaagccaacatagagactgtcaatgtgtacactggagttcccacccccaccccccacccgtcacttagcccctgcctccttcccccactcgttgtcttggcttgtgctttctcctctccccatcggggatccgagactctgccaggattcacatgccactgaagcccactcagtgccctctggtgaccacacataccattcccccggactcccacccagcaggcagctgtgaccgcagaagggcaggatgaagtgggccaaggtttgggacaggttgactgtgtaggtgacagggagggaaagatgatggccaggggaaagagcatcgtataggctaggggattgaactgtggactgattcagtgtaaataaaaacaaattaacaggtagtagttcctgtcagttctgttggaagcagcccactccctcacttttactccttcctccaaccctcaatcagagctacttacagccaggcaggatggggctttccccaaagcaattggccgtttgtccagtggcagacaatggtggctacagcctttgtgcttttaagagtgggctgggattgtggagactgcccaggggcttggctttgtcagaacttgtacaatcttcttttgatgaaattatctgaactcaacatctagcacatagaatgtgttcaacaaatgcttgttgaatgaataaattatgactgcagactggctctcctgccttaaactaatttcatcccagcctagtctcctgatgtctgtgctcgttatgctatgccatgttgcttcagtcaaacaagaaacacttactgagggcatattgtttgcccatcattgtgcaatatgctgtgggacatgggatgtcgtctcagtcttcaaggaaatggaagggttaagaaatgcatatgagattattaccaatgacaccgttaatttatatgatgctttaaaattatcagagcactttcatgtatttttcgtgtgactagtgaaaaagacaatgttgtacaaaattaaaatatatacagatgcaataatgtgaatagttaggatttattaaatgcattatcttcagatctttacatgtataatctcatttctttcatgcagttactctgggatactgttcccatttgatgggtaagaatattgaaaaccagaaaaattaattatcccaaggttgcatggcctttagtggcatagctaggatttgaaccaggcctgcctgactccagagctctggctagtatctatgctatacttagttgcctctctgtaagtataatattgggcaattataaccatttgagaacaggacaatatgtattaacctgaaaagtgttcatgatgtcagtgatagtacatggcctccttatgtatttactcaagggccccaaaagaccagaggccagaatccctagtagtcagagcagtgacaggtcagaaaaaggcagctgaggtccaatagttatgtctgtgtattgctcattctacttactgatggagccagcatgtatctcaacaactcacctagcattcatcacccatccccagcattgggaaagggtcacaattaagaccgaaaggaaacacaaagttaaatatgggttaattatgtaagcagatgccccaccacggcaggatccaatcacagccgaggggcccagaagagagcagcgtaagttatattcacatagttccccaaaggctttcaacgggggctacaggaaggtgctagaaatattgaggggcctgccattactcacctagagctcactctctggagaagaggaaaaggaagaagctatttcagctgccacattctccccaatccctactatattatgctgtctttcctcttcctcctagctggctttacatgaccctaacccaaaactaccctatggccccacacgggaatgtgttcaaacgccccgacccccacccccacccccattcccaagcctccaacttagaacgtttgtgatttggcagatggtttgttaggatctgaaggatgaagagaagggtagaggtcacctggagaatgagttcaaactgccagggtcttcccttggtctttgtgcgtcaggaaggactccgagtaattattccctatgcagagacaggagagaggtcttgtttacatgagtgtgctggggcagggctggacaatccaggatatgattgtagccatcccatgtagaaagatcaaaaaccagaacgaaatgaagacagcctctcagaacctcatagaacaagcgtccaggtcatctgcttgtttggtgacttagatatacaggcttactggaactccattcactgtgacctgaagttaaataatcccaaagagaaaaagctacctggggtattggttgatgtttggggtgatagggctgaattttctgtgcatttgtccaacaaaggctttagagcacaaaaccaggttcattctccctaccaaatcttcagcttccttctcctcatccctccccaaaacaagaactgtgatttaattccgtacgttgcggatgtcactgctgacctatgtagctggagtactaatcaggcatctgacctgcactgtcatcccctgcctggacttttgcgatggactctttgggggaaaaactaacgctttttaattattgtgaaagcatcatgtgtgtattgtagaagttttaggaaaaaaaggacaaaatccaatccataagcttaccacccaagacaaacgtgtattcttttgaatataccttttagttctttttggtgtaaatgtacacacgcacacacagttgtggatttttttaaacaaaaactggatacactgaatatactctttaataacttttcaagtgtgtatttatattttagaatatgtaatcctacacagatacaaaattcaaaaagtacaaactgctctgtagtcagaagtaaatcttctccctaccccgtctgccagcatctagtttccctctaatttattttgcatcctagtggagatgcttacacattgtcaaacatatgtatatattcttttatcacacacaaatggcagcatattggacactttttgttttttgctccttctgttccttcacttaataatatcacgaacattttcggcatatcaaactttctcaacagcatcttcattgtatggatggaccctttttttatcatcaatcctcaaatagtgattatttcatttgttcccaatcttcattgtaaatagtgttgcaactgacattcttgtagctaaattttgcacatgtctataacgatttccttaggataaactccaagaagagacttgcttggctatttttaagaattttgatacatgttgccaaccaccctccagaaagtttgtaccaaaacgctctcctatttggatcctagagagtaccctgtttcctgcaccctaacactaggtatcatcacttatcaaatctttcccaatttggtagctgggataatagtatgtcaatgttattttaactttctttgattcttcgcgaataacattttcatatgcttattgaccatttgtacttctttctttgtgaattttctatttatttgatattggtatgtttattatcaatttgtaattttattaagaatattatttttgtcaagaaatgctgcaaatatgctttccaagtgctttgctttcaaattttgtttatggtgctttttgacatacataaattcttaattctgc

SEQ ID NO: 1571 - DNA, 318 bp, HOMO SAPIENS
cggagccagcacagctatttgtctccaaccacaggccgcaagggaagttcacgggctcggcacccccaggtcccggatgtaaggatattgcccgttagacaaaggaaaggccccaagtccacaactcatgtttgtgagcttaaccttgtcctataaagcactttggaacaggcccaggttctcccaccatgtacagctgccattgacctggacagtcccgcaaggtccttcagtggaaacccagaagggagagtcactgcatgtgaaccctaagggttctggaggtcaaagttgctgtgggtgacaggcaaccaagac

SEQ ID NO: 1572 - DNA, 6453 bp, HOMO SAPIENS
agtgggtttggttgcacggcggctttggcgcattttcggctggtttgattcatccattttgaagagacgggggagcggggggctcgtctgttccaggagccctgaaccaaagagcagcggagtttgagaagccagcagctcggggttcggcagcagcggtcccatcggctgaagttcggggggggtggggcgccgagcgcgcggggtggggggggtcctggtctttggcttctcgactcggtcctgtttcgacagcgaacatgtcgcggcctgtcagaaataggaaggttgttgattactcacagtttcaggaatctgatgatgcagatgaagattatggaagagattcgggccctcccactaagaaaattcgatcatctccccgagaagctaaaaataagaggcgatctggaaagaattcacaggaagatagtgaggactcagaagacaaagatgtgaagaccaagaaggatgattctcactcagcagaggatagtgaagatgaaaaagaagatcataaaaatgtgcgccaacaacggcaggcggcatctaaagcagcttctaaacagagagagatgctcatggaagatgtgggcagtgaggaagaacaagaagaggaggatgaggcaccattccaggagaaagattccggcagcgatgaagatttcctaatggaagatgatgacgatagtgactatggcagttcgaaaaagaaaaacaaaaagatggttaagaagtccaaacctgaaagaaaagaaaagaaaatgcccaaacccagactaaaggctacagtgacgccaagtccagtgaaaggcaaagggaaagtgggtcgccccacagcttcaaaggcatcaaaggaaaagactccttctcccaaagaagaagatgaggaaccggaaagcccgccagaaaagaaaacatctacaagccccccacccgagaaatctggggatgaagggtctgaagatgaagccccttctggggaggattaaaagtgatgatggtctggggagagattttattaaaaaaaaaaagaaaaaaaaagaaaaaagagggaggaaaaaaaagaacctacttaagatagaacatggttttggctatggcttgactcatgggctttcagtgcttttttccatttgttgaaagtaacatttctctctctctctctttttttttttttttttttaaagcaaaccattgtatgtgtaagtgtttaagttacctttttgtctattggtctctttgccagccctcccctttcccaatgaaagccatgtcaaattaatcactggattgactgcttcatctttttatttttaatgaaaggtgtaccacggttgtaaagcaataagatttgagatgaacactattgaaacttcgctttttgctaaaaaatagcaagttgaatagtaatcaaaaaacatagaaagattttagttcaaaatgattgctcctttctctacctggacttttaaaaaatcaattgtcatctaatatgagtttatttgtctatagacacaagtatcaatgtctaaaaaaaatcatgactttaaacttccaccgatgaggcaggtaggagataaagatgaattctgaactgttactaaaagtactcattttttaccttgtagggagggtgggcaatggggttacctgaccttatttgagggtatgggctttcttttttatttcatcacttgttatctcaaagagactcggagccagtgatccttttatcctgctacagtctttagggagctaaaaaaaaaaaaaaagcaggggctgccaaaactcttgatttcatatttccttctctaaatatatatgtatcctgttttttggataaaattttaccaagaatccaaaaaaaaaaaaaccctagaatttaatcaacaagatcagtctacaggtcacagtggatttcttttcaaactgacaatgtttaggttttaagcaaataaagttccagttaatgtgaaactcagtcacaaagagttgagatttttcctttatgaaatagaattgacattcttttatgctataaatgtgcattcaggtcccattaaccatgctctgcttttatttggggatagaacattttctttttcatatcccgatcttcccatttcttcatagaaatgtgataagaagtacatccctgtgatcctgctgcttcgtagagcaccactgcacaccctaccccgagtgccaaccacctctgctataggacactattttcctggccctattcttcacttacttcccatcctgtccttgactaggaatatgttaaatgctgctcccatacaattcagttagctcttgtctttttatttggtccaacccctgctttactgctcatgctgcttaaagcaggagggactagagaaacaaggcattttaggaggcctgtgtgcagttgaaaaccgacttttacacgccttataaaagcagtcaggagatagatccgtaggtttgatccttcacatctaataccaggcgctaatgggaacaaggtttaaagggtcctggtatgctaataaattgaaaaattagtgaaatttaaacttctgcctttttttcctgccttttaatctagatttgcttcctcaatatcctactttgtggtttactaggaacatgcttactctgatctttttttaaaaaacacacagtggcagagtcatttcactattgcactgtgtgttaaagaatgaataaggagttttcagttacatggccaaaaatacaggacttgaacataaatagcagttggatcattctctttcatgacggttaaattcagaggtgtgaactttgtaatgagggtgttaaagattaatctatttgcctaaatgggtttgttcaggtatccatttttaacaaagaagtttgtgttcatatagtaaaagacctatcagtgtttccaccatgcacttctattttttaggagtttataattttaagtcttacattcctagtaacatttgggcttttcttaggttatgtttcgtgaagatttggggggagggctcttttaaaacttcagcctcagttgtttaacagtctctttaatatattaatctgcactaacatctctgtgatatatgcacatattttagaggtaatcatgtcttctagattacttgtgtgcatttgattgggcttcttgtttagggtcccttttaaaattaattcattagattgaaaaatgtattctatatttctgatagactggacagaaggatctgtgtccccaagtgagacaggctctgaataacctttgttttctccactttttattgatgatttaaaacactctagtcttcccctcaaatcatgcatgcaaataggaggacagtggtggtgactcaactggatacaggtgctcaatagtcaggcttgatagtgatgtcaggacgcattacaagctgtaagccgatactgactggccattggcaccatccttgactaaccttcctctttttctctagtgtgcctatggtgaaatggcaatagcattcactgtcgtattttgcagtgctcaggaagtgggacgttaactttgaaggtgcttgtttgtattagctctgctaggtttacctctacaacgtagatttcagcagctatgctgactgacactacattctagttcttaagattttttttccagatccccccttccccagctagacatacgtagcatactttcatcttattcagtctttctgtaacctgctgctgcttttagtcctcctcacctcagatcggaatcaatggagtgggcccagaggatacattttaattccagtaatggtaggtagatttgtcctgctttctaaaacatctcctcatttcatatttccactccatattgattccataagggaaaattaatgggtgtttcctcctttagggaggtaatgcaaagagtgtggacatcttctaatcttgaggaacagtagttgatttcccttgaaggagcttacatattgactgttttcacaataacctgtttgccccagttcaatcctcattttaatacttaatttggtactggctcaaatagcattttcttacagataacaaatcaagagtgaaatttgaggttatactccagtaaagtttttaacacttgtgaatatggtcagctagactaaacttgactcttttttttaatggcttttttatctgtgaacattcagataagtggattttcaagtactggttggggatgggaatcgtgcttttctttaaacttcagtttacgagatgctttgagagcgttaggcaaaagcagaaataaatatcaggagcaacggggaaagctttataaaagatcatggtggccactgttgcagctttgaagaatgagtgctggcttgaacagttctttgcctgcatcattggtagctgcactgaaaggaaaaaactttcaccttaagaatttgaaaaggaagaaacctgggctctggtcttcatggcatttagactgagatgcttaaacagaacagaagtaatacgcatttcctgccataggatagggaaaatgtaacaagctggttgctcttgaggttagaaaattgtctgtttctctgtggatgaagctggatttacttgaaaatggagagttggcttattgtttgaatattgggacatcaagctatctatagccaagtttcagtcgcaaccagttttccctttgtctggggtaaattcgatacaaaatgattctttttgaatcctgaatccataaattacacttttttttttcaaattcacaaaattcacagtggtgctgactgtgtaataaccactattgggaaacatcccgtaaacctgcctgttgccatgccaatggagtgactgaactggtgacatctgtttgagcatgctttgtgtggctggtagaatgccaccgttgtgcatacactttgtacatcaggggtgaagggagggttttctagattattgggggagggtaaaattgggatttttttgttgttccttttttgatggggtgtgggggtatagtactcagcttatgccctaaaataacatgtataaaaacccctgaagtattgtgtgggtgtgtacgtgtgagtgtgtgtttgtatacatctggcaattaaagctttgtcttctggaacttagtgaattcttttctctttttcctccagaagtatttgttacaagatttgtaaataagagctctacttagtttgtttaccatgaacatgttgcagcaaaccttatgcatctaattcctacaaggttaaagaaaggcttttagacttgccaggttaagcaacagccaagttctcagtaattgtttgccttgatttatcttttagacttcattttgccagctctaaaactcccagtcttccttgattttagtccttaatcttttatgttctgagcaggaagggtaaaagacaggaacctgcttcactgtattaactagtccatgggctgagaccggggcatctcttttcttcatactgcaatgttgctagatacatgatcagacaccagagggttgggcattcttgcaataccttaacagtgctgaaatctgcagcatggtactaaggaagttaaagtttgaatgtaaccactttatttaaaaggtttttttctttaatttaaatgaaatggggttgaagtgaacatgattttgttgaccatgttcgtgaattacagatgcaacatgcattggtagaatcgtgtgatggtcttttgtgatacttaatttttacatatcccagtctctgtatgtatctgcatagacaaagaaaaaacaaactcctgctttgcttttattgaagggtttccaggactgcgtgtctgctcctgagctctgttttaagtatgtgtatcctttgcttgtattttgtattaaaaaaataagaaaaagaagcctttattgttgagcatgttggcattgtcccctttatttttttctctttttgggacatatgaagcaagttattctttttctgtatctttttttcttttgtaaactttttttttgttttgtttaaaaatggctttataaaagggcttttataacccagatgtgtgctctgtgtacttcttgtaataccttaaagcaaacacactaacttacacagctttgttaatcagctcccagttcagcctgactttgtgggaacttatttccctaataaattatttagaaactttaacagtgaccatccctgttgttggtaaaagataaacatgtcttggttcaaaagttaatacctcaggatggaatcaagaagcagtagacttaccagtttgattaattaagggagcactggactgggtgcgtaaggattcttaattagcattttttctcatgtttacatccaaggttatgaagtgttgtggaaagcaaagtttaacaatcatatataataaaagataatgtttatactcacagaa

SEQ ID NO: 1573 - DNA, 1354 bp, HOMO SAPIENS
cgagaagctcggcggccatcgccgccattttgggctgggaggaggcagcggagggactcgctgcgcagtgagagcaccccgtggggggtggtccgggcgcggggagaggccgggccgagtgggctacctgaagtggcggcgccgggagacggcgggaagtgggaccgggggccagggagggtgaaggttggagtctcctcggccgagcccggtcctcaaaccgtcccggcagccccgcagcctcgcctctcacagagtgcggggttcttcggtaattaccgcgtgtttcccgagaccccagaaggggagaggctggtgaaacggcttccctctgcggtctttccacaggggcgcggatcctgaggccgagctctgccagcttccctccccacccccattcggcctgggtatggcggcgaggccccgcacagagggactcccacttcgactggagaggtgggggcgacgccagattccagaggctggcgccgcgggggagggcggaggtcgcaggtctggccacaagtcggcgtggcagtcagctggaggctccgagagcggagatcccagtgcacccaccttacctcgcttacaccaaagcgccatctcgccgcccgggttgcgaaaaaccacgaccctcttaaactactgtagcaaccactaattccccctgggagcagctagagaggggcacttggaaaccttcacgagctcggtgcctgaaggtctctgaggctcttgccctcaagatctctcccattcagccccgattctccggacaacctgacctagcatgtcgccagcctcttggtgaaacgcctaaagtgtgctgccccacttctcttgaaagtttacaccgaagggatgaggttttgccctttacagggttggggcacaaagtcggagtcgctgcggctccgaaatagaaacggagttgcccatttcgtatgcttcatcaacatctgcttgcattttgaaatcctagtcttaacttttacacaacttttagagaaatggctgccctcctagagggaaaaacgaactacagtaattccaattccaatgtaatctttgtaagactacaaaatctttccagtttaaagatttttcttttcccacagactaaacaaagtcagagtattttgtgttctactggtgcattgttactaggtaacctcaattttttgaaattccaagtaattgaaggatcacttttgtagatcctaaatgctaccaaaaaagaaaccagtttttatctacttcatatgtatagcgtttaagagatgaggagacctgctttgaaagaataaactcttaaccttacattatagctgtagcagcttcttaaagattg

SEQ ID NO: 1574 - DNA, 451 bp, HOMO SAPIENS
  misc_feature (174)..(174): n is a, c, g, or t
ttacctacatggtgactgttcggtctaattcagaaacagaagtactaaaagaatactaaaaagtttttacccattatctctatccctgttttctttttgcaattctcagctgcagggagcaagaaaatacacagcagataggaaatgtttgtttgcatcctggctttctcaacngcactttacgtccttgaatattctagatatttactccttcaagaagtcaggagtatatccaggcctacctatcatccttgccatccccattaaccctcatttttcagtatgtgttttacatttatggttatttttcagtctatagtatctgttcactcattgctctatcacatctgagtttctccgtctttctttccactagattgtaagctccttaagggcaaggtcggcatataagcaaagttctgtaaacaccgtgaaggtaccatgagttcta

SEQ ID NO: 1575 - DNA, 2108 bp, HOMO SAPIENS; identical to SEQ ID NO: 1364

SEQ ID NO: 1576 - DNA, 501 bp, HOMO SAPIENS
  misc_feature (281)..(281): n is a, c, g, or t
  misc_feature (347)..(347): n is a, c, g, or t
  misc_feature (362)..(362): n is a, c, g, or t
ggaaattacaaaccccttgagatgaagtgataatgaagacacaacaaaccaaaacttacaagatgcagctaaagcagtgtttacaggcgtgagccaccgtgcgctgagtgatacgtggttcactttaacttcgcacatggtaaaatcagtttctttccatgatctgtttcacagtctctgtgaagctacctaccacaaagaagtagtgagtgatgactttctagaatctaagtatatggcatgtatttattataagtaaaacattaagtttgctgattgtntacttgtgataaacaattattgtgaactttatttgtgctggacataagtgtctgttttacagtganattccattatagagngttacttggtagagaaatgcaaattgtagttggtcatatactaaaatttgaactttttacatatcaatacttacaaataggtgtttactttcccacaaaactccagaacatttaagagtctcgggtgtttaaatttgat

SEQ ID NO: 1577 - DNA, 1444 bp, HOMO SAPIENS
ggagaaggggtggggcagggtatcgctgactcagcagcttccaggttgctctgatgatatattaaggctcctgaatcctaagagaatgttggtgaagatcttaacaccacgccttgagcaagtcgcaagagcgggaggacacagaccaggaaccgagaagggacaagcacatggaagccagcccagcatccgggcccagacacttgatggatccacacatattcacttccaactttaacaatggcattggaaggcataagacctacctgtgctacgaagtggagcgcctggacaatggcacctcggtcaagatggaccagcacaggggctttctacacaaccaggctaagaatcttctctgtggcttttacggccgccatgcggagctgcgcttcttggacctggttccttctttgcagttggacccggcccagatctacagggtcacttggttcatctcctggagcccctgcttctcctggggctgtgccggggaagtgcgtgcgttccttcaggagaacacacacgtgagactgcgtatcttcgctgcccgcatctatgattacgaccccctatataaggaggcactgcaaatgctgcgggatgctggggcccaagtctccatcatgacctacgatgaatttaagcactgctgggacacctttgtggaccaccagggatgtcccttccagccctgggatggactagatgagcacagccaagccctgagtgggaggctgcgggccattctccagaatcagggaaactgaaggatgggcctcagtctctaaggaaggcagagacctgggttgagcagcagaataaaagatcttcttccaagaaatgcaaacagaccgttcaccaccatctccagctgctcacagacgccagcaaagcagtatgctcccgatcaagtagatttttaaaaaatcagagtgggccgggcgcggtggctcacgcctgtaatcccagcactttggaggccaaggcgggtggatcacgaggtcaggagatcgagaccatcctggctaacacggtgaaaccctgtctctactaaaaatacaaaaaattagccaggcgtggtggcgggcgcctgtagtcccagctactctggaggctgaggcaggagagtagcgtgaacccgggaggcagagcttgcggtgagccgagattgcgctactgcactccagcctgggcgacagtaccagactccatctcaaaaaaaaaaaaaccagactgaattaattttaactgaaaatttctcttatgttccaagtacacaatagtaagattatgctcaatattctcagaataattttcaatgtattaatgaaatgaaatgataatttggcttcatatctagactaacacaaaattaagaatcttccataattgcttttgctcagtaactgtgtcatgaattgcaagagtttccacaaacact

SEQ ID NO: 1578 - DNA, 4335 bp, HOMO SAPIENS
gtctaatgtaaatccagcccagtgattacattagctgggcgctgattaggttaggatgttgcccaggtacaaggccaggatcttcgggacctggcttcatttggagttcagctaccaaaaggaaaccttcctctgggtcctggagtatttggcctgaaattgggaactcggaagttgctgctccagggcgctccctgcggagctccgccgcccgcctctccgcccggcctttcccggcgtccccacgcggggcgcaaccgcgagaaagaaacgcaggtcgcaccgtcagcgcccagagcagcgccagtttccgggcccgggctgctctcggagccatgagctgcggccgcccccctcccgacgtggacggcatgatcaccctcaaggtggacaacctgacctaccgcacctctcccgacagcttgaggcgcgtgttcgagaagtacgggcgcgtgggcgacgtgtacatcccgcgggagccccacaccaaggcgccccggggcttcgctttcgtccgctttcacgaccggcgcgacgcccaagacgccgaggccgccatggacggggcggagctggacggacgcgagctgcgggtgcaggtggcgcgctatggccgccgggacctgccccgcagccgccagggagagccacgcggcaggtccagaggcggcggctacggacggcggagccgcagctacgggcggcggagccgcagccccaggcggcgacaccgcagccgatcccggggtcccagctgctccaggtcccgcagccgatctcgctataggggttctcgctatagccggtctccctacagccgatctccttacagccggtcgcgctacagccgctctccctacagcagatctcgctacagggaatctcgctacggcggatctcactacagctcatctggttacagtaactctcgctacagccgatatcacagcagccggtctcactcgaagtctgggtcctccactagctctcgctctgcatcaacctccaaatcgagctctgcgcgacgatccaagtcctcctcggtctccaggtctcgctcgcggtccaggtcttcatctatgaccaggagtcctccccgggtatccaagaggaaatccaagtcaaggtcgcgatccaagaggccccccaagtctcctgaagaggaaggacagatgtcctcttaagaaaatgatgcatcaggaagcaacgtgatggaggacttgggggaaaaggatcacatactcagtctatggaagcaacgtccctggaagaagaggctgcctattgaaaaggttgtgtcacacttttctacctttttgccagtttgaagctttgcatcaggtggcaaaattcattctatgtgccgttttgttgttattcacattttattgtaacttaggaggtgaacgacctaagattacgttattgggtttggatatttgaggcaaaaatttatttttatttctatagtgatgactgttttggtttgaaatgaacagattggtaacctaatttgtggcctcctgacttttaaggaaacgtgtgcagccattacacacagcctaacgctgtcaagacattgcttcaacattgccttcattccttaaaaacctacaaaaggtggtgtaaattaatatggataattttatttacctccaggtctaaaaggtagtgtgacccaaatttgtataaagatttttcatgtgaaaggactggggttttagcaaacacaggtctaatctcttttgtgtttttgtgcaccaggcccggctgcgtagcagttgagtgatgctggttagctattaaggtggcctgttgcagtgcagagtgctgagctgcttcctgttttcttctgattgctcctggggaaaacacgccttgtcctgaagaacaaatggctgtccagtttattaaaatgcctgtcaactgcacttccagtcacccaggccttgcagataaataatggagcatgcagtgagcacatctagctgacgataatcacaccttttcccccgtcttttctgaaaaattgtaaatctgatcatatcaacatgtatgaacttaaaatatggagaatgttatggaagaaatagtttataagtttgttaagtacttataacatggtttatctttttgattattaattttttacgctaaccattgtttctgtagttaaaattgttttcttggtgttatcttttctcagaataaaattagaaacttttgatggaaagtaggttgttttattttctgtatgacttttggatatttgtacttttgagaaaattattagcaccaagtgtttctcaaaatataatttttaaaaaatccttaataggcttttagctatgtgctttattgttttatcacaatgcagtttatttgtagtttctctcttttttcctcacacctatggtttttttacttccaaaattattttcaaataatccatttttggctttcatcattatccctactagatgttatgtgttcttttgcaattgtttctgcttatacctttactagcaaagggaaaaataacaatttggtgtcaatgatctggtgacaataggattacattggagccaattgaataaatttattctttcaatcatatggatcttcattaatatttttgactgaattatcaattaaaaatatttcattccctttgtgcagaaactgctaaatccagggttcgattcttgaatgaactggcaaggtggctgtggtctgtagatatacatcccacattttgttgttataacagttagtagttagtattgctttcatatatagactccagaatctaaattttacgataatgacatttcttctggtcatgacaaatgtaatattttacaaatataaatctacgtagaatccaaagacacacacagagcagtcctgtctgagaaataaaaaatcaggacacccatggcatcgtagtagcccctcgcgtccagcaggtggcgaagggaggtgaggtatatttattaaatgggaccgagtgggacggggacggggcagccctaagggtagggaagcattgtcaatttctggggatagaatgagacccaggcatagctggagtttgaagctttgaagcaaaaatatctgtagaacatcttaaacgtgaccaaaatatgatgttaaaatcagcaactctttatacgttaaaaactttgaaacctgtggccgggcatggtggctcgcgcctgtaatcccagcactttgggaggccaaggcaggtggatcacctgaggtcaggagctcaagaccagcctgaccaacatggtgaaaccccgtctctactaaaaatacaaaaattagctgggcatggtggcgcatgcctataatcccagctactcggaggctgaggcaggataatcgcttgaaaccgggagacagaggttgtggtgagccgagatcacgccattgcactccagccggggcaacaagagcaaaacttcatctcaaaaaaaaaaaaaaaagaaaaaggaaaaaaacaaacaaacaacaactttgaaacctaggaacaattttggacctgttggagcagaaatgtgtagttgtcattgaaggtgtgaacataccctacctctactctacatgtggaagacctgacccacagaggacatgaacccatgaagaagagtgatgtgacatgttttgcattttattagtaccatgatctaaccaactgagctaactggccacaccattttatcctttataatgatcactatgagggctgagtgcagaatggagtgtatgtggtcaagagtggaagctgtgaggctattgcagtaatccagaaagaaaggtgacaatggcttagacttcagtggtagtgttggaaatggacataaatagacatattcaggaaatatattgatcttagatctaataagacacgtaatagattagaagtagggaaattaatgaaaaagcagaattaaggatgacttctcactggcttgaaatgctaaatggatgacggtgctgtttagtgagttggggaagactgggcgtggtgatgggtgtagaaattgagaaaggaaaatcaagaatttccagaactttcagagcaatgttaaatactttccttgatagtgggtcagtcatcatttataagtgcatttctaaaaatattgcttaattttgtttttgagctttgtataagtggaattttgtgtgtactgattattttgctcaatactatgtctttaagattctctgtattgttgcatgtggctgagtttatttttgatgctgtgtagtgttttactaattaataaatcataattcagtttttactgttctattgatgga

SEQ ID NO: 1579 - DNA, 525 bp, HOMO SAPIENS
  misc_feature (295)..(295): n is a, c, g, or t
  misc_feature (297)..(298): n is a, c, g, or t
  misc_feature (430)..(430): n is a, c, g, or t
ggaggtaaactgtttcctgtccagccagaagtttgcggagggccttccccaggccaggcaatgctgcctgcgactctgtccctgacagcgttggatgcaccgtatctcttctgatattaagtctggaagtgatttactatccgagtcctcccacagttcgagccttttgatgtactttgtgtgcatgtgtttctgtcacatacgtgccacagtggaacagattttgttttgacactattttggttcatgatgttatactttgactattttacaataatagccaatgtaaacaaananntttgggattctcaaattattacttatgattcttggacattgcagctcttcgatactgacgcattcctagctttttccaaggacaccgtatgttaacatccgtgccagcctcattatccccacagccaggctntgggttgggcggtaatgagcattgtgcggtttcactttacactttgcaaagttgattaaggcagtgccttctcccatgatcatttttgtaccctg

SEQ ID NO: 1580 - DNA, 4398 bp, HOMO SAPIENS
gggcgacgagtgcgggcctcggagcgactgcagcggcggcggcggacgcggcctgaggcgagcggcggggcgtggggcggtgcctcggcccgggctcgccctcgccggcgggagcgtccatggcccccgggcgccggcggggcgcggccgcggcctgaggggccatgtccggggtggtgcggaccctcagccgctgcctgctgccggccgaggccggcggggcccgcgagcgcagggcgggcagcggcgcgcgcgacgcggagcgcgaggcccggaggcgtagccgcgacatcgacgcgctgctggcccgcgagcggcgcgcggtccggcgcctggtgaagatcctgctgctgggcgcgggcgagagcggcaagtccacgttcctcaagcagatgcgcatcatccacggccgcgagttcgaccagaaggcgctgctggagttccgcgacaccatcttcgacaacatcctcaagggctcaagggttcttgttgatgcacgagataagcttggcattccttggcagtattctgaaaatgagaagcatgggatgttcctgatggccttcgagaacaaggcggggctgcctgtggagccggccaccttccagctgtacgtcccggccctgagcgcactctggagggattctggcatcagggaggctttcagccggagaagcgagtttcagctgggggagtcggtgaagtacttcctggacaacttggaccggatcggccagctgaattactttcctagtaagcaagatatcctgctggctaggaaagccaccaagggaattgtggagcatgacttcgttattaagaagatcccctttaagatggtggatgtgggcggccagcggtcccagcgccagaagtggttccagtgcttcgacgggatcacgtccatcctgttcatggtctcctccagcgagtacgaccaggtcctcatggaggacaggcgcaccaaccggctggtggagtccatgaacatcttcgagaccatcgtcaacaacaagctcttcttcaacgtctccatcattctcttcctcaacaagatggacctcctggtggagaaggtgaagaccgtgagcatcaagaagcacttcccggacttcaggggcgacccgcacaggctggaggacgtccagcgctacctggtccagtgcttcgacaggaagagacggaaccgcagcaagccactcttccaccacttcaccaccgccatcgacaccgagaacgtccgcttcgtgttccatgctgtgaaagacaccatcctgcaggagaacctgaaggacatcatgctgcagtgagcgaggaagccccggggtttgtcgtcgttgagcagcccccacggctgtcggtcagactcttgggtgtgtgttgtctgtgtggtccttgagtgggtttctcggatccgtgccctggaatacctggctcaggaatgctgtcagaccagccagccagcgagctctaggcaaaaggacatggaaactgtcacgttagctactgaatcctgggggcgagtgaaactactgaaaatccgagtgatgatgttgtgaatacggaacacctaatcacacagcttgctttgcttttacagaaacgttcctctttttctgacgcagtttaattgaggaccgtgttgtgtgtgtatgtgtgtacacacgctctgtctttaatgacagaaacacaaaaaccagctggccttgcagacggcttttctaactcacaagtcttccctgagacagactaacctgaaagctttgcctaacagtagcttgtagagatccagtgcacgccgatgctgctaaactcagtgcctgagcccggccctgcagccccagccgcagtgtctgaaggccacctcccaaagggagcacgttgccttttcaaactcccgtgccgatttcctaagagcccctagtccaagcctctcagatgaagctgaggagccgtgcctaggatcccttcccagctctgaggacgggctgcagagctctgcaggtgtggattcaccttacgcccctacagcaggctcagcccttcccaccctgccccatgcccagcagcacaacacggagtgagacaggatgcccacggtgactgccgctccgtccgtgcacacacagcggtgctcttctccccttagccacccactgcccaacccaacggcaaagacacagaaaccaggtccccttgcagacggctctcccatcttcctgcaagtcatctgctcacacacagttggcagcacatagcgtttccttctttcagaaacattcctcttctggggcttcagaaagctggcaaggccactagcagagcttttgttaatgccccagctgcttggcgagctaacagctgacctttcgggaagcccacagacgctggaggaatcttgagtttctccaaactgccgctccaccagtgcctttggacagccgtgcctgttcgccgctctccctaagtctgattctcatcgaggcccctcgcttctatgactgtgcttgcagaagagtaaacactctcggatgccgctgtcctgggggagcccgcgggagcctgtgaatgttgatacgagctggccagtcctgggcccagctcacttgtccagctacctgccaggtggctttcactgtgtttaaaatacattgcattccaagctggtcccctctgtgtatcactctactgagaaatcctgcctagtgtgttttgggatgtgtcctagcatttacaagaaaatgaaaagcgtcctcttaattggcacccgaatgttgctgtggctcagtcacatatcccagggccctcgtcccgaggccgtgctgccccgagccccgagcccctctgcagctcacccttggcttgttttccgcaaacccggtaaacgcaagcccttggggcagatgcagaagcagaagagggaggggaaacctgcctctgggtcaccctgttagcacagcgttctcatcgggagacagcatggaactctctctcgcagtgctcgaggctgtgtgtcagtgtttgctgggcttgtggctccttttttggctggataaagaagtcgctgtttttgtactgcttctgtggctcttcacagacctcacggatgtgaccggagatgagtgccgatgaccacgttttaaaggagaaagagagctcctggtggggccctcggggtggtctcaggtcccatttgcagtctgcaacagtgacgcgcagcccggtccggagcgtggtgagctttgtttgccttctgggtcagctttcgctgtgtctcctgtgtgtgttagaatccagagcccagaggaagtgcaagcgggtcctccgccaacggggagagcctcttcgcggcgctgttggcgacagcagcgctgtgattcgcgtagcaggggagttgtttgaaacaccttcctgagtagtccggccttgtcaatgagtgcttgttttcctttaaacagtctgacatatttactcgtcactttcaaaccagaagcatgagaggaaggagatattgtggggtccgtttaactcgatagaaagcgcagggggatggcccccggcgcgggctcttgacccgctcagcgctgaccccaccgccctggccgaggcacttggccttgctgagctggacttcctcctcctcctcctcatgaccggggtgaattagaacgtttttaaagacacccccttccaaattctgtaacacattgtaattggagaagaaggaaactctgcaaggctaaactgtcattcacaacttggctacacatagactctagtcagttttgtctccagaaccttaggcttttgtattttttaattttaatttcactgttaatccttattgtcttttttattaagatgttggaaaagcaggaggtagttgtgcctcaattattgcaaaaatgtaacaataaagttcctcaaaataagatctgttcctcatagctatactgtgtacacataagacgcatatagggttttactgaaatctatttttaactcttatgttcgtagagaaattgtttcaaggattttgagtcataggtctgtaatttatagagatctctagaattcttattgtaattttcctacttctttgataaaagaaaaataagtcagattgttaactccaagattgaaaaaaaaaactcttgaaagaagattattagttgtaactaatttaggggttctgggcacagacatctaacctggtattgtaaggcagaggctcccattggaatggtagtggtccgggtcagttgttcatggtgtaagctttgcacagtgtattaacattgggagggtctggcttgaaaatttggccaccctcagcctctgaatgtttattaaaataaatttagtctttctttgcttaatataaaaaaaaaaaaaaaa

SEQ ID NO: 1581 - DNA, 184 bp, HOMO SAPIENS
  misc_feature (119)..(119): n is a, c, g, or t
  misc_feature (121)..(121): n is a, c, g, or t
  misc_feature (123)..(125): n is a, c, g, or t
  misc_feature (132)..(132): n is a, c, g, or t
aacagtaacagattgctactcacccaacacccaggtcaagtccaatgcaggtaggaataacagcaaatccttcaatttcttgattctgctcttaaaaatcttaacagaggccgggcacngngnnncacgccntgtaatgccagcattttgggaggccgaggcgggtggatcaccaagaccagcc

SEQ ID NO: 1582 - DNA, 9241 bp, HOMO SAPIENS
actgtctccaagatggcggccgtgtcagtttggggcatctccgcggtccggcccggggccccgggatctcggctgtccttcctcccggattctttctactaatccagatacttgttgaagtgctgactagtttcttggggaaagatgtcaaggaagagttgaaattcctagactggcataagatgcacatttttctgctctggagccgggaatgaaatattcttgagttcttacaactttatgacgagacccatgtgtggtgctattgagaaattcattgggaagttggaagacatttcaatcaacaggttgttttggtttctatagtacaattggggtggcattctgttttgtgaaaggaggaaggacttaggccagaaaactcatatgctatggttaactggttcccagcctccgagaatcttgttttccatggtgtaaaacttactcagcatcaggataagggataacgactctatggatatacagaatccttcaccatggtaaaactcgcaaacccgctttatactgagtggattttggaggccatcaaaaaagtgaaaaagcagaaacagcgtccttcagaagaaaggatatgcaatgctgtgtcttcatcccatggcttggatcgtaaaactgttttagaacaattggagttgagtgttaaagatggaacaattttaaaagtctcaaataaaggactcaattcctataaagatcctgataatcctgggcgaatagcacttcctaagcctcggaaccatggaaaattggataataaacaaaatgtggattggaataaactgataaagcgggcagttgagggcttggcagagtctggtggctcaactttgaaaagcattgaacgttttttgaaaggtcagaaggatgtgtctgcattattcggaggcagtgctgcctctggctttcaccagcagttacgattggctatcaaacgtgccattggccacggcagactccttaaagatggacctctttatcggctcaacactaaagcaaccaacgtggatgggaaagagagttgtgagtctctttcctgtttacctccagtgtcccttcttccacatgaaaaggataagccggttgctgaaccaatccccatctgtagtttctgtcttggtacaaaagaacaaaaccgagaaaagaagccagaggaactcatctcctgtgccgactgtggcaacagtggccatccatcctgtttaaagttttcccctgaactaacggttcgagtgaaggccttacggtggcagtgcatcgagtgtaaaacatgcagctcctgtcgagatcaaggcaaaaatgcggataacatgctcttttgtgattcatgtgaccgaggttttcacatggagtgttgtgatccgccactcacccgtatgccaaaaggcatgtggatatgtcaaatatgtcgacctaggaaaaaaggacgaaaacttctacaaaagaaggcagcacagataaaacggcgctatactaatccaataggacgtccaaaaaacaggttaaagaaacaaaacacggtatcaaaaggtcccttcagcaaagttcgaactggccctggaaggggtaggaaacgaaaaatcactctttccagccaatcagcatcatcatcatcagaagaaggatatttagagcggatagatggcttggacttctgcagagatagcaatgtctccttgaagttcaacaagaaaaccaaagggctcattgatggccttaccaaattttttaccccttcccctgatgggcggaaagctcggggggaagtggtggactactctgagcaatatcgaatcagaaagaggggcaacaggaaatcaagcacttcagattggcccacagacaatcaggatggctgggatggcaaacaagaaaatgaggagcgactttttgggagccaggaaatcatgactgagaaagatatggaattatttcgtgatatccaagaacaagcactgcagaaagttggagtgactggtccccctgatccacaagtccgctgtccctctgtcattgagtttgggaagtatgaaattcacacctggtactcctccccatatcctcaagaatactcaaggctgcccaaattgtatctttgtgaattttgtctaaaatatatgaaaagtagaactattctgcagcagcacatgaagaaatgtggttggttccatcctcctgccaatgagatttacagaaagaataatatttctgtctttgaggttgatgggaatgtgagtaccatttattgtcaaaacctgtgtcttttggcaaagttgtttcttgaccacaaaaccctctattacgatgtggagccatttcttttttatgtactaacacagaatgatgtcaagggctgccaccttgttggctacttttctaaggaaaagcactgccaacagaagtacaatgtttcctgtataatgattcttcctcaataccagcgtaagggctatggcaggtttctcatcgatttcagttatttgttatcaaagcgtgaaggccaagcagggtctccagagaaaccgttatctgatctgggtcgtctttcctacatggcatattggaaaagtgtaatattggagtgcctttatcaccaaaatgacaagcagatcagcattaagaagttaagcaagttgactggaatctgccctcaagacatcacttccacactccaccacctacgaatgctggacttccgtagtgaccaatttgtgattatccgccgggaaaaacttatccaggatcacatggcaaagcttcagctgaatttgcgacctgtagatgtagatccagaatgtttgcgctggactccagtcatagtgtccaactctgtggtctcagaggaggaagaagaggaggctgaggaaggagaaaacgaagagccacagtgccaggaaagagaattagagatcagtgtgggaaagtctgtgtctcatgagaacaaagaacaagattcttattcagtagaaagtgaaaagaaaccagaagttatggctccagtcagttctacacgtttgagcaaacaagtccttcctcatgatagtcttcctgcaaatagccagccatctcggaggggccgctgggggaggaagaacagaaaaacccaggaacgttttggtgataaagattctaaactgctcttggaagagacgtcttcagctcctcaggaacaatatggagaatgtggggagaaatcagaagccacccaggaacaatacactgaaagtgaagaacagctggtggcttctgaggagcagccaagccaggacgggaaacctgaccttcccaagagaagactcagtgagggggttgagccctggcgaggacagctcaagaaaagccctgaggctctgaagtgcagattaacagaaggaagtgagaggctgccccgtcgctacagtgagggtgacagggctgtcctcaggggcttcagtgagagcagcgaggaggaggaggagccggaaagccctcggtcaagctcgccaccaattctcacaaagcccacgctgaagcgaaagaaaccatttctccaccgaaggaggagagtccgaaagcgcaaacaccacaatagcagtgtagtcacagaaactatttctgagaccactgaagtgttagatgaaccttttgaagattctgactccgagaggccaatgccaagattagaacccacgtttgagatcgatgaagaagaggaggaagaggatgaaaatgaacttttccctagagaatacttccgtcgtttgtcttcgcaggatgtactcaggtgtcagtcctcttctaagaggaagtctaaagatgaagaagaagatgaagagtcagatgatgctgatgacactcctatcttaaagccagtatctcttttgcgaaaacgtgatgtgaagaattctcctcttgagccagatacatccacacctttgaaaaagaaaaagggatggcccaaaggcaagagccgcaaaccaatccactggaagaaaagacctggtcgaaaaccaggatttaagttgagtcgggaaatcatgccagtttctactcaagcatgcgtcattgagcccatcgtttccattcctaaagctggacgtaaacccaagatccaggagagtgaagaaactgttgagccaaaagaagacatgcccctacccgaggagaggaaggaggaggaggagatgcaagcagaggcagaagaggctgaagagggtgaggaagaggatgcagccagcagtgaagtcccagcagcctctccagcagacagcagcaatagtcctgagaccgaaaccaaggagcctgaggtggaggaggaagaagagaagccccgtgtctcagaggagcagaggcagtcagaggaggagcagcaggaattagaggagccagagccagaggaggaggaagatgcagctgcagagactgcccagaatgacgaccacgacgctgatgatgaggatgatggccacctggagtccacaaagaaaaaggagctagaggaacagcccacgagggaagatgtcaaggaggagcctggtgttcaagagtcttttttagatgctaatatgcagaagagtagggaaaagataaaggataaagaggaaaccgagctggattccgaagaggagcagccttcccatgacacgtccgtggtgtcagagcagatggctgggtctgaggacgaccacgaagaagactcccacactaaggaagagttaatcgaattaaaagaggaggaagagattcctcatagtgagctggatctggaaactgtacaggcagtgcagtctttgactcaagaagaaagcagtgagcatgagggcgcctaccaggactgtgaggaaactcttgcggcgtgtcagaccctgcagagttacacccaggctgacgaggaccctcagatgtccatggttgaagactgtcatgcgtcagaacataatagccctatctcctccgttcagtctcaccccagccagtcagtccgttcggtcagcagtcccaacgtgcctgcccttgagagtggctacacccagatcagcccagaacaaggatccctgtccgcaccctctatgcagaacatggagaccagccccatgatggatgtgccttccgtatcagaccactctcagcaggtggtggacagcggcttcagtgacctgggcagcattgagagcaccactgaaaactatgagaacccaagcagttacgactccacgatgggcggcagcatctgtgggaacagctcttcccagagcagctgctcctacggtgggctgtcgtcctccagcagcctcacccagagcagctgtgtggtcactcagcagatggccagcatgggcagcagctgcagcatgatgcagcagagcagcgtccagcctgctgccaactgcagcatcaagtcacctcagagctgcgtggtggagaggcctcccagtaaccagcagcagcagccgccaccaccgcctccacagcagccacagccgccgccgccacaaccacaaccagcaccacagcctccaccaccccagcagcagccgcaacagcagccgcagcctcagccccagcagcctccacccccaccccctccccagcagcagcccccgctgtcacagtgtagtatgaataacagtttcaccccagctcctatgatcatggagataccagaatctggaagcactgggaacataagtatctatgagaggattccaggggattttggtgccggcagctactctcaaccatcagccaccttcagcctagccaagctgcagcagctgaccaacaccattatggaccctcatgccatgccttatagccattctcctgctgtgacttcctatgcaaccagtgtttctctgtccaatacaggactggctcagctggctccatctcatcccttagctgggactcctcaagcacaagccaccatgacgccacccccaaacttggcatccactaccatgaacctcacatctcctctgcttcagtgcaacatgtctgccaccaacattggcattcctcacacgcagagattgcaagggcaaatgccagtgaaggggcacatttccatccgctccaagtctgcgccactgccctctgcggctgctcaccagcagcagctgtatggccgtagcccatcggcagttgccatgcaggctggccctcgcgcactggctgttcagcgtggcatgaacatgggggttaatctgatgcctactcccgcctataatgtcaattccatgaatatgaacaccttgaatgccatgaacagctatcgaatgacacagcccatgatgaacagcagttaccatagtaaccctgcctacatgaaccagacagcacagtatcctatgcagatgcagatgggaatgatggggagccaggcctatacccagcagcctatgcagcctaaccctcatgggaacatgatgtacacaggcccctcccatcacagctacatgaacgctgctggcgtgcccaagcagtcactcaacggaccttacatgagaagatgagcaagatgaacttgcaatcaaaaacttaaatatatataaataaaggaaccttttatactgacaaaccagagaaaaatggacctttttccagttaaaatattgctgtagatttagaggaatttttctttggtttattttattttttagaaaacctgatcttctctttttttgggttcattttgttctgggttttggttttcttcacaatcttgaacattttacagtagaactcatctaaaaatggatttggggatggggaaacatgcacaaaatcttttcataattaaaaagagccttactttctttacataccacatggacagaatttgtgtaaaagtgaattatctttattttaaaatgtatgtttcccctcactgtttgcagctcccaatgttgtcatttttaaatgttatatacatctcaagggttaaccagaccctttcctccaaacccaacctttcatttcctacttcattccagcaggaggcacttaggggagactcggatggggacatggagaacaacccaagctccttaaacttattattattgttaatattattattattattattaataaagtgaggcaggaaaatgcttctccttttaaaatcccctccactcctcacacacacacacctcttgaaacccttccccaagaatgtttctttatagacggacttcattgaaatctttgttgttcttgaatcaagtgtaatataatttttttcttcttttttaaaatattcccactcagcactcagagacacaaaaatactgtaagtctcaattaacagcagaatctcagagaaaagctgtttgcaatccaaatccagcctttggaggaatagagatggtcaattaacaatcaaaaagaggagattaacctcttgtttttttaccacctggtgaatcagccataacgcacacacacgccacccagcctcttgtttctagtatgtactttgaaatgctaactgagggtcttgatgcttgagcctttgactgataaaactcaaatagcagtccccagtgatttgcctcttaggttctttcttaaattgttggtggatgactgtacattttagtgatttgaaaaataactgacaaaccattgaaacagtttattttatgttggaagagatggcgcagatgtgtgtcagaagggagatcacggtgtgagtttcgtagctatttaagtgatacatacctctagtttttgtatgtcttttgagatcctgagttcatcccctgtgaatcagagtgcacaagcacctctcctgtgagtggctaatgagaagagggacagaccgaccaccagcacagtagggcagatctggacagcagaatgttataacgcaagttcatgtgttgctcccaactccattctcttttctctcgtgcaaccagtttgcccattctcttcctattacttgctccagggataggtaaaaaaaaaaaaaaaaaaaaaaaaaatatatatatatatatatacacacacacacacacacacacacacacatatatatatatatatattccatcattagaagatggaaactattataccacttggtatgtgcagtcaaatatccaaaagggggaagtactgcttagagaaatatctgtaagcattaaattctctcctttatttgtacattttatatagataaatttttaaagtactaattaggcattaacttttttcaaatgcacaggtttgttggtttttttaatacactttaattgactttctcaagcgtgctaggtagaaacgcagaattccacatcttcccgctctcagctctgagcatgtgcaaggctgtgtaggacccagtttctctgtatatactattccagttcccagtcatctatgtagaaagtgcactgtgctgccatcgccctacatcttcagctgtgtcattgcttcctggttggggtggggacggggtgggtcgggagggaggtatattgggaggagggtgggtcaaggcagaaggagaagctgttgaaatgagggccgtgaaatcagtttctgttggtttgcggttgtgtttggttttgtttgtttctttataaaaaattcaatcgggcagctcccttttccacaagcctctttgtgactgtagaactattgtagaaaaaaaaagttcttttctatattataaaagaaattatccaacacagtaatattggtacctgtcattttttcacttctgtttaaaaaaaatgtatttttagcaagataacttgggtaatcttctaaaaaagaaatttaaaaactcactgttagtgactttgatgccttttaaaataagagctttttcatttcattccatctttaaaattttttatctttgttgtagaatattaaaaactattttaagaaagataaattctctttaaagagatctctagcgtgtgtgaatagagctccagatgcctctaaaagccgcatgtacaaaggaagccacgtctatcctgtctgtttatatttgcttttcctgttttgtaacctctttgtactttgttcatggtgacttgtaagctaaggggaaggggtgcctagatgcctttgtatctctccatgtcacgcgctcctgggccagccggcctcccttcctctccttgtatgtaatacctttttttcccctttctagcaagtactttcaaaagaactctgtacattttaacataaaaaataaattatgttgagccattttgga

SEQ ID NO: 1583 - DNA, 9894 bp, HOMO SAPIENS
acaagctctccatgtgagctgacaggcgagtggaaacccctcgagtcacgctgcccggcggcggagggagcgctcgcccgcagtggcaacagctgcaccaccgtccccgtcgctctgccttcctcttctgcagcctctgctcttctgattacctccctcccccgtcctttggtgatttttttttttcaagaaggagagggcggggtaggtgtccgttccctcccctcttccccctcctttgccttcttggtttgaatttcctcccccggcgttgcactggcacacagtgcaagaggcaatacccgcacggagggagaacgaaggctgagactcccctgccgctccaagcccggaagaactggagcctggaggggggtgaggggagaagaggaagcgggaggggcttggcttcctcgcgtatttgaggacagcccatctcccttcaagaaccctacggagagtcggactgcatctccgcagcgagctcttggagcgccgccggccgggaggcgaaggatgcaggcggctccgcgcgccggctgcggggcagcgctcctgctgtggattgtcagcagctgcctctgcagagcctggacggctccctccacgtcccaaaaatgtgatgagccacttgtctctggactcccccatgtggctttcagcagctcctcctccatctctggtagctattctcccggctatgccaagataaacaagagaggaggtgctgggggatggtctccatcagacagcgaccattatcaatggcttcaggttgactttggcaatcggaagcagatcagtgccattgcaacccaaggaaggtatagcagctcagattgggtgacccaataccggatgctctacagcgacacagggagaaactggaaaccctatcatcaagatgggaatatctgggcatttcccggaaacattaactctgacggtgtggtccggcacgaattacagcatccgattattgcccgctatgtgcgcatagtgcctctggattggaatggagaaggtcgcattggactcagaattgaagtttatggctgttcttactgggctgatgttatcaactttgatggccatgttgtattaccatatagattcagaaacaagaagatgaaaacactgaaagatgtcattgccttgaactttaagacgtctgaaagtgaaggagtaatcctgcacggagaaggacagcaaggagattacattaccttggaactgaaaaaagccaagctggtcctcagtttaaacttaggaagcaaccagcttggccccatatatggccacacatcagtgatgacaggaagtttgctggatgaccaccactggcactctgtggtcattgagcgccaggggcggagcattaacctcactctggacaggagcatgcagcacttccgtaccaatggagagtttgactacctggacttggactatgagataacctttggaggcatccctttctctggcaagcccagctccagcagtagaaagaatttcaaaggctgcatggaaagcatcaactacaatggcgtcaacattactgatcttgccagaaggaagaaattagagccctcaaatgtgggaaatttgagcttttcttgtgtggaaccctatacggtgcctgtctttttcaacgctacaagttacctggaggtgcccggacggcttaaccaggacctgttctcagtcagtttccagtttaggacatggaaccccaatggtctcctggtcttcagtcactttgcggataatttgggcaatgtggagattgacctcactgaaagcaaagtgggtgttcacatcaacatcacacagaccaagatgagccaaatcgatatttcctcaggttctgggttgaatgatggacagtggcacgaggttcgcttcctagccaaggaaaattttgctattctcaccatcgatggagatgaagcatcagcagttcgaactaatagtccccttcaagttaaaactggcgagaagtacttttttggaggttttctgaaccagatgaataactcaagtcactctgtccttcagccttcattccaaggatgcatgcagctcattcaagtggacgatcaacttgtaaatttatacgaagtggcacaaaggaagccgggaagtttcgcgaatgtcagcattgacatgtgtgcgatcatagacagatgtgtgcccaatcactgtgagcatggtggaaagtgctcgcaaacatgggacagcttcaaatgcacttgtgatgagacaggatacagtggggccacctgccacaactctatctacgagccttcctgtgaagcctacaaacacctaggacagacatcaaattattactggatagatcctgatggcagcggacctctggggcctctgaaagtttactgcaacatgacagaggacaaagtgtggaccatagtgtctcatgacttgcagatgcagacgcctgtggtcggctacaacccagaaaaatactcagtgacacagctcgtttacagcgcctccatggaccagataagtgccatcactgacagtgccgagtactgcgagcagtatgtctcctatttctgcaagatgtcaagattgttgaacaccccagatggaagcccttacacttggtgggttggcaaagccaacgagaagcactactactggggaggctctgggcctggaatccagaaatgtgcctgcggcatcgaacgcaactgcacagatcccaagtactactgtaactgcgacgcggactacaagcaatggaggaaggatgctggtttcttatcatacaaagatcacctgccagtgagccaagtggtggttggagatactgaccgtcaaggctcagaagccaaattgagcgtaggtcctctgcgctgccaaggagacaggaattattggaatgccgcctctttcccaaacccatcctcctacctgcacttctctactttccaaggggaaactagcgctgacatttctttctacttcaaaacattaaccccctggggagtgtttcttgaaaatatgggaaaggaagatttcatcaagctggagctgaagtctgccacagaagtgtccttttcatttgatgtgggaaatgggccagtagagattgtagtgaggtcaccaacccctctcaacgatgaccagtggcaccgggtcactgcagagaggaatgtcaagcaggccagcctacaggtggaccggctaccgcagcagatccgcaaggccccaacagaaggccacacccgcctggagctctacagccagttatttgtgggtggtgctgggggccagcagggcttcctgggctgcatccgctccttgaggatgaatggggtgacacttgacctggaggaaagagcaaaggtcacatctgggttcatatccggatgctcgggccattgcaccagctatggaacaaactgtgaaaatggaggcaaatgcctagagagataccacggttactcctgcgattgctctaatactgcatatgatggaacattttgcaacaaagatgttggtgcattttttgaagaagggatgtggctacgatataactttcaggcaccagcaacaaatgccagagactccagcagcagagtagacaacgctcccgaccagcagaactcccacccggacctggcacaggaggagatccgcttcagcttcagcaccaccaaggcgccctgcattctcctctacatcagctccttcaccacagacttcttggcagtcctcgtcaaacccactggaagcttacagattcgatacaacctgggtggcacccgagagccatacaatattgacgtagaccacaggaacatggccaatggacagccccacagtgtcaacatcacccgccacgagaagaccatctttctcaagctcgatcattatccttctgtgagttaccatctgccaagttcatccgacaccctcttcaattctcccaagtcgctctttctgggaaaagttatagaaacagggaaaattgaccaagagattcacaaatacaacaccccaggattcactggttgcctctccagagtccagttcaaccagatcgcccctctcaaggccgccttgaggcagacaaacgcctcggctcacgtccacatccagggcgagctggtggagtccaactgcggggcctcgccgctgaccctctcccccatgtcgtccgccaccgacccctggcacctggatcacctggattcagccagtgcggattttccatataatccaggacaaggccaagctataagaaatggagtcaacagaaactcggctatcattggaggcgtcattgctgtggtgattttcaccatcctgtgcaccctggtcttcctgatccggtacatgttccgccacaagggcacctaccataccaacgaagcaaagggggcggagtcggcagagagcgcggacgccgccatcatgaacaacgaccccaacttcacagagaccattgatgaaagcaaaaaggaatggctcatttgaggggtggctacttggctatgggatagggaggagggaattactagggaggagagaaagggacaaaagcaccctgcttcatactcttgagcacatccttaaaatatcagcacaagttgggggaggcaggcaatggaatataatggaatattcttgagactgatcacaaaaaaaaaaacctttttaatatttctttatagctgagttttcccttctgtatcaaaacaaaataatacaaaaaatgcttttagagtttaagcaatggttgaaatttgtaggtactatctgtcttattttgtgtgtgtttagaggtgttctaaagacccgtggtaacagggcaagttttctacgtttttaagagcccttagaacgtgggtattttttttcttgagaaaagctaatgcacctacagatggcccccaacattctcttccttttgcttctagtcaaccttaatgggctgttacagaaactagttcgtgtttatatactatttcctttgatgtcctataagtcggaaaagaaaggggcaaagagaacctattatttgccagtttttaagcagagctcaatctatgccagctctctggcatctggggttcctgactgataccagcagttgaaggaagagagtgcatggcacctggtgtgtaacgacacaatcagcacaactggagagaggcattaaagaaccagggaaggtagtttgatttttcattgaattctacaagctaatattgttccacgtatgtagtcttagaccaatagctgtaactatcagctgcaataccatggtgaccagctgttacaaaagattttttcctgttttatctgaaacatactggatttatatatgtataagcgcctcaatggggaattagagccagatgttatgatttgtttgctctttttcttttatagtttagttatagcaaaaatatggataatttctagtgaatgcataaattaggttgcgtttcttattttgctttaaatctctggtagtttttccacccctgtgacacaatcctaatagacagtgtcctgtaaatggacacaacacaataaagtcaagttattattgctgttactctggatgatatggaaaacactgccatattttaaatcaactactccacgtgtttttccatccaatcacactgctgtgattcagggatctttcttctaagacggacacatttgaacctcaggttcatcacaaacctggtacctgttgcttcccagaggatggagaagtgtagttaatcacacctcttagtttaatctgaaatcttgacccagttatttaacaaataaatacctcattgattatatttaaaagtaatacacttcctgtaaacaaatggggacaatgcatccaaaaaatctttttaaacagattacacaaaaattatttccagaaaggctaccatttatcatcattatatttcaagcctcttatacttaataagcactttctaaaaagtcttgagatcccaccattctgaggaattcaatatgatcactttttccttctttgcctgggagaggttaagaggaggtttcgaaggtatagatgctattgttctgatggcccggctgaataaaatggaaattctagtttgttagaattatgcattctttttcaagattctcagtgtgcctaacttattggagcacatcagtttcttgggtaatggaaaacattacctagagttgccagtggcacattacaccagtacagagcacattccaaaggagacattggaccagttaattcccatacaagtcaaggtaacagaacaaaagggaatcctgatgcccttttaccattgctggttgagctcaggcactgtcatggacacccttaattttaaaaggttttaatcattcttctataaaatacatttaaaatggaaaaatacttaatatcactaaatatcagaacaatgtaacatttacaaatgacatattgaaagcaaaggctgttttatttagccaagatgattaccattaggagttactttatgtattgttgaaagcaaattttaaacatgatgttttagaagtgtttctgatttttaaacctggtttacaggtattacttctgcacttaccaaataatgccagatggaaatttattatttcttgcaattcccatgatagctctgttctttatgcattgtctcaacactttcccttttttcccaaaatgagtagagaattaaagccacccaaaacagcttctgctactaaaatgttctcatcctttctcctccctctccttttcctgccacaaaaggtgaaaaatgagatccaatcctctcaccaaaatttcaaacctaggacactggaatgactgcagggatcagtggttctcccatatcaccatcaattaagacatataggacactgtcttccttcaagagggttacaatgtggccatcagacaggaaaccaaacggtggataaagtattaagtaactaagtgccaaataaatgctggaaatcttgacctctccttgggattatgggtgtaacaaaaatccctacatctgtttatgaaggccatattcagtacattttaaatggtaaataatctgtttatgtgaagaaaaagaattaagtctttcttccaactctctccttggatagcctagcacagtgcagcctccataaccatgacattcccgcccaagctctcagtgcctaatcctgctttgtcattcacatctcacaaaatcttgacatcttacattccaatacattatcaagcaagcacaagtatgctggtagtagcctctttaaataatatgtatagacaacaacaacgacaaaaaatagactgttttaaagtttcagggaaagttggtggctgatttaaagttgtgcaggaaacatcttctgtgtatgaagcaaatgtcgatgttttgaaaaaagctaggagatgactttgaatgaatgcaaggttagtgagatcctaagctctcaaaatagcatattccctagagctcaagaaagctggtccaggaggttgaaaaagctattttgttgttaaattattttctggcccttcttaatatttaaaaatgtatttccccttgtggctttcaaccacctgctcaaaaaaagagacttgttacatgaaagttttcattaaagagctgaaaacaagaatttagagagccattcctagaaaatgtcctactgccctgcatttgacaaacaagcatcctttactaacaagagcaggaattcagaggcacaagaaaaagcattggcatgagccaaagagtctgtcttaatgttacttttgaaaatctgctgagcggccaccatatgcaggctgagagctgggcacaggcgaagccattggaagcacttcaggaacaagcacacagctgtgggacttgaacatgcaagtgttcaggttgtgtcaagaagcttttctttccttctatgatggaatctgttcttttctatcctacttttttctctcttcctctcctcaccacattataccctgctcttacgcagtaaacgttttaatggcccgtttatgtctcatgcctccaaacaacactgaatttgaaaccccccattttttcttttcaccaccctgttgagcaattttcccaaaaaaagggcagcaattattaaattgaattcaagtaagccagccaaagataggtcctaaattgctagtcccagtagaaccacctgatcctaaaccagtgcgaaacaaacagtaacaatgtccccagctgacttcagctaagaaccaatggctcctacccccgccccgcttttttttgttgttttttgttttgttttgagacggagtcttgctctgtcccccaggctggagtgcactggcgcaatctcgggctcactgcaacctcctcctcctcccacattgaggcgattctcctgcctcagcctcccaagtagctgggattacaggcacccgccatcacacccagctaatttttttttttttttgtattattagtagaagccaggtttcaccatgttggccagggtggtctcgaactcctgacctcaagtgatccgtccacctcggccttgcaaattgctgggattacaggtgtgagccaccgtgccgagccagccccattttttaaatgatgttttggttaagagtggaccatgagaattagctgacagcatcccctttctctctccctgccttggtgggaccctccctgtgtgaccttggtcaagtcctcgaacttttgtcccgtatttaagatggagctgttttacctacttcataagacagttgcgaggtgccattgattcttgactgcaaaataccttgaaacccttatataaagactgaagtcaacggagcctagtgaaagacttactttgtggcttgtggttgaaagtcacatcaaaagacaaatgtggccacgttcaggaattggagacttactggcatggctctacagctgctcagttattaatcatgcagactaacctgtcaacactgggagatgcaacatagcaaaaggacagagaaattagaattttttgtgcagaaagccctaaattcccacctgaatgtaacttacagctcccttacctactctcacacatgccctcaaacatgctagattggcttatacataggccaacacaaaatacaaacgtgacgtgttcatgtagcctagtggctatatgcctattctccatgtaccctgcatggtagtgctgcaaactttaaagtacatttctttcacagcagtattttttttcataagtggcatataaatgtcattcaatgaaatggggaaatcacgttgagaagttggtctgtcatctcccattgagcaaagactggcaggagataataaaaataaatatgggcacacatgtattaatatacagcacgcatttacaagtttattttccagataaaattgtgctataagaacagctctaccaagacagtctgcaccatttccaagtctcagttaatttacagcaactgctgctttcggagatggctgtgaaaatatggaagttcctctcaagtaggccaagaaacagttctagattttactaagttttattttgtcaggttttttaaattttttcagtgagcgtggtgactgcagaggttagtgctgtgaaaagctgggctaaatattctttctgtaaagtcaaacaggattccatcccctgtgaaataacacaaaatttcactctctaaaagcaacagcatgtaaactagaatgaaagaaggaaattatgtacgtatgcctaatattctttgtgaatgtctttcatttaactaaaattatattagaaaccagattgataaataaaaaattcaaagtagttttaattatcctaaaa

SEQ ID NO: 1584 - DNA, 1370 bp, HOMO SAPIENS
cacggccggtctgtgccggctgctcccgcggttaggtcccgccccgcgcagcgcgcgcagcctgcggagccagcggccgtgacgcgacaacgattcggctgtgacgcgacaacgattcggctgtgacgcgagcgcggccgctcccgatgcgctcgtgccgcccccgccgtgctcctcggcagccgttgctcggccggttttggtaggcccgggccgccgccaggcctccgcctgagcccgcacccgccatggacaactacgcagatctttcggataccgagctgaccaccttgctgcgccggtacaacatcccgcacgggcctgtagtaggatcaactcgtaggctttacgagaagaagatcttcgagtacgagacccagaggcggcggctctcgccccccagctcgtccgccgcctcctcttatagcttctctgacttgaattcgactagaggggatgcagatatgtatgatcttcccaagaaagaggacgctttactctaccagagcaagggctacaatgacgactactatgaagagagctacttcaccaccaggacttatggggagcccgagtctgccggcccgtccagggctgtccgccagtcagtgacttcattcccagatgctgacgctttccatcaccaggtgcatgatgacgatcttttgtcttcttctgaagaggagtgcaaggatagggaacgccccatgtacggccgggacagtgcctaccagagcatcacgcactaccgccctgtttcagcctccaggagctccctggacctgtcctattatcctacttcctcctccacctcttttatgtcctcctcatcatcttcctcttcatggctcacccgccgtgccatccggcctgaaaaccgtgctcctggggctgggctgggccaggatcgccaggtcccgctctggggccagctgctgcttttcctggtctttgtgatcgtcctcttcttcatttaccacttcatgcaggctgaagaaggcaaccccttctagagggagccatgagggtctgggcttcagagctaggtctttggggaagtcctggctgactgccttagcagtgggggtgggggtgggggcaggggcaggggctttatgtgtttttgcttggggggcgctgggcctagcccagagtagtgcttgctccccctgccttgtcccaccagggaggcagcagactcaggccctccatggtcctctttgtcattttgttgacatgcattcctccttttgtcatcttgttggggggaggggattaaccaaaggccaccctgactttgtttttgtggacacacaataaaagccccgtttatttgtaaaaaaaaaaaaaaaaaaaaaaaaaaaaaaaaa

SEQ ID NO: 1585 - DNA, 2637 bp, HOMO SAPIENS
cgcccctcgccttctgcccgggcgctcgcagccgagcgcggccggggaagggctctcctcccagcgccgagcactgggccctggcagacgccccaagattgttgtgaggagtctagccagttggtgagcgctgtaatctgaaccagctgtgtccagactgaggccccatttgcattgtttaacatacttagaaaatgaagtgttcatttttaacattcctcctccaattggtttaatgctgaattactgaagagggctaagcaaaaccaggtgcttgcgctgagggctctgcagtggctgggaggaccccggcgctctccccgtgtcctctccacgactcgctcggcccctctggaataaaacacccgcgagccccgagggcccagaggaggccgacgtgcccgagctcctccgggggtcccgcccgcgagctttcttctcgccttcgcatctcctcctcgcgcgtcttggacatgccaggaataaaaaggatactcactgttaccattctggctctctgtcttccaagccctgggaatgcacaggcacagtgcacgaatggctttgacctggatcgccagtcaggacagtgtttagatattgatgaatgccgaaccatccccgaggcctgccgaggagacatgatgtgtgttaaccaaaatggcgggtatttatgcattccccggacaaaccctgtgtatcgagggccctactcgaacccctactcgaccccctactcaggtccgtacccagcagctgccccaccactctcagctccaaactatcccacgatctccaggcctcttatatgccgctttggataccagatggatgaaagcaaccaatgtgtggatgtggacgagtgtgcaacagattcccaccagtgcaaccccacccagatctgcatcaatactgaaggcgggtacacctgctcctgcaccgacggatattggcttctggaaggccagtgcttagacattgatgaatgtcgctatggttactgccagcagctctgtgcgaatgttcctggatcctattcttgtacatgcaaccctggttttaccctcaatgaggatggaaggtcttgccaagatgtgaacgagtgtgccaccgagaacccctgcgtgcaaacctgcgtcaacacctacggctctttcatctgccgctgtgacccaggatatgaacttgaggaagatggcgttcattgcagtgatatggacgagtgcagcttctctgagttcctctgccaacatgagtgtgtgaaccagcccggcacatacttctgctcctgccctccaggctacatcctgctggatgacaaccgaagctgccaagacatcaacgaatgtgagcacaggaaccacacgtgcaacctgcagcagacgtgctacaatttacaagggggcttcaaatgcattgaccccatccgctgtgaggagccttatctgaggatcagtgataaccgctgtatgtgtcctgctgagaaccctggctgcagagaccagccctttaccatcttgtaccgggacatggacgtggtgtcaggacgctccgttcccgctgacatcttccaaatgcaagccacgacccgctaccctggggcctattacattttccagatcaaatctgggaatgagggcagagaattttacatgcggcaaacgggccccatcagtgccaccctggtgatgacacgccccatcaaagggccccgggaaatccagctggacttggaaatgatcactgtcaacactgtcatcaacttcagaggcagctccgtgatccgactgcggatatatgtgtcgcagtacccattctgagcctcgggctggagcctccgacgctgcctctcattggcaccaagggacaggagaagagaggaaataacagagagaatgagagcgacacagacgttaggcatttcctgctgaacgtttccccgaagagtcagccccgacttcctgactctcacctgtactattgcagacctgtcaccctgcaggacttgccacccccagttcctatgacacagttatcaaaaagtattatcattgctcccctgatagaagattgttggtgaattttcaaggccttcagtttatttccactattttcaaagaaaatagattaggtttgcgggggtctgagtctatgttcaaagactgtgaacagcttgctgtcacttcttcacctcttccactccttctctcactgtgttactgctttgcaaagacccgggagctggcggggaaccctgggagtagctagtttgctttttgcgtacacagagaaggctatgtaaacaaaccacagcaggatcgaagggtttttagagaatgtgtttcaaaaccatgcctggtattttcaaccataaaagaagtttcagttgtccttaaatttgtataacggtttaattctgtcttgttcattttgagtatttttaaaaaatatgtcgtagaattccttcgaaaggccttcagacacatgctatgttctgtcttcccaaacccagtctcctctccattttagcccagtgttttctttgaggaccccttaatcttgctttctttagaatttttacccaattggattggaatgcagaggtctccaaactgattaaatatttgaagagaaaaa

SEQ ID NO: 1586 - DNA, 507 bp, HOMO SAPIENS
  misc_feature (247)..(247): n is a, c, g, or t
  misc_feature (381)..(381): n is a, c, g, or t
ggtgaagcttggctcagttttcccagtcttctcttgggcttcctctttttctggagggcttgactctcgctcatcattagagtcgctaaagtaagaaaaaaggagttttacaaaaaaagtgtcaacaccaaccatggtggtgcaccgagaagccacaggacatttacctgaaagcctgaacgatgacagtgccgaagaggatgaagagggcagagaagatcagggacagcaggggcatcatttcccncctaaaaccaaattaacaaactattagctcaagttaaaatttcttctctccagctaaaaaaagataaaataaaaatcccaaaccaaaaactcttcacaccaataaacgcttactaatttcaggcaaacagagcntttcttggcgggtggaggtggtggaggggaaggtagagattgctcagtgttctaattcacagacagcttattctaaaagtttgattttgtatctcagtataataggctatgctcaataagttctgc

SEQ ID NO: 1587 - DNA, 1675 bp, HOMO SAPIENS
ccagccgtccattccggtggaggcagaggcagtcctggggctctggggctcgggctttgtcaccgggacccgcaggagccagaaccactcggcgccgcctggtgcatgggaggggagccgggccaggagtaagtaactcatacgggcgccggggacccgggtcgggctgggggcttccaactcagagggagtgtgatttgcctgatcctcttcggcgttgtcctgctctgccgcatccagccctgtaccgccatcccacttcccgccgttcccatctgtgttccgggtgggatcggtctggaggcggccgaggacttcccaggcaggagctcggggcggaggccgggtccgcggcagaccagggcagcgaggcgctggccggcagggggcgctgcggtgccagcctgaggctgggctgctccgcgaggatacagcggcccctgccctgtcctgtcctgccctgccctgtcctgtcctgccctgccctgccctgtcctgtcctgccctgccctgccctgtgtcctcagacaatatgttagccgtgcactttgacaagccgggaggaccggaaaacctctacgtgaaggaggtggccaagccgagcccgggggagggtgaagtcctcctgaaggtggcggccagcgccctgaaccgggcggacttaatgcagagacaaggccagtatgacccacctccaggagccagcaacattttgggacttgaggcatctggacatgtggcagagctggggcctggctgccagggacactggaagatcggggacacagccatggctctgctccccggtgggggccaggctcagtacgtcactgtccccgaagggctcctcatgcctatcccagagggattgaccctgacccaggctgcagccatcccagaggcctggctcaccgccttccagctgttacatcttgtgggaaatgttcaggctggagactatgtgctaatccatgcaggactgagtggtgtgggcacagctgctatccaactcacccggatggctggagctattcctctggtcacagctggctcccagaagaagcttcaaatggcagaaaagcttggagcagctgctggattcaattacaaaaaagaggatttctctgaagcaacgctgaaattcaccaaaggtgctggagttaatcttattctagactgcataggcggatcctactgggagaagaacgtcaactgcctggctcttgatggtcgatgggttctctatggtctgatgggaggaggtgacatcaatgggcccctgttttcaaagctactttttaagcgaggaagtctgatcaccagtttgctgaggtctagggacaataagtacaagcaaatgctggtgaatgctttcacggagcaaattctgcctcacttctccacggagggcccccaacgtctgctgccggttctggacagaatctacccagtgaccgaaatccaggaggcccataagtacatggaggccaacaagaacataggcaagatcgtcctggaactgccccagtgaaggaggatggggcaggacaggacgcggccaccccaggcctttccagagcaaacctggagaagattcacaatagacaggccaagaaacccggtgcttcctccagagccgtttaaagctgatatgaggaaataaagagtgaactgg

SEQ ID NO: 1588 - DNA, 10573 bp, HOMO SAPIENS
gcggggggagggcgagcccaagcgcgggggagggagtgtaaatagagcgaaggctgctctgtgtcagccccgtcaccgccgggcggcccgcgcggagtctgagggagatggaagttgagcaagagcagcggcgcagaaaggtggaggccgggaggacgaagcttgctcacttccgacagagaaaaacaaaaggtgacagttcgcattcggagaaaaagacggcgaagaggaagggctcggctgtcgatgcgtctgtccaggaggagagtccggtaaccaaggaggacagcgcactctgtggaggaggggacatttgcaaaagcacatcatgtgacgacacccctgatggggcaggaggggcctttgcagctcagccggaggactgtgatggagagaagagagaggacttggaacagctgcagcagaagcaagtcaatgaccatcctccagagcagtgtgggatgttcacagtcagtgaccacccaccagaacagcatgggatgttcacagtcggtgaccacccaccagaacagcgtgggatgttcacagtcagtgaccacccaccagaacagcatgggatgttcacagtcagtgaccacccaccagaacagcgtgggatgttcacaatcagtgaccaccaaccggaacagcgtgggatgttcacagtcagtgaccacacaccagaacagcgtgggatcttcacaatcagtgaccacccagcagaacagcgtgggatgttcacaaaggagtgtgaacaagaatgtgaacttgccattactgacctggagagcggccgtgaagatgaggctggcctgcatcagagtcaggccgtgcatggccttgagctggaggcgctgcgcctgagtctgagcaacatgcacacggcgcagctggagctgacacaggccaacctccagaaggagaaggagacggcattgacggagctgcgggagatgctcaacagccggcgtgcccaggagctggccctgctacagagcaggcagcagcacgagctggagctcctcagggagcagcacgcacgggagaaggaggaggtggtgctcaggtgtggacaggaagcagctgagctgaaggagaagttacaatcagaaatggagaaaaacgcccagatagtaaagaccctgaaggaagattgggaatctgaaaaagatttatgtttagaaaatctacgcaaagaactgtctgcaaagcatcaatcagaaatggaggatttacaaaaccagtttcagaaagaattggcagaacagagagctgagttggagaagatttttcaagacaaaaaccaggctgaacgggcccttaggaacctggagagtcatcatcaagcagccattgagaagttacgtgaagacctgcagtccgagcacggccggtgtttagaagacttggagttcaagttcaaagagagcgagaaagaaaaacagctggagttagagaatcttcaagcatcatatgaagacctgaaggcacaatcacaagaagagatcaggcgcttgtggtcccagcttgattctgccaggaccagtagacaggaattgagtgagctacatgagcaactcctggcgcgcacctctcgtgtggaagatttagaacagctgaagcagcgagaaaaaacccagcatgagtccgaactggagcaactgaggatttattttgaaaagaagttaagggatgctgagaaaacttaccaagaagacctaaccctgttacagcagaggctgcagggggcgagggaagatgctcttctggactctgtggaagttgggttgtcctgtgtgggtttagaagagaaacctgagaaaggaagaaaagatcacgttgatgaactcgagcctgagcgacataaggagagcctgccacgcttccaggcggagttagaagaaagccacaggcaccagctggaagcgctggagtctcccctctgcatccagcacgaggggcatgtctcagacagatgctgcgtagagacttcagcattgggacacgagtggcgtctggaaccctctgaagggcacagccaagagcttccctgggtgcatctccagggtgtgcaggacggggacttggaggccgacacagagcgggcagccagagtcttgggtctggaaactgagcacaaggtgcaactttcgcttcttcagactgagctcaaagaagaaattgaactcctaaaaatagaaaatagaaatttgtatgggaagttgcagcatgaaactcgtctgaaggacgatttggagaaggtaaaacacaatctaattgaagaccaccagaaggaactaaataatgctaagcaaaagactgagctgatgaaacaggaattccaaagaaaagaaacggactggaaagttatgaaggaggagctacagcgggaagctgaggagaagttaacattgatgctacttgaactgagagaaaaggctgaatccgagaaacagaccatcataaacaagtttgagcttcgagaagctgaaatgaggcagcttcaggaccaacaggcagcccagatcctggatctggagaggtccttgacggagcagcagggccgcctgcagcagctggaacaggacctcacttcagacgacgccctgcattgcagccagtgtgggcgggagccgcccacagcccaggacggggagcttgctgcgctccacgtgaaggaagactgcgccctgcagctgatgctggcccggagcaggtttttagaggaacgtaaagagatcaccgagaaattcagtgcggaacaagatgccttcctgcaggaggcccaggagcagcatgcccgtgagctgcagctcctccaggagagacaccagcagcagctcctgtcagtgacggcggagctcgaggccagacaccaggccgcgttgggcgagctgacagcctccttagagagcaagcagggggctctgctggctgcacgtgtggccgaactgcagacaaaacacgctgccgacctcggcgctctggagaccagacatctgtccagccttgattctttggaatcctgttacctctctgaatttcagaccatccgtgaggagcacaggcaggccctagagctcttacgagcagactttgaggaacaactgtggaaaaaggactctcttcaccaaacgattttgactcaagagttggagaaactgaagcggaaacacgaaggggagctacagtctgtgcgggaccacctgcgaaccgaagtgagcacagagctcgccggaaccgtggctcacgagctgcagggagtgcaccagggtgaatttggaagtgaaaagaaaactgctttgcatgaaaaagaggagacacttcggcttcagagtgcacaggcacagccttttcaccaagaggagaaagagtctttgtctctgcagcttcaaaagaagaatcaccaagtccagcagctgaaagaccaggttttatccttaagtcacgagatagaagagtgccgctccgagttggaggtgctgcagcagaggcgggagcgggagaaccgggaaggcgcaaacctcctctccatgctcaaggccgacgtcaacctgtcccacagcgaaagaggggccctccaggacgccctgcgcaggctgctgggtttgtttggagagacgctgagggcagccgtcaccctgaggagccggatcggggagcgcgtggggctctgcctggatgacgcgggcgcaggcctggccctgtcgacagctccggcgctggaggagacatggtctgatgtggccctcccggagttggacagaactttgtctgaatgtgcagagatgtcttccgtggctgaaattagcagccacatgcgtgaaagctttctcatgagcccagaaagtgtgcgggagtgtgagcagcccatccggagggtcttccagagcctcagcctggccgtggacggcctcatggagatggccctggactccagcaggcagctggaagaagcacgccaaattcattctcgttttgaaaaagaatttagttttaagaatgaggagacagcacaggttgtcaggaagcaccaggagctgctggagtgtttgaaggaggagagcgcagcaaaggcagagctggcgctggagctgcacaagactcagggtacccttgagggattcaaggtggagacagcagatctgaaggaggtgctggccgggaaggaggattccgagcaccgtctggtgctggagctggagagcctgagacggcagctgcagcaggcggcccaggagcaggcggcgctgagggaggagtgcacccgtctgtggagtcggggggaggccacagccacggacgccgaggccagagaagctgctctccggaaggaagtggaggatctgaccaaagaacagtcggagaccaggaagcaggctgagaaggaccgctcagccctgctctcccagatgaagattttggagtctgagttagaagaacagctgtctcagcatcgcgggtgtgccaagcaggcggaggccgtcactgccctggaacagcaggtggcatctctggacaagcatttgcgcaaccagcggcaattcatggatgagcaggcagccgagcgggagcacgagcgcgaggagttccagcaggagattcagaggctggaggggcagctccgccaggcggccaagccgcagccctggggccctcgcgacagccagcaggcgccgctggatggagaggttgagttgttacaacaaaagttgagagaaaagttggatgaatttaatgaattggctatacagaaagagtcggcagatagacaagtgttaatgcaggaagaagaaattaaacgtctggaggagatgaacatcaacatcaggaaaaaagtggcccagctccaggaagaagtggaaaaacagaaaaacatcgtgaaagggctggaacaggataaagaggtgttaaagaaacagcagatgagtagcttgcttctggcgtccacgttgcagtctacactagatgcaggcagatgtcccgagcctccttcgggcagccctcctgagggtccagaaatacagttagaggtgacacagagagcactcctgcggcgcgagagcgaggttttggacttaaaagaacagctagaaaagatgaaaggtgacttagaaagtaaaaatgaagaaatactacatctgaacttaaaattggacatgcagaacagccagactgctgtcagcctcagagaacttgaggaagagaacacgagcttgaaggtcatatataccagaagttctgagattgaagagctgaaagccactattgaaaatctgcaagagaatcagaaacgattacaaaaggagaaagcagaggaaattgaacaactccatgaagtcattgagaagctgcagcacgagctgtccctcatggggcctgtggtgcacgaagtcagcgacagtcaggctggcagtctgcagagcgagctgctctgctcccaggccgggggccctcgtgggcaggccctacagggcgagctcgaggctgcgctggaagccaaggaggccctgagccggctgctggctgaccaggagcgcaggcacagccaggccctggaggccctgcagcagcgcctccagggcgcagaggaggctgcggagctacagctggctgagctggagcgcaatgtagccctcagggaggctgaggtcgaagacatggcctcccggatccaggagttcgaagcggccctgaaagcaaaggaagcgacgattgccgagagaaatttagaaatcgacgctctgaaccagcggaaggcggcccactctgccgagctggaggccgtcctgttggccttggcccgcatccgccgcgccctggagcagcagcccctggcagccggggcggcgcctcccgagctgcagtggctccgagcgcagtgtgcccgcctcagccgccagctgcaggtgctgcaccagcggttcctgaggtgccaggtggagctggacaggcggcaggcccgcagagccacagctcacacacgggtgcccggggcccacccacagcctcgcatggatggtggcgccaaggcccaggtcaccggcgacgtggaggcctcccatgatgctgctttggagccggttgtccctgacccacagggtgatctgcagcctgtcctggtgacgttgaaggatgcacctctctgcaagcaagaaggcgtgatgtcagtgctcaccgtctgccagaggcagctgcagtcggagctgctcttggtgaaaaatgaaatgcgcctgagtctggaggacggcggcaagggtaaagaaaaagtactggaagattgtcagctgccgaaggtcgatctcgtagctcaggtgaaacagcttcaggaaaaactgaaccgtttgctgtattccatgaccttccagaatgtggatgctgccgacaccaaatctctgtggcccatggcctcagcacacctgttggagagcagctggagtgatgattcctgtgacggagaagagcctgacatatcaccccacatagacacatgtgatgccaatacagccacggggggtgtaactgatgttatcaaaaatcaggccatagacgcgtgtgatgccaatacaaccccagggggtgtaactgatgttatcaaaaattgggattccttgataccagatgaaatgccagattctcccattcaagaaaaatcagaatgtcaggacatgtctctttcttcaccgaccagcgtacttggtggctcccgccaccagagccacactgcagaggctgggccccggaagagcccggtcgggatgctggacctgtcttcctggagctcccctgaggtcctcaggaaggactggaccctggagccctggcccagcctccccgtgacaccccactcaggagccctgagcctgtgcagtgccgacacatccctgggggacagggcggacacctcgctgccacagacccaggggccggggctgctttgttccccaggcgtgtctgcagcagcgctggcactgcagtgggccgagtctccgccggctgacgaccaccatgtgcagaggacggctgtggagaaagatgtcgaagattttatcacaacatcctttgattctcaagaaacattaagttcacctcctcctggattagaaggaaaagctgatagaagtgagaaaagtgacggctcgggttttggagcaagactgagcccggggtcaggaggccctgaggctcaaactgctggtcctgtgacccctgcttccatctctggaaggtttcagccgctgccggaagccatgaaggagaaggaagtgcgtccgaagcacgtgaaggctttactgcagatggtgcgtgacgagagccaccagatcctggcgctgtcagaaggccttgcacccccaagcggcgagccacacccaccccggaaggaagacgagatacaggacatctcgctccatgggggaaagacgcaggaagtgcccaccgcgtgccccgattggagaggggaccttctgcaggttgtgcaagaggcctttgaaaaagagcaggagatgcagggggttgagctgcagccccgactcagtggctcagatctggggggtcacagctccctgctcgaaaggctggagaagatcatccgtgagcagggagacctgcaggaaaagtccctggagcatcttcgcttgccggaccggagcagcctgctgtccgagatccaggcgctgcgtgcccagctgcgcatgacgcacctgcagaaccaggagaagctgcagcacttgcgcacggcgctgacaagcgcagaggcgcgcgggagccagcaggagcaccagctgcgcaggcaggttgaactgctggcttataaagtagagcaggagaagtgcattgctggtgacttgcagaagacgctgagtgaagagcaagagaaggcaaacagcgtgcagaagctcctggcggcggagcagactgtagtgcgagatttgaagtccgacctctgtgagagcaggcagaagagcgaacagctgtcccggtccctctgcgaggtgcagcaggaggtcctccagctgagatccatgctgagcagtaaggagaacgagctgaaggccgcgcttcaggagctggagagtgagcaggggaaggggcgtgccctgcagagccagctggaggaggagcagctgcggcacctgcagagggagagccagagtgccaaggccctggaggagctgcgggcgtctttggagacacagcgtgctcagagcagtcgactctgcgtggcactgaaacacgagcagacggccaaggacaacctgcagaaggagctgcgtatcgagcactcacgctgcgaggccttgctggctcaggagcggagccagctctctgagctccagaaggaccttgcggctgagaagagccgcaccctggagctgtcagaggccttgcggcacgagcggctcctgaccgagcagctgagccagaggacacaggaggcttgcgtgcaccaggacacacaggcccatcacgctctgctgcagaagctgaaggaggagaagtcccgggtggtggacttgcaagcgatgcttgaaaaggtgcagcagcaagccctgcattctcagcagcagcttgaggctgaggctcagaagcactgtgaggcgctcaggagagagaaggaggtaagtgccacactgaagtcgacggtggaagccctgcacacccaaaaacgagagctgagatgctctctggagagagagagggagaaaccagcgtggttgcaggcagaattagagcagtcacacccacggttgaaagagcaagaaggacgcaaggctgcgaggaggagcgcggaggccaggcagagcccagcggctgcggagcagtggaggaagtggcagagagacaaggagaagctgcgagaattagaactgcagcgtcagcgtgacttgcataagatcaagcagcttcagcagacagtgagagacctggagtcgaaggacgaggtgcctggcagccgcctccacctaggttctgcccgcagggctgccggctcggatgcggaccacctccgggaacagcagcgagagctggaggcgatgaggcagcggctgctctctgccgcccggcttctcaccagcttcaccagccaggccgtggacaggacagttaatgattggacgtcatccaatgagaaagcagtgatgtctttactgcacacgttggaggagctgaagtctgacttgagcaggcccacctcctcccagaaaaaaatggcagcagagctgcagttccagtttgtggacgtcctgctgaaagacaatgtttccctcacaaaagcgctcagcacggtgacccaggagaagctggagctgagcagagccgtgtctaagcttgagaagttgctgaagcaccatctgcagaagggctgcagcccaagcaggtcggaaaggtctgcttggaagccagacgaaacggctccacagagttccctgaggcgcccagaccccggccggcttccaccagctgccagcgaggaagcacacaccagcaatgtcaagatggaaaaattgtacctgcattacttgagagcagagagctttagaaaagctctgatttatcaaaagaagtatcttttgctgttgattggtggattccaggattctgaacaagaaacactctccatgattgcccatttgggggtatttccttccaaagcagaacggaaaatcacatctcgtcctttcaccaggttccgcacggccgtcagggtggtcattgcaatattaagattacgttttttggttaagaaatggcaagaagtagatcggaaaggagctctggcacaaggcaaagcccctcgcccagggccccgagcacgacagccgcagtctccacccagaaccagagagtcccccccaacccgggatgtaccctctggccacaccagggaccctgccagaggccgcagactggcagcagcagcctccccacacagtgggggaagagccactccatccccaaattcaagattagaaagatccctgactgcttctcaagatccagaacattccttgacagagtatattcaccatttagaagtgatccagcaaagattgggaggggtactaccagattctacttcaaagaaatcctgccacccgatgattaaacagtgaataaaatgtcatggctctttcctgcgacaattctatttgaggaaaagatttgtttttcccttttcccaaggaagctcgtgggacagcatgggcactactcttcatgtgcggtgacaccagcccccagatgccttgaattaagtgtcctcacctttatgcatgactgcaaagccagctggagcattttctatggagcctccgtatgttttaggcccatgaccttcgtgaggtgacgggcactcactcccatgagccctggctgtgtgctgttgtgtgcctatcggcagatccatccttcctgcctccaaggaggatacacagagaatggcttcctgttgttttgtttattttcttaacgtgtacagatggaaacttcatttaaaaataaaaacaaaacaactcaaaaaggaataaaatttaatcactgttttgtttgtgaataaaaaaaaaaaaaa

SEQ ID NO: 1589 - DNA, 406 bp, HOMO SAPIENS
gctcttttgttccaatgctgcagcctcagtcccaaaatgaagggagcgacgtttgccgaactgaaaagggtcgcccggtcaggcggcacgtgtgcccggaggggctgagggcgtgaccgccagccacggtcaccacccgacgcaggtcagtgcctcgtggtggaggagcgtgggcagaatcacggggtgcagaggagccgaagaccgtcccctcagctccggggcagctcctgtgcggctctgcacttcctggtacccgtggggacagcgctggcatcgacggcggcgtggcgggcggggtaggcggcagtaaggcgggcagtgttcgagctcatctcgcacgcggcactgtccctgctctccctggcagcagcaggaagacctgggtccttgtcgctgaaaaaat

SEQ ID NO: 1590 - DNA, 420 bp, HOMO SAPIENS
  misc_feature (149)..(150): n is a, c, g, or t
  misc_feature (157)..(157): n is a, c, g, or t
  misc_feature (165)..(168): n is a, c, g, or t
  misc_feature (170)..(172): n is a, c, g, or t
gggagatcccaagcaggtttagtacggtgcttcactgaaggaatatcaacatttaagaagatggtggagagataatcgtagactatggtgtgcagaagccaacaaaggctgaagtaacatacaatcttcaatttctactgaaatgggannttttgangacactannnncnnntacaaaggagggtgaaaataaaatatgaggcaaacagtaaatctcaggaatgaggtagacgaaaaaataagcgcagcatattgactaaagcacatttcttcctctatagtttgggaactgtgtcacagtcggaccaatatatggctctaaccaacatgtagcttttcttttcttttctttttttttttttttggtcttcttaatttgaggatttagcattccagttgtcatgtttgatgccattctga

SEQ ID NO: 1591 - DNA, 305 bp, HOMO SAPIENS
  misc_feature (57)..(57): n is a, c, g, or t
  misc_feature (65)..(65): n is a, c, g, or t
  misc_feature (92)..(92): n is a, c, g, or t
  misc_feature (152)..(152): n is a, c, g, or t
  misc_feature (192)..(201): n is a, c, g, or t
  misc_feature (203)..(204): n is a, c, g, or t
  misc_feature (206)..(207): n is a, c, g, or t
gtggttaataatatcgactctgggaagattgatttttcaagactccttcccatttcntaatttanttctgcttacttagtttggttttttanttttagcagacattttagcaaagcagaaatatatttttcctgtggattttagacttgcantcttatatttacgaacttacaaaaacttatcccagaattnnnnnnnnnntnnanntgcttaggcaaattaagtatgatcaagtcttctttattgtgtgctgtaaaaatggagtggcggcaagaatgtaatacagggcatctgactgctgagca

SEQ ID NO: 1592 - DNA, 3688 bp, HOMO SAPIENS
ggggcgggacctggggcggagagcggttcgcgcgcttcgggcctagtccggactcgccgccgccgccgccatattcccgtggcatcttccttactttgtccatcctccggactcgcgatcttccttccggagccatgtcagaaggagtggacttgattgatatatatgctgacgaggagttcaaccaggacccagagttcaacaatacagatcagattgacctgtatgatgatgtgctgacagccacctcacagccctcagatgacagaagcagcagcactgaaccacctcctcctgttcgccaggagccatctcccaagcccaacaacaagacccctgcaattctgtatacctacagtggcctgcgtaatagacgagctgccgtttatgtgggcagcttctcctggtggaccacagaccagcagctgatccaggttattcgctctataggagtctatgatgtggtggagttgaaatttgcagagaatcgagcaaatggccagtccaaagggtatgctgaggtggtggtagcctctgaaaactctgtccacaaattgttggaactcctaccagggaaagttcttaatggagaaaaagtggacgtgaggccggccacccggcagaacctgtcacagtttgaggcacaggctcggaaacgtgagtgtgtccgagtcccaagagggggaatacctccacgggcccattcccgagattctagtgattctgctgatggacgggccacaccctctgagaaccttgtaccctcatctgctcgtgtggataagccccccagtgtgctgccctacttcaatcgtcctccttcggcccttcccctgatgggtctgcccccaccaccaattccacccccaccacctctctcctcaagctttggggtccctcctcctcctcctggtatccactaccagcatctcatgcccccacctcctcgattacctcctcatcttgctgtacctccccctggggccatcccacctgcccttcacctcaatccagccttcttccccccaccaaacgctacagtggggcctccaccagatacttacatgaaggcctctgccccctataaccaccatggcagccgagattcgggccctccaccctctacagtgagtgaagccgaatttgaagatatcatgaagcgaaacagagcaatttccagcagtgccatttccaaagcagtatctggagccagtgcaggggattacagtgacgcaattgagacgctgctcacagccattgcggttatcaaacagtcccgggttgccaatgatgagcgttgccgtgtcctcatctcctctcttaaggactgtcttcatggcatcgaagccaagtcctacagtgtgggtgccagtgggagctcttccaggaaaagacatcgctcccgggaaaggtcacctagccggtcccgggagagcagcaggaggcaccgggatctgcttcataatgaagatcggcatgatgattatttccaagaaaggaaccgggagcatgagagacaccgggatagagaacgggaccggcaccactgagaaaggagtctggttggaagcaaatgtttttttaatggacttgcatctcctcaccttgatcaggactaaaggacggaggccgccccacccccttccctttcctccaaacccctaactccctccagacacccagggaataccctctgccccacaggattgaagactgcttggcagtcctcccaatcccacacctcctgtttgccaggggaaagaacctaaagacttcgtgtgattgggaggggtggcagacaggaagaaaacatgtccaggcccctggtctccatagagaatggtgctttgtccaagaaaacgtatgagtttctgattctccgggagccgttcaatggtgaggttgatgggaagacttccttcccaaagaaaatagatcctccatgcaggatctaggagagtgactgggtgtgccaaaatatgcccagggtcctgccctcagcactagatttaatggggccaagagggtccaaaccccttgctaacataccacttctttgtttaactcctttacctttccagccctttgaggagggaccatgagaacagaaattaccttatgaaaagctacttctgttcctgctttccctctcacgtattgacggtttatttctttgacctcccagagggctgaactctttcaactctgcgctgcccagccttctcagtggacttgcccctcctaagcagagaaggcctatgaggttgcttgctgctgggaagcctggcagagccaattaccaccctctgctgcttagtgcttgggtacctcttgcaataaccagctcttagttgttccctttccctggggcttttccatttaacacatggagcccttcccccagaaggctacttccttgttttagaggaaggtactgcccattgggagatggggacattgggacctcagcaatgaagaacccttgtgaagtaaccaggaggaatggggaaagaagcaagttgggcaggatatggcctacttccataggcttttcttttttcaggtttgatgtaagcatgggcttacatcccccaggtacatacttttacttattgtgggataacctggcactagtaggcaggtaaagtcacaaatttggtgtcttttcaccttttgactgttgacttaatagctcctctcactctgcctggagatacttcctgcctcagatgaggagccagaagaaacagagcccgacttgaatgaactcagctcagagttctaaggaccagcattctgggggccattttctctacaggcaaatggaattgcttttccataacatccaaattgtaatgtggttgctgctgaaggaggaggcagcagcgaggtcctgcggtacccatggggtgatgctacttctgcatgcatctacagggcatctgacacctaacatgagacgtggcatgtgagatgagacttggcatgtgagacatagggtcactagagacccttctgggtcagaggagagagactgaattggactaaacccgtcctctgttcccagcacgtttctcatatagccctcagtcactgagggagtcccccgcaggattggagaggcacattcccttgggacagaggctacaggttggagctttttttcccctgtcccccaaccccatccccacctccacttcagaacatggcaccccacccaactggccaagtgttaagtgatgtgcttattgagagcaactccgggtgtcttttaaaatgtagagaaaaggtgacagtttaaggaaaaatatatatagaataccagaaatgccgtttacccggagaatttttttctccccatttgttttgtttttactcaatgacaccatttttagttttatttcctgatagcaaaaggaaaaaaaacacccatccctcaaaaaggccaaggtcccgtccccctgttgtcggtgatttgtttgtctttctgataggttgaaaattgtgtaataaacttgatgacgctgtcaatcttttatactgcattgtatttttttccttttgtaacaaaatatttttaaataataaatggggtgtgagctgttttatggaaaaaaaaaaaaaaaaaaaaaaaaaaaaaaaaaaaaaaaaaaaaaaaaaaaaaaaaaaaaaaaaaaaaaaaaaaaaa

SEQ ID NO: 1593 - DNA, 6531 bp, HOMO SAPIENS
gcccagccagcttgcgtcaccgcttcagagcggagaagagcgagcaggggagagcgagaccagttttaaggggaggaccggtgcgagtgaggcagccccgaggctctgctcgcccaccacccaatcctcgcctcccttctgctccaccttctctctctgccctcacctctcccccgaaaaccccctatttagccaaaggaaggaggtcaggggaacgctctcccctccccttccaaaaaacaaaaacagaaaaacccttttccaggccggggaaagcaggagggagaggggccgccgggctggccatggagctgctgtgccacgaggtggacccggtccgcagggccgtgcgggaccgcaacctgctccgagacgaccgcgtcctgcagaacctgctcaccatcgaggagcgctaccttccgcagtgctcctacttcaagtgcgtgcagaaggacatccaaccctacatgcgcagaatggtggccacctggatgctggaggtctgtgaggaacagaagtgcgaagaagaggtcttccctctggccatgaattacctggaccgtttcttggctggggtcccgactccgaagtcccatctgcaactcctgggtgctgtctgcatgttcctggcctccaaactcaaagagaccagcccgctgaccgcggagaagctgtgcatttacaccgacaactccatcaagcctcaggagctgctggagtgggaactggtggtgctggggaagttgaagtggaacctggcagctgtcactcctcatgacttcattgagcacatcttgcgcaagctgccccagcagcgggagaagctgtctctgatccgcaagcatgctcagaccttcattgctctgtgtgccaccgactttaagtttgccatgtacccaccgtcgatgatcgcaactggaagtgtgggagcagccatctgtgggctccagcaggatgaggaagtgagctcgctcacttgtgatgccctgactgagctgctggctaagatcaccaacacagacgtggattgtctcaaagcttgccaggagcagattgaggcggtgctcctcaatagcctgcagcagtaccgtcaggaccaacgtgacggatccaagtcggaggatgaactggaccaagccagcacccctacagacgtgcgggatatcgacctgtgaggatgccagttgggccgaaagagagagacgcgtccataatctggtctcttcttctttctggttgtttttgttctttgtgttttagggtgaaacttaaaaaaaaaattctgcccccacctagatcatatttaaagatcttttagaagtgagagaaaaaggtcctacgaaaacggaataataaaaagcatttggtgcctatttgaagtacagcataagggaatcccttgtatatgcgaacagttattgtttgattatgtaaaagtaatagtaaaatgcttacaggaaaacctgcagagtagttagagaatatgtatgcctgcaatatgggaacaaattagaggagacttttttttttcatgttatgagctagcacatacacccccttgtagtataatttcaaggaactgtgtacgccatttatggcatgattagattgcaaagcaatgaactcaagaaggaattgaaataaggagggacatgatggggaaggagtacaaaacaatctctcaacatgattgaaccatttgggatggagaagcacctttgctctcagccacctgttactaagtcaggagtgtagttggatctctacattaatgtcctcttgctgtctacagtagctgctacctaaaaaaagatgttttattttgccagttggacacaggtgattggctcctgggtttcatgttctgtgacatcctgcttcttcttccaaatgcagttcattgcagacaccaccatattgctatctaatggggaaatgtagctatgggccataaccaaaactcacatgaaacggaggcagatggagaccaagggtgggatccagaatggagtcttttctgttattgtatttaaaagggtaatgtggccttggcatttcttcttagaaaaaaactaatttttggtgctgattggcatgtctggttcacagtttagcattgttataaaccattccattcgaaaagcactttgaaaaattgttcccgagcgatagatgggatggtttatgcaagtcatgctgaatactcctcccctcttctcttttgccccctcccttcctgcccccagtctgggttactcttcgcttctggtatctggcgttctttggtacacagttctggtgttcctaccaggactcaagagacaccccttcctgctgacattcccatcacaacattcctcagacaagcctgtaaactaaaatctgttaccattctgatggcacagaaggatcttaattcccatctctatacttctcctttggacatggaaagaaaagttattgctggtgcaaagatagatggctgaacatcagggtgtggcattttgttcccttttccgtttttttttttttattgttgttgttaattttattgcaaagttgtattcagcgtacttgaatttttcttcctctccacttcttagaggcattcagttagcaaagaggttggagcaacaacttttttttttttttttgcacaattgtaattgacaggtaatgaagctatttgttaaaatatttgcctttttaagtaaaaaagaaaaatcagaacagggctatttgaagaattattttatacacagattctgccttgtttcatagtatgagggttgaagacggaaaacaatctaagggtctctcatttttttaattttgttttgttcagtttggtttttttttttttttgcgctgctaagaagctaaagtcatccatccttattcacgttgacagtacctagctgtaatgtttcacagagtgtgctgctattttataaacatttttataatatattattttactgcttaaattccaagtcctgaagtagatggttgagatatgagttcttcgtactggaaaagcccttccgtagtttgttttcttctggtagcatattcatggttgtttttttttttcttttttggttttttggttttttttttttcctctgatcacattcttcaaagacggagtattctttacctcaggtttactggacaaaatcaataactacaaaaggcaatgattcacgcttttgttttcataatacctcacaaccgtacagtttctgcttgggagcccattcgcatgaggaatacagaagcagtgtgagcagggctgactccctctcaggtggaaggcagggcggtctcactcccagggacctttttggtcatggaggccatcgggctcccagttagaccctggtatcctcatcatgatggaaaaaatacattgaaccaagggatcctccctccccttcaaggcagacgttcagtacaaacatttatgcggtaggctcagatgtcgtaatttgcacttaggtaccaggtgtcaggaaacagactaaaaagaattccaccaggctgtttggagatcctcatcttggagctttttcaaaagcggggcttcatctgcaaagggccctttcatcttgaagtttttcccctccgtctttcccctcccctggcatggacaccttgtgtttaggatcatctctgcaggtttcctaggtctgaatctgcgagtagatgaacctgcagcaagcagcgtttatggtgcttccttctccctcctctgtctcaaactgcgcaggcaagcactatgcaagcccaggccctctgctgagcggtactaaacggtcgggttttcaatcacactgaattggcaggataagaaaaataggtcagataagtatgggatgatagttgaagggaggtgaagaggctgcttctctacagaggtgaaattccagatgagtcagtctcttgggaagtgtgtttagaagggttcaggactttgtgagttagcatgaccctaaaattctaggggatttctggtgggacaatgggtggtgaattctgaagttttggagagggaagtggagcagccagcaagtaagctagccagagttttctcaagagccagctttgctcagcacactctcctgggccccaaggagtcccacggaatggggaaagcgggaaccctggagttcttgggaatcttggagcctaaagagaaaccgaggtgcaaattcatttcatggtgactgacccttgagcttaaacagaagcagcaaatgaaagaaccggacaaataaggaagggcacaagcctacccgactctatttacagtctgtaactttccactcttcctgtagtcccgaggcccctgggtccttctagcttttctctttcccatccttggggccttgtgtgatgatgggtgtggggctgccgatgggaaagtcgggggttgttaggcttttctgcctgctcctgcttaaacacaagaaggaatcctggattttgccctctccttagctcttagtctctttggtaggagttttgttccagaggagctctcccccttggatttgaacttgctctttttgttgttgttgttctttctcttctttttcttacctcccactaaaggggttccaaattatcctggtctttttctaccttgttgtgtttctatctcgtctttacttccatctgtttgtttttttctccatcagtgggggccgagttgttcccccagcctgccaaattttgatccttcccctcttttggccaaatcctagggggaagaaatcctagtatgccaaaaatatatgctaagcataattaaactccatgcgggtccataacagccaagaagcctgcaggagaaagccaagggcagttccctccgcagaacaccccatgcgtgctgagaggcgagctccttgaagaaggggctgttcttccaggaggccttattttgaactgcctcaggaccccactggagagcacagcatgccttactactgggtcatccttggtctatgtgctctgtactggaggctctgttctgcctcttatcagccaggtcaggggcacacatggcttaagtgacaaagccagaggagaagacaaccctgacagcatcacgctgcatcccattgctagcaggattggcaactcttcagacggagctgcgcttccctgcagtctagcacctctagggcctctccagactgtgccctgggagctctgggactgaaaggttaagaacataaggcaggatcagatgactctctccaagagggcaggggaattttctctccatgggccacaggggacagggctgggagaagaaatagacttgcaccttatgtcatgtaaataattgattttctagttcaagaagataatattggtagtgtgggaattggaggtaggaaggggaggaagtctgagtaagccagttggcttctaagccaaaaggattcctctttgtttatctctgagacagtccaaccttgagaatagctttaaaagggaaattaatgctgagatgataaagtccccttaagccaacaaaccctctgtagctatagaatgagtgcaggtttctattggtgtggactcagagcaatttacaagagctgttcatgcagccatccatttgtgcaaaatagggtaagaagattcaagaggatatttattacttcctcataccacatggcttttgatgattctggattctaaacaacccagaatggtcatttcaggcacaacgatactacattcgtgtgtgtctgcttttaaacttggctgggctatcagaccctattctcggctcaggttttgagaagccatcagcaaatgtgtacgtgcatgctgtagctgcagcctgcatcccttcgcctgcagcctactttggggaaataaagtgccttactgactgtagccattacagtatccaatgtcttttgacaggtgcctgtccttgaaaaacaaagtttctatttttatttttaattggtttagttcttaactgctggccaactcttacatccccagcaaatcatcgggccattggattttttccattatgttcatcacccttatatcatgtacctcagatctctctctctctcctctctctcagttatgtagtttcttgtcttggacttttttttttcttttctttttctttttttttttgctttaaaacaagtgtgatgccatatcaagtccatgttattctctcacagtgtactctataagaggtgtgggtgtctgtttggtcaggatgttagaaagtgctgataagtagcatgatcagtgtatgcgaaaaggtttttaggaagtatggcaaaaatgttgtattggctatgatggtgacatgatatagtcagctgccttttaagaggtcttatctgttcagtgttaagtgatttaaaaaaataataacctgttttctgactagtttaaagatggatttgaaaatggttttgaatgcaattaggttatgctatttggacaataaactcaccttgacctaaattaaaaaaaaaa

SEQ ID NO: 1594 - DNA, 2093 bp, HOMO SAPIENS
ttagcggtgctcgggtccggtaacaacatggcggcgtccgtgaggggctcctttgggcaggggtagtgtttggtgtccctgtcttgcgtgatattgacaaactgaagctttcctgcaccactggacttaaggaagagtgtactcgtaggcggacagctttagtggccggccggccgctctcatcccccgtaaggagcagagtcctttgtactgaccaagatgagcaacatctacatccaggagcctcccacgaatgggaaggttttattgaaaactacagctggagatattgacatagagttgtggtccaaagaagctcctaaagcttgcagaaattttatccaactttgtttggaagcttattatgacaataccatttttcatagagttgtgcctggtttcatagtccaaggcggagatcctactggcacagggagtggtggagagtctatctatggagcgccattcaaagatgaatttcattcacggttgcgttttaatcggagaggactggttgccatggcaaatgctggttctcatgataatggcagccagtttttcttcacactgggtcgagcagatgaacttaacaataagcataccatctttggaaaggttacaggggatacagtatataacatgttgcgactgtcagaagtagacattgatgatgacgaaagaccacataatccacacaaaataaaaagctgtgaggttttgtttaatccttttgatgacatcattccaagggaaattaaaaggctgaaaaaagagaaaccagaggaggaagtaaagaaattgaaacccaaaggcacaaaaaattttagtttactttcatttggagaggaagctgaggaagaagaggaggaagtaaatcgagttagtcagagcatgaagggcaaaagcaaaagtagtcatgacttgcttaaggatgatccacatctcagttctgttccagttgtagaaagtgaaaaaggtgatgcaccagatttagttgatgatggagaagatgaaagtgcagagcatgatgaatatattgatggtgatgaaaagaacctgatgagagaaagaattgccaaaaaattaaaaaaggacacaagtgcgaatgttaaatcagctggagaaggagaagtggagaagaaatcagtcagccgcagtgaagagctcagaaaagaagcaagacaattaaaacgggaactcttagcagcaaaacaaaaaaaagtagaaaatgcagcaaaacaagcagaaaaaagaagtgaagaggaagaagcccctccagatggtgctgttgccgaatacagaagagaaaagcaaaagtatgaagctttgaggaagcaacagtcaaagaagggaacttcccgggaagatcagacccttgcactgctgaaccagtttaaatctaaactcactcaagcaattgctgaaacgcctgaaaatgacattcctgaaacagaagtagaagatgatgaaggatggatgtcacatgtacttcagtttgaggataaaagcagaaaagtgaaagatgcaagcatgcaagactcagatacatttgaaatctatgatcctcggaatccagtgaataaaagaaggagggaagaaagcaaaaagctgatgagagagaaaaaagaaagaagataaaatgagaataatgataaccagaacttgctggaaatgtgcctacaatggccttgtaacagccattgttcccaacagcatcacttaggggtgtgaaaagaagtatttttgaacctgttgtctggttttgaaaaacaattatcttgttttgcaaattgtggaatgatgtaagcaaatgcttttggttactggtacatgtgttttttcctagctgaccttttatattgctaaatctgaaataaaataactttccttccacattacatgttaaccattgcagactgcaagcctgtttgtgtccttttaccctaaaatatatgaaggcttccttttcaagatttttttataagaagttcctacagaaagaatatttgtgggaaacctccctttcactaacttcagaatataataaaatattataaataaaatatagaatataaatatgaaaaaaaaaaaaa

SEQ ID NO: 1595 - DNA, 4926 bp, HOMO SAPIENS
cgcagtctctctctctctccctcctccgggaggaactgccgcgctccggctgactcctccgccggcgggcggggcgggggagggggcttcgggcgcgctgggaaccgcgggacccggacctgggcgccgcccgccgggggacgcgcggcccccgcttccgccgggccccgctgagctctagacaaacctccgcttcagaaataggctgcgggcggccggctaggaggcttggcccccaccccgggacccccgccgtccccgggccggccggccggtgggcacgatgagccaggtgctggggaagccgcagccgcaggacgaggacgacgcggaggaggaggaggaggaggatgagctggtggggctagcggactacggagacgggcccgactcctccgacgccgatccggacagcggcacagaggagggagttctggacttcagtgaccccttcagcactgaagtgaagccgagaatcctgctcatgggcctgaggagaagcggcaagtcgtctattcagaaagttgtctttcacaaaatgtctcccaacgaaactctgttcttggagagcactaataagatatgccgggaagatgtttccaacagctcctttgtcaattttcagatttgggacttcccaggacagattgacttttttgaccctacatttgactatgagatgatcttccggggaacaggagcactgatatttgtcattgactcacaggatgattacatggaagccctggccaggctccacctcacggtgaccagggcctacaaagtgaatactgacatcaacttcgaggtgtttattcataaagtggatggtctgtcagatgaccacaaaattgaaacccaaagagatattcaccagagggcaaacgatgaccttgcagatgctggattagaaaaaattcacctcagcttttatctgacaagcatatatgatcattcaatatttgaagcttttagcaaagttgttcagaaactgattccacaactcccaactctggagaatttgctgaacatctttatctcaaattctggaattgaaaaggcatttctatttgatgtggtcagtaaaatttatattgcaactgatagtactccggtggatatgcaaacctatgagctctgctgtgatatgatagatgtggttattgacatctcttgtatttatggtctcaaagaagatggagcaggaaccccctatgacaaggaatccacagccatcataaagcttaataatacaaccgtgctttatttaaaagaggtgacaaagttcctggctctcgtttgctttgtcagagaggaaagctttgaaagaaaagggctaattgactataattttcattgcttccggaaggccattcatgaagtttttgaggtgagaatgaaagtagtaaaatctcgaaaggttcagaatcggctgcagaagaaaaagagagccacccctaatgggacccctagagtgctgctgtaggtgaggtttcaggaatgtcttttgaaatcagaccttatccatgaggctgctgcgccatgttgcactaaaggaagaggaagaaggagattgggacacataccattgatttgttgttaaaaaaaaaaaattcctgcaaccctcttgatcttctcttttataaataaagtaagcactttgaagcaaaaacttgtatattaacagtgatgtgaaatccattgtcatttcattacacaaatgtaaacttttatggtctgtagtcaaaaaaatcccgtgtgagaactgccaggaattgtacatattttgcactttttcatgtttctcattgaactgaactttgataaaacgacttttctaagctttttttctgtacttggtgtcaaggacatgcatactgtagtccatatctatatggcaatcagaaattaatcaaaaagtgatgcattggtaatgactttttgtaaatttggaaatctttgctaccaattgttgagaaaaatcatttttcagtggagctggaacagattggagctacaagctccaggagcaataagaactgtcccctatttataatgggtgtaaacagttttgtagaataatgctagcaccagacttacctaaaaatttctatagcagtggctgtgcttccctgctcaacggtttttatgaagctgtttacctcaacacacatctctataatcactttatacagagaggttatttctttttgttgcattagtattcttttgaaactttgggaccagatttccaaaatggtgccgaacactggagagaagtaagaatgtcactgaattgtagggtttctggaggcttttctgtacctaccacccagggctaaagtaacatcagaggcctaaagttgttccaaaagtatgtgattggcaactgcagactaaaaaacatagatacaattctggacttttggccctgtgcgatggtctggtgtgctgcatttaaaatgcttattcaggaccagttctttattgctccatgaccatagtgaatagaacaaatcgcagaaccccaccatggagctcaatcctgttagtcacttttgtcacctccacatctccttctcactggtgataacatgcctcatgtactccacttgttcccaccttatgattaagccaagctcagcctgccaccagcatgctctgcaaggctgaagagtcatcctgaagacccctaaaggtcagtgggaaaaggatggctggagagacattacaattagctgtgtaattgtttctgtgaaattatttcacttatgtttactttagactaacaggaaattaagagtcctaaatctacccctatgccaaatcattccaagtagataattttacgtgcatctcaagggttagcaccctaaggcatgcttgtggggcattagaaaatgagatttttttttttttaaagcagagcctcctaagaacatcaaagttggtcctagcaaaatatataaagtccctaaagcaacttatacttgaaactttttttttttttttttttagaggggggcctcattctgttgcttgtgctggaatacattggtacaatcatagctcactgttacctcttgggctcaagggatccttccacctcagcctccctagtagctagaactacaggtgtgcacaaccacgcccggctaattcttaaattttgtttttgtagagacaggatctcactgtgttgcccaagatggtctcaaactcctggccccaagcaatcctcctgccttggcctcctcaaatgctgagattacaggcctgagctactgtgcccagcctaaactttcccacttctctctgtggcttctttccaacctctctccttcctctccccaagtcctgtttctttgaagctggtaactgaatttaagatgatatctggttggtgtttaaggtttgagcctcccaaggttctgtgcattttgaaaggagatttctaaaaataattaaggtgccctaactcctttcctcatgattcctactccgaaacctggatggttaggagcccagggctccctgatttccagagctatatcctgttggacctttgccaacagacctgacacttaggggttattgttataaatctaattctctaatattttttacatgttgtttcactttgaataagcaaatgaagaatcagttttctaatatgactttatcctcaagctagagacactagcctatttggtaaatcacacattacttaggtatatttattactataaccaggttggagcttccatgtttaagctgggtatatgatgggtttttgttaaaatgtgccttaaaaagcctattacttcaagagcaaatgattctttgggggaaaggcaaaaataattctatgacatagggcccaagttcatggtagtaagtgtactctttgattaatcacacgctaatatagattactgcctctaactttgtaagtgtggcaatgacttcttaattaaagaaagatgcaggagttatgtctaagcgttcagtttttcaaatctgtgttattggaaatgtcttcaagtcattttgcattgtatttttgatatgagaggcagcttattgcgatgtgtatggccatgtttcattctcaaatttaattctataaatacaaatcctaaatacatggctacagcaactgcactggaacatttttgcttggttttagggattgagaacttgccttgcaggtttccttcctcaaaaggagcagggcagtcctttccctgttgagtcaattagaatttttacatagaggtgagactgtgaattattttggttattttcagtgatgtagattagtgtgaatgaccagggtggaatgtttttgaaggaatataaagcaaaaactggttgacattcacaaactgttcttttgtgaacatattttggacccttaaatatgactaaaatcacagcaatattgttacatacgggttatatgccaactctgtttgaaatatactctggaaaaacagctgaattgtcttggttattaaagtatggtatgtattcaacttgtacagactggatgtaatttgtaatcaggtatagtccatgttttactttaagcagtacatcacttaataaccattgttaagccattgctttcaagaatgttaactgccaatttaaaagcatgtgtcctaggttcatgctttggtaaagctctcatttcaagtgtattcatagctaagctttctgggagcagaattgtctctttggtgaaaaggaagtacagcctttcctgtttctgaggttgcttaccatacatgtatgtcactgtttcattggccctgttacatccatttggtaaaatttatttgtcctgattaaccagctctcattttatggaaatgatgataaatctcactacttaaatttaatttatgcttttatttttaa

SEQ ID NO: 1596 - DNA, 262 bp, HOMO SAPIENS
actctttggtgaactatagggtattaaagacaaagagaaaaattctaaaagcagactgggacaacaaatctgtatttgtagcaggaaaaagcatgaggttcaggttttgactgtactgcttgctgcctgtgtcatcttaagtaggtcacctacctgcttcgagcctcagaggacatctgtcattggctaatgggagtagaagtggctaataacaagaacaatgactaccacacgaggttttgtgagccctgaaatatttcca

SEQ ID NO: 1597 - DNA, 6670 bp, HOMO SAPIENS
gttggggaggcggtttcctagactacgacaccggaaagctgggggaggcgctccgggatactgagggcggagggcggtggcagcgctggcgctggggaccggcttggtggcttcgggaaacagtttggcgccggcggccgtccgtgttactccgcatcccgccccgtctcggcacggctagcagccccctggccaccagcgtccagcaatgtgtctcaccggccgggcgtagcagctgcgcgtgcgcggaaccgcggggccatgagcgaagccggcggccggggctgtgggtccccggttccccagcgagcgcgatggagactagtggcggcgacggccgcgttctgcctggtgtcggccacctccgtgtggacggcgggggccgagcccatgagtagggaggagaaacagaagcttgggaatcaagtactggaaatgtttgatcatgcttatggtaactatatggaacatgcttaccctgctgatgaactcatgcctttaacctgtagaggtcgagttagaggccaagagccaagtcgcggtgacgttgatgatgccttgggaaaattttctctgacactgattgattctttggacactcttgtggttttaaataaaactaaagaatttgaagatgcagtgagaaaagttttaagagatgttaatttagataacgatgtagtcgtatcagtctttgaaacaaacatcagagttcttgggggtcttttgggtgggcactccctggcaatcatgctgaaagaaaaaggtgaatatatgcagtggtacaatgatgaacttctccaaatggcaaagcagttaggttacaaacttttaccggctttcaacactaccagtggccttccttatccaagaattaatttaaagtttggcatcagaaaaccagaagctcggacaggaactgagacagatacctgtacagcttgtgcaggtaccttgatccttgaatttgctgctttaagtcgattcacaggagcaacaatatttgaggaatatgccagaaaagctcttgattttctctgggaaaaaagacagcgaagtagtaatttagtgggcgtgactataaatattcatactggagattgggtacgaaaagatagtggagttggagcagggattgattcatattatgaatatctgttgaaagcctatgtcttgcttggagatgacagttttctggaaagatttaacacacactatgatgccataatgaggtatattagccagccacctcttctacttgatgtgcatatccacaaaccaatgctgaatgctcggacttggatggatgctttgcttgccttcttcccaggcttgcaggtgttaaagggggatattagacctgctattgaaactcatgaaatgttatatcaggtgattaaaaaacacaattttctaccagaggcatttaccacagatttcagagtacactgggctcaacatcctttaaggccagaatttgcagaaagtacctacttcttatataaagctacaggagatccttactaccttgaagtagggaagacacttattgaaaatttaaataaatatgctagagtgccttgcggatttgctgccatgaaggatgttcgtactggaagtcatgaggacagaatggattctttcttcttggctgaaatgtttaaatatctttacctgttatttgctgataaagaagacattatttttgacatagaagattacatctttacaacagaagctcatctgttacctctttggctctctactacaaatcaaagcatctctaaaaagaacacaacctcggaatatacagaactggatgacagtaacttcgattggacttgtccaaatactcagatcctctttcctaatgacccattgtatgctcaaagtattcgtgagcccttgaaaaatgtggtggataagagctgtcctagaggcatcatcagagtagaggagagtttcaggagtggagctaaaccccctctgagagccagagatttcatggccactaaccctgagcatttagaaatcctgaagaagatgggggtgagtttgattcacctcaaagatgggagagtccagttggtccaacatgcaatccaagctgctagttcaatcgacgctgaagatgggttgaggttcatgcaggagatgattgaattgtcaagtcagcaacaaaaagaacagcagctgcctccacgagctgtacaaattgtttcccacccattttttggcagggtagtattgactgctggaccagctcagtttgggctggatctgtctaaacataaagagacaagaggatttgttgcaagcagtaaaccatccaatggttgttcagagcttactaacccagaggcagtgatgggaaaaatcgcactgatacaaagaggacagtgcatgtttgcagaaaaggcacgcaacatccagaatgctggagccattggtggcattgttattgatgacaatgaggggagcagcagtgatactgcccctctgttccagatggcaggtgatggaaaggatacagatgacatcaagatccccatgctgttcttattcagcaaagaaggaagtatcatactggatgccatccgggaatatgaggaggtagaagtgctcctctctgataaagcaaaagatcgagatcctgaaatggaaaatgaagaacaaccatcctctgaaaatgattctcagaatcagagtggtgaacagatttcatcaagttctcaggaggttgatttggttgatcaagagtcttctgaggaaaattctctaaattctcacccagaatcattatctctagcagatatggacaatgctgcaagcatttccccttctgaacagacttctaatcccacagaaaaccatgagactacaaatcttaatggtgaatgtacagatttagataaccagcttcaagaacaatcagaaactgaggaagattccaatcctaatgttagctggggtaaaaaggtccagcctatagactccatattagcagactggaatgaagatatagaagcatttgaaatgatggagaaggatgagctatgacttgctaaacaatctgttggtaggtatttaaaaagaaaaggtaaactgtgtgtggttaatagacatcctaatactaagcaggctttctaatgggaggctttaagtatggtgatgaacaaccacgttctgactggcgtagttatcgtaggaatctggagcatgctgtgttagaattgaccttgtttaaaactgtcccatcaaaaatggaaatccacagttcccccttcaaatgcagcactgcaccaccctgcaacacctcaggccagggaaagattactgagcattcctgcgaaccagatttctgttgtctctggatagacaagaaacaaaattcatttagtagtggagtggggaataggagtttggatagccttctaattaaaggaagctcgcctttcttggttttgggggttagaggctcttttgggaagatgcatccgagtattgtggcattctgattatgctgccttcacaaaacactctaagtgacctaagtggttatgaagcaaatgcatttatggtgaaaacagtctttgctcattgctttctcttgtttcatttagtgacaaatgatcaagatgacttgattttttttccttcttaacaatgtcttttttatttaaaccaaaggtgaagccagtgtactttctcagtgagttctctgcataaagactaatcagtgggaccaggtaaaaaggtcatataatacattgtggagattgcttacttaatacttctgaaaaatggagtaagggagaaactgtaatgttgcaatatgaacctcccattgggccttccatagggaaagctgtgactactctgaaatggaacctagcattatatccttgtagggtagattataaatcatttccagttcatttctcttagaggtgattacctctagccatcagccttactccatcccatgtttggtatgcaatttgagccacaaggctcgtatcgccaacagctatatacattttgttccatttttctgtcttacagagccatgatagaactgtggttagtgagttaaaattcctggagtaactactgtttttctcctttgaaacttaggtttctaaagttgcacctaaggaatctgtcacattttctgttgaatcatggtttttgtttttgtttttaacagatattccttctgatacggacttgaaaattagtgtatggtgacctgtgtttaaaaaaaaaagtacaatacaactacatatagctatatagcttaatgagacttccaccccccccctttttttttttggtttgttgttgttgtagtagtctggtgctggccacatttaagtcttaaaaatttttaaattttgttgttgatgtttgtagacagccctgttgttgaaatcatggctttattcattttatttattttttaaacttgcctgaatttgttctaaaggaatatttaagagacataattttcttctctttaccataacattacacaaaactttttcctaaaacacggttgtgaggtactgatgaggtgtaagtggagctgttaaaaacagcagtgctgtattgcagttatgtatattcgtgtacagtatgtttagatcccaggtaaacatattcttttctgagaggataaatacctgcattcagatattccaggtaaatataattgagtcagggagtagtaaatctgatggagaattcactttggggaggggaaaaagaatagtatgcaagacccttattggcttttaattatacctgaaaccaaaatggatatttttagtctctctgcatgtgagatttggtgtaacaagatagaactataatatatacagtatatggaaggatagatatagtgctttgttcattttaattgcaaagctgccaaaatagttgaagcttaattacttgacttgccttgatttataggactggggcttggagaaaatgagcagatgttcctctaagacatcgattacagaagccttatatacatggatttgattttgtatttgtagctgaaagtcactgttgtctaaaactaacttttctaagttatcaaaacaacctaatttcttttccaacaaggagaacttaatggcatgaaggattgtgtgacacattggaaaagccagcttactgccactctcttcctttggccattagagggaggtgttgcctttcattgacgcttagaagcaaattgttcacttgttaagaaaagtaaatccttaaaaaaagaaaaggaaaaaatttaaccaatttttcttaatacccagaaggaattatactcaatatttccctagttaagaaaagaggagataatgttcgtctaaaaaactccaacgttgtaattacaactctacattcatttacttacttgacatactgccacaaagtagtttttgagttcattaaaaattccaaaggcattagttgttttttttttttttagtgttttgttttttagttaacttttatagacattttagtaacttgctaaagattcaggggattctatgaaaccccgaatttagaaacatctggtctacctcagttaaatgttgactgcttagaaatatagctgaagtgatcaccacagccataaaattgtttaagaaagatttatataatgtttacaaatctggaatcaaggattttagctgaaatcctttaagagatattagagcaagtatttaattcaggtattttcaagttttaaaacttaacctgtttacctactaaaaataaaatagctagtttttttctgcatataaaagttcattgaaatgatatgcccttatttgcaatacttttcccataaagttttaagtgtgaaagaattgtaatttactagatatgtttggtatgggatattttgttaggcaagttttcttttttcttcttaaattgcaataggcttccaaaaagagtataattgtttcagaacaaattaactcttggcattatacgtctccctttttctttacagtattagtaaaaagaaaaattgtacactttctgattttaacttcactaatgtaattactctctcaagaagcttttaaaatttaaattaccatcacacaaccttttttatagtaaagccaacatttgttctctcaccaaaccccatgccaaattcatcatgaagaaagctcagcataagtaattcaaatactgcttataattttagaggggggtagaatttagtaaatattccagccggtcgttttatgcacaaggcttcagtcagaacatagaaaaaaaaaacattctgtgaatgaaatattgtatgttcagattttataaaagacatttttaaaagcccaatttacagccgtatattttcttatgatgtaatttatgaaaaagatgtctgtactaacaggtgctgtaacactactgttgttggattttattgtttggtgataaatgtatacaatatttctaagggaaactatgtactgtgatgtaaaagtctgggcaaaatgtatataatcctgtatataattatgtatttgattataattactgattgtaaagatttaataaaatatgtaaatattccagtttagttttaaaaaaaaaaaaaaaaaaaaaaaaaaaaaaaaaaaaaaaa

SEQ ID NO: 1598 - DNA, 2554 bp, HOMO SAPIENS; identical to SEQ ID NO: 284

SEQ ID NO: 1599 - DNA, 4771 bp, HOMO SAPIENS
agaaacccgcgccctccgaggggggaggggacagagggggcgtcacgggggcaggagaagaaggaggaggaggcccgcgtcgcctccggcggggctcgcgctcgccccgcgctcgccctccgcctcgcccgagccccgggagggtgaaacgctttctcccagcatgcagcgggaggagggatttaacaccaagatggcggacggcccggatgagtacgataccgaagcgggctgtgtgccccttctccacccagaggaaatcaaaccccaaagccattataaccatggatatggtgaacctcttggacggaaaactcatattgatgattacagcacatgggacatagtcaaggctacacaatatggaatatatgaacgctgtcgagaattggtggaagcaggttatgatgtacggcaaccggacaaagaaaatgttaccctcctccattgggctgccatcaataacagaatagatttagtcaaatactatatttcgaaaggtgctattgtggatcaacttggaggggacctgaattcaactccattgcactgggccacaagacaaggccatctatccatggttgtgcaactaatgaaatatggtgcagatccttcattaattgatggagaaggatgtagctgtattcatctggctgctcagttcggacatacctcaattgttgcttatctcatagcaaaaggacaggatgtagatatgatggatcagaatggaatgacgcctttaatgtgggcagcatatagaacacatagtgtggatccaactagattgcttttaacattcaatgtttcagttaaccttggtgacaagtatcacaaaaacactgctctgcattgggcagtgctagcagggaataccacagtcattagccttcttctggaagctggagctaatgttgatgcccagaatatcaagggcgaatcagcgcttgatttggcaaaacagagaaaaaatgtgtggatgatcaaccacttacaagaggcaaggcaagcaaaaggatatgacaatccgtccttccttagaaagctgaaagctgataaggaatttcggcagaaagtaatgttaggaactcctttcctagttatttggctggttgggtttatagcagacctaaatattgattcttggctcattaaagggctaatgtatggtggtgtttgggctacagtacagtttctttcaaaatcctttttcgatcattcaatgcatagtgcattgccccttgggatatatttggcaaccaaattctggatgtatgtgacgtggttcttctggttttggaatgatctcaactttttatttatccatcttccattccttgccaatagtgttgcacttttctacaattttggaaaatcttggaaatcagatccagggattattaaagcaacagaagagcaaaagaaaaagacaatagttgaacttgcagagacaggaagtctggacctcagtatattctgcagtacctgtttgatacgaaaaccggtgaggtccaaacattgtggtgtgtgcaaccgctgtatagcaaaatttgatcatcattgcccatgggtgggtaactgtgtaggtgcaggcaaccatagatattttatgggctacctattcttcttgctttttatgatctgctggatgatttatggttgtatatcttactggggactccactgtgagaccacttacaccaaggatggattttggacatacattactcagattgccacgtgttcaccttggatgttttggatgttcctgaacagtgttttccacttcatgtgggtggctgtattactcatgtgtcagatgtaccagatatcatgtttaggtattactacaaatgaaagaatgaatgccaggagatacaagcactttaaagtcacaacaacgtctattgaaagcccattcaaccatggatgtgtaagaaatattatagacttctttgaatttcgatgctgtggcctctttcgtcctgttatcgtggactggaccaggcagtatacaatagaatatgaccaaatatcaggatctgggtaccagctggtgtagcgacatcttatcctatgaagcatattgctgagtggtgcctgaaaattgtgtctgtccgtgtctttctcacactcgaatccacatcctttgaacaagagcatgctatgtgtagggctaatggtgaattttacagtctttttttcaacacttttattaacaaaagtaaacatggacagaacacactgccatttctgggaagagtaaagatgataaaaaataattttaatggttcttaatgtggaaattcacaacatactcaacttttgggttttgttctcacagtatttttcacaaaaaaagggtaaacttattctattgacagacatggtgtactgatcagaaatgttcagttttaactaaaactaaatttatgttatttggctaaatgttatgatgcagtctagtacgagtattgcatctaattccaggagcattgttttaagttgattgactagttattatgtacatttcagaatgtacacataaatactgtgatgaaaatcatgtgattgggatctactgtgatgttgtcttcaaaggcaggagaaaataatgttcacaataaaatgtgctaacaatgttttgtttctatcagctgttgcaatgctgatatatttctagttcagtgaaataatttgtagtaaccttactctgaggttttacggtctgataatgaagcacttgcatgagtatagtaagtcatgtttttttgttcaaatttaaaagccctgctaattgcatgacacaccacatagaatgtatactagcagatactatccagtgaagcataaattagaatttaatttgatgttcaaaaacagttccatttttaagggttaaggtggtattttcaagaaaaggcagaacaaataatgcaaaattctcagtaatagtgatacatggatatacttccttttaaattctcagctgcaaaataattgtagacaaaataatggcatttaactaaagatggagcatgatctaagtacatagcacatgtgaataaaagaaaagctgacagtatattctggtttcaataaaatgacctatcagaaagtagaatttcatccccaagagtatttcagtttatccaatattgagtaagttctgaaacagttttagaaaaaattttctttttgttaaatgtgatgcactgatcaatttttgtcacagcattttcataccttcatggtggactactagtcactgcttccataaatattgtttacagggtgagatttggtttattcatcttaagtgctgtagcaaactgtggttcgagcaacctgtgggaaatctgtgagagggaatggggtgggagatgtgggggaatggtggtcagactgatgacagatcctagaccaatgtaaagaatgtgtatctgtatataaataatttatcaaatagttttctctttgtgtctgtgttagtgtttttaaagctgctcatttcattttgtccaaccaaaaagaaaagggagataactaatgagcttctagtgatgttcaaaattgctgttaataggcattataccctgcaagttcactgcatgtctgatgcttggtaaaactagtcttccctgtaaaatgcagattacaggtattaaagcaatctagtggtatacccgccccttgccttagtaagaggagcagtgaaatgtatatagttgatgttcagtatttccaagtaccatttttatatagtagcttatttgaccataagtcacacatcaaaaaaagattacccttagtgtatgtgttttaatattagaaaattggcatatgtactttatttttgaaaagggaagagatgggtgtggggtggcaatagcattgtgccattttgtcatagaatgtaaaaattggttaactttacaaatgtcagctagttttgactactaattgggggaaattttagataatttttaaattcaaagttatttataaaatgctagaatttgttttaattttttgtattttgagccacttcacatgaagactcagttgcatttttatcgaatacatttttatcaacagttaaagactatggtggttttttcagagtttggctaagaatgttgttaccatcttctttgtttgtggtacaatattttcagtgcaaaagagatgtcattcagttaaaaagacaaacctctagatgtgtaattacatggaaaatactagcaatgtgaatgcttttgtagtaaccatcttgtagtacctgtgaaatctataactcagaaatggtcagatggtcaggagccagctatgcagcagtataccatctgtttaattattttgtaggtcctgtgtgtggaaccaactataaacccagttctaaagttgtgtatgatggtgaacctttgggaatagttcttatcaacttaattggatacttttagcaaataggaacttaattctcagcactgaacatgaattacttccttggagttttttttcattcatatttttgttgtttccaggaatttatttgatattaatgggcgtaaaacagcatcattgtacttaagctatggatgtttttattttatattttctttatttataactgtgccaagtattattttgctacttaccgtgttattctgtggaaagaaaaacctgtaaagtgtttaataaattagccctccttacataaattaaatgtcaaaattttgtaaaatattaatcagaataaatactgactctt

SEQ ID NO: 1600 - DNA, 410 bp, HOMO SAPIENS
  misc_feature (96)..(96): n is a, c, g, or t
gaaacgtgaacagctggcacagcagaagctggagtaatactcattgccacaaagctgggcctgcaggatcaaatcacagttggccagctctggctngtcgacgcagtccctgccagggtccctgggctgggcggtgggtgctgcagaacgacaggggagagagaaggtggtgaggaagctctgtgtatgctgaaaattctcacctgccatttcatttccttcaaaggaacacagcattataactgccagattgaaaacgaagtgcacttaccctgtaaccttttaaccatacgtacaaactctatgagggatgatgatttctacctgtttcttggcctcacttcaacatgcagtggtcctcccattattatttgtggcctcagcccactgaatagctcttcctagactcc

SEQ ID NO: 1601 - DNA, 2077 bp, HOMO SAPIENS
gcggcgggcggggcggcgctcggggctcggctggcctcggctcgcctcggctgcgctcggcaggctgcggtaaatccgggcttgcggccgctggcgtagtctgtggccgggtggtcgttgctgcgcgccccgagccccgagagccatgcagatgtcctacgccatccggtgcgccttctaccagctgctgctggccgcgctcatgctggtggcgatgctgcagctgctctacctgtcgctgctgtccggactgcacgggcaggaggagcaagaccaatattttgagttctttcccccgtccccacggtccgtggaccaggtcaaggcgcagctccgcaccgcgctggcctctggaggcgtcctggacgctagcggcgattaccgcgtctacaggggcctgctgaagaccaccatggaccccaacgatgtgatcctggccacgcacgccagcgtggacaacctgctgcacctgtcgggtctgctggagcgctgggagggcccgctgtccgtgtcggtgttcgcggccaccaaggaggaggcgcagctggccacggtgctggcctacgcgctgagcagccactgccccgacatgcgcgccagggtcgccatgcacctcgtgtgcccctcgcgttacgaggcagccgtgcccgacccccgggagccgggggagtttgccctgctgcggtcctgccaggaggtctttgacaagctagccagggtggcccagcccgggattaattatgcgctgggcaccaatgtctcctaccccaataacctgctgaggaatctggctcgtgagggggccaactatgccctggtgatcgatgtggacatggtgcccagcgaggggctgtggagaggcctgcgggaaatgctggatcagagcaaccagtggggaggcaccgcgctggtggtgcctgccttcgaaatccgaagagcccgccgcatgcccatgaacaaaaacgagctggtgcagctctaccaggttggcgaggtgcggcccttctattatgggttgtgcaccccctgccaggcacccaccaactattcccgctgggtcaacctgccggaagagagcttgctgcggcccgcctacgtggtaccttggcaggacccctgggagccattctacgtggcaggaggcaaggtgcccaccttcgacgagcgctttcggcagtacggcttcaaccgaatcagccaggcctgcgagctgcatgtggcggggtttgattttgaggtcctgaacgaaggtttcttggttcataagggcttcaaagaagcgttgaagttccatccccaaaaggaggctgaaaatcagcacaataagatcctatatcgccagttcaaacaggagttgaaggccaagtaccccaactctccccgacgctgctgagcccttccctcccctaatctgagaagtcagcctcttggctcctcaggccaccatttaggcctgactggggtaagaaatgtcgctccactttacagaggtagctgtggtgttgaaacactggacttggatatggggtgctgggatcgattcctagctttaccactaactagctgtgtggccttgagtaaatcccgttacctctctgagcctcggttaccctgtctgtaaaaagggaggtgagaatacctacctcacggaactgttgggaggctcagatgagatgctatatgtgaaaacattctgtaagcttcgtacaaatgtgaagtattaatattatcgcagtattattgttgttattattattgttattattaacaatcttgggtgggtagtaggagagcaaaaagtatgaatgggatggagctaagaagtctgaatacttaatgaaatggactttttggaaagaaatcagatgaaggcataaaatttagttcttagctcttgaacagaagcctaaaattcctggttctctcagggcttcgccttcaagggttctggaggagggaagggtctgcaggttccatgggtgacagcctgagatctgtcccttcaacgggctgggctgggtatgtgcctaccgatgacaatgtgtaaataaatgcgtgttcacacccacaaaaaaaa

SEQ ID NO: 1602 - DNA, 4322 bp, HOMO SAPIENS
gcgcatgcgcgaactcctggcgggacctacgcggtagaagtttctactaagtgaaaaggaagagcgagggattcttttctctgtggtctacagcagcagcactattattaaaaatatttggaaagacaacctggcaagttttgaaaaagatttttttaaaaacggtagggttccgctcacagtgggaggcggggctcagtggtccagaaacgcctcttcagaagagggcgggctcgccgagaggcggggtctcgggcccactcggatgacgtgccgcgtagaagtatcgcgggaagaggaagggagcgtaactcttagaagtcactatggtgacggggaggtaccaggtatttgagagcaatcgccaccgctttcctggaacttgagtaaatacaatcaagtggcatcttaaatttttgctggaagtggagtcatgagactaaagatatctcttttaaaagaaccaaagcatcaagaattagtaagctgtgtgggctggactactgctgaagagctgtattcatgtagtgatgatcaccagatagtgaagtggaacttgttaaccagtgaaacaactcaaatagtaaagcttcctgatgatatttaccctattgattttcactggtttccaaaaagtttgggtgtaaagaaacaaacccaggcagaaagctttgtcctcacaagttctgatggtaaatttcatctgatttccaagttaggaagagtggaaaaaagtgtagaagctcactgtggagcagtacttgcaggaagatggaattatgaaggaacagcattagttacagttggagaagatggacaaataaaaatttggtcaaagactgggatgcttagatcaactttagctcagcaaggaacaccagtgtattcagtagcgtggggccctgattcagaaaaggttctttatacagcaggcaagcagctaatcattaaacctcttcaaccaaatgctaaagttttgcagtggaaagctcatgatggcattattttaaaagtagattggaactcggtcaatgatcttattttatctgctggtgaagactgtaaatataaggtatgggatagttacggccgcccactgtacaattcacaacctcatgagcatcccattacttcagttgcctgggctccagatggagaattatttgctgttggatcgtttcatactttacgcttgtgtgataaaactgggtggtcatatgcattagaaaaacccaacactggcagcatatttaatattgcatggtctatcgatggcactcagattgctggagcctgtggaaatggacatgtcgtttttgcacatgtggtggaacaacattgggagtggaaaaattttcaagtaacattaacgaaaagaagagccatgcaggttcgtaatgttcttaatgatgcagtggatttactggaattccgtgatagagtcattaaagcatctttgaactatgcacacttagttgtttcaacgtctcttcaatgttacgtgttctccacgaagaactggaacacaccaattatatttgatctcaaagaaggaactgttagtttgattctgcaggcagaaagacattttcttcttgtagatggtagtagtatctatttatattcatatgaagggcgctttatttcatctccaaaatttcctggaatgagaacagatattctgaatgcacagactgtgtctttgagtaatgataccatagcaataagagacaaagctgatgaaaaaataatcttcctctttgaggcatcaaccggaaagccgttaggtgatggaaagtttctttctcataagaatgaaatcttggaaattgctctggatcaaaaaggacttaccaatgatagaaaaattgctttcattgataaaaatagagatctctgtatcacttctgtgaaacgatttgggaaggaagaacaaattatcaagcttggaacaatggtgcatactttggcatggaacgatacatgcaatatcctttgtggacttcaagatactcgatttatagtgtggtattaccccaatacagtttatgtggacagagacattttgcctaaaacattatatgaaagggatgcaagtgaatttagtaaaaatccccatattgtgagttttgttggaaatcaagtaactattagaagagctgatggctccctggttcacatcagcataacaccatatcctgctattctccatgaatatgtaagcagttcaaaatgggaagatgctgtgagactttgtcgctttgttaaggagcaaaccatgtgggcttgtctagctgctatggcagttgctaatcgagatatgactactgcagaaatagcctatgcagcaattggtgaaattgataaggttcagtacatcaattctataaaaaatcttccatctaaagaatcaaaaatggcccacatactactgtttagtgggaacatacaggaggctgaaatagtacttcttcaggctggccttgtttatcaagcaatccagatcaatattaatctctacaactgggaaagggcactggaattggctgtaaaatacaaaacacatgttgatacagttcttgcttaccgtcaaaagtttttggagacatttggtaaacaggaaactaataaacgatacttgcattatgcagaaggtctccaaatagattgggagaaaatcaaagccaaaattgagatggaaattacaaaagaaagagagcaatcatcaagcagccaatccagcaagagtataggtttaaagccctaaatgccatgcgtatctttaagaaattttatcttttgaaacacgttctgattaaccaagggtaagcatgttttggttgctaaagaaaaaagcataatctttaaccgagtataagtacttgctgtgtatttagtgtaaaagtacatgcagaaagatgaaacacaaagtaattgatgtatttctatcttttatattttttagtccaataattagcaaaatattactatgtacttaagagatacctgtgtagtgtcgattatatgtcagttttttgcccattacttcatccctaaatcttcagcatgaacaaatattaatgtcgataataaaacattggactctttgaaatgtatgttaccattaatttctatttgacctctaaattgtaaaatgcctccaaaagtttatttatagaacaaaaatacatgaggatggatttgtacaaatgtataaaatgccactatttatacaccaagttcatagcagcattactggaatagcaaaagatggaaacagctcaagtgtctatcatgaatggataaacaaatgtgctataatacatacaatggaatattatttagctttaaaaaggaatgaaattctgataaatactacctcaggataaaccttgaaaacactatgctaagtgaaataagccagacacaaaaggccaaatatgatgccacttttatgaggtaccagcataggcaagttcacagaaacagaaaggagaatagtggttgccagggactgcagggaggaggaaatggggggtggggttattgtttaacgagtacatagtttctgtttgggatgaacaaattctggaaatggatagcgatgatggttgctcaacattttgaatgttaatgccactaaattgtacccataaaaatggttaaaatggtaaattttgttatgtatattttatcataatttaaaaaatatatctagaatgggcaagaaggattctcctcattcctctcttgacttgagaatgatcagtcaataggccctgaagtctgaatttgtgaaaatttccttgggtgacaaacttgtttgattactctatttagtgtatcccaaagttattaccacataatcttttaaacaataaaacaaataccccttagaaagtcttctgcaaacccatttctgaaaatggtacattatagggtgggtatagatgcatagatatgggattatgtatgatatatatatatatacacacacacacaaagggatagagagattacctctcttaacccccattttaattactatgtctaggttttttaaataaaaatcttttctttttaacatgtttcttttcttttccggaatattggaatattctgttcttgatccagatgaaatctgattgagcagtgtacttacaagttgtactgtgtatgtgtttcctatattgttatatttcaataagaagcttaaaatgtttaaaaataaatggttaaaaggttttatgttatgtatattttaccacaataaatgcaaaaaataaaaagtctgtgttctaaacaaaaaaaaaaaaaaaaaa

SEQ ID NO: 1603 - DNA, 3127 bp, HOMO SAPIENS
gccgggcagtgggcaggtatggctgagggcgtgtgagcgccgagcgctaagggccgccgccaccatgccagggggcgcaggcgccgcccggctctgcttgctggcgtttgccctgcagcccctccggccgcgggcggcgcgggagcctggatggacaagtaaaggaagtgaggaaggcagccccaagctgcagcatgaacttatcatacctcagtggaagacttcagaaagccccgtgagagaaaagcatccactcaaagctgagctcagggtaatggctgaggggcgagaactgatcctggacctggagaagaatgagcaactttttgctccttcctacacagaaacccattatacttcaagtggtaaccctcaaaccaccacacggaaattggaggatcactgcttttaccacggcacggtgagggagacagaactgtccagcgtcacgctcagcacttgccgaggaattagaggactgattacggtgagcagcaacctcagctacgtcatcgagcccctccctgacagcaagggccaacaccttatttacagatctgaacatctcaagccgcccccgggaaactgtgggttcgagcactccaagcccaccaccagggactgggctcttcagtttacacaacagaccaagaagcgacctcgcaggatgaaaagggaagatttaaactccatgaagtatgtggagctttacctcgtggctgattatttagagtttcagaagaatcgacgagaccaggacgccaccaaacacaagctcatagagatcgccaactatgttgataagttttaccgatccttgaacatccggattgctctcgtgggcttggaagtgtggacccacgggaacatgtgtgaagtttcagagaatccatattctaccctctggtcctttctcagttggaggcgcaagctgcttgcccagaagtaccatgacaacgcccaattaatcacgggcatgtccttccacggcaccaccatcggcctggcccccctcatggccatgtgctctgtgtaccagtctggaggagtcaacatggaccactccgagaatgccattggcgtggctgccaccatggcccacgagatgggccacaactttggcatgacccatgattctgcagattgctgctcggccagtgcggctgatggtgggtgcatcatggcagctgccactgggcacccctttcccaaagtgttcaatggatgcaacaggagggagctggacaggtatctgcagtcaggtggtggaatgtgtctctccaacatgccagacaccaggatgttgtatggaggccggaggtgtgggaacgggtatctggaagatggggaagagtgtgactgtggagaagaagaggaatgtaacaacccctgctgcaatgcctctaattgtaccctgaggccgggggcggagtgtgctcacggctcctgctgccaccagtgtaagctgttggctcctgggaccctgtgccgcgagcaggccaggcagtgtgacctcccggagttctgtacgggcaagtctccccactgccctaccaacttctaccagatggatggtaccccctgtgagggcggccaggcctactgctacaacggcatgtgcctcacctaccaggagcagtgccagcagctgtggggacccggagcccgacctgcccctgacctctgcttcgagaaggtgaatgtggcaggagacacctttggaaactgtggaaaggacatgaatggtgaacacaggaagtgcaacatgagagatgcgaagtgtgggaagatccagtgtcagagctctgaggcccggcccctggagtccaacgcggtgcccattgacaccactatcatcatgaatgggaggcagatccagtgccggggcacccacgtctaccgaggtcctgaggaggagggtgacatgctggacccagggctggtgatgactggaaccaagtgtggctacaaccatatttgctttgaggggcagtgcaggaacacctccttctttgaaactgaaggctgtgggaagaagtgcaatggccatggggtctgtaacaacaaccagaactgccactgcctgccgggctgggccccgcccttctgcaacacaccgggccacgggggcagtatcgacagtgggcctatgccccctgagagtgtgggtcctgtggtagctggagtgttggtggccatcttggtgctggcggtcctcatgctgatgtactactgctgcagacagaacaacaaactaggccaactcaagccctcagctctcccttccaagctgaggcaacagttcagttgtcccttcagggtttctcagaacagcgggactggtcatgccaacccaactttcaagctgcagacgccccagggcaagcgaaaggtgatcaacactccggaaatcctgcggaagccctcccagcctcctccccggccccctccagattatctgcgtggtgggtccccacctgcaccactgccagctcacctgagcagggctgctaggaactccccagggcccgggtctcaaatagagaggacggagtcgtccaggaggcctcctccaagccggccaattccccccgcaccaaattgcatcgtttcccaggacttctccaggcctcggccgccccagaaggcactcccggcaaacccagtgccaggccgcaggagcctccccaggccaggaggtgcatccccactgcggccccctggtgctggccctcagcagtcccggcctctggcagcacttgccccaaaggtgagtccacgggaagccctcaaggtgaaagctggtaccagagggctccaggggggcaggtgtagagttgagaaaacaaagcaattcatgcttcttgtggtctggactgaacttccagaacaaaagccaagggcaaaacattcatgtttcttggtgcccgcttgactgtggagttttggcttcatgtgaaaggtgattcttagaatcctgagctgtggtggcttcagtcctgcccctgcacctgacctggggagggaccctgagcaagtccctcttgagtctgtttcctcatttgtacagaggctatgatgagcagtagtaccagccccatcaggttgttgtgaagagcaaggaagt

SEQ ID NO: 1604 - DNA, 10246 bp, HOMO SAPIENS
agcgcgcggagggcggggcctccccgggctcggccgcgccgccgcctcctccgcctcctcctcctcaccagcgctaaagccgggactggaccgagcggagttgtgcgtgtcgccgaaggggggtgggccgggggaggggaggttcgttccgcggagccgcagccagaaccgggaccaagaatcgccttcagccctgtctggtgcatccttggcagaaagtgaggaggaaaacacccccattgttagatgaggtcttaatcatggaacatttgaagtcacgtaaagaaggttctttggcatggacacaagttcagtgggaggattagaattgactgatcagactcctgttttattagggagtacggccatggcaactagtctcacgaatgtaggaaactcatttagtggtccagctaatcctttagtgtctagatctaataagtttcagaactcgtcagtggaagatgatgatgatgttgtttttatcgaacctgtacaacctcccccaccttctgtaccagtggtagctgatcaaagaaccataacatttacatcatcaaaaaatgaagaactacaaggaaatgattccaaaattactccttcctcaaaagagttggcatctcagaagggaagtgtaagtgagacaattgtcattgatgatgaagaggacatggaaacaaatcaagggcaagagaaaaattcctccaattttattgaacgaagacctcctgagactaaaaacagaaccaatgatgtggatttctccacttccagtttttcaagaagtaaggtaaatgcaggaatgggtaatagtggtatcaccacagaaccagactctgaaattcagattgctaatgttacaactttagaaacaggtgtaagctctgtgaatgatggccaattagaaaatactgacgggcgagatatgaacttaatgattacacatgtaacatcactgcagaataccaacttgggagatgtctctaacggactgcagtcaagtaattttggtgttaatatacaaacatacaccccatctttaacttcacagaccaagactggagtaggaccttttaatcctggtagaatgaatgtggcaggagacgtttttcagaatggagaatctgcaactcatcataatcctgattcttggatctcccagtcagcttcatttccccgtaatcagaaacaaccaggggtggactctttatcaccagtggcctcacttcctaaacagattttccagccgtctgtccaacagcagcctactaaaccagttaaagtcacttgtgcaaactgcaaaaaacctttacagaagggccagacagcttatcaacgaaaaggatcagctcacctcttttgttctaccacctgcctttcttccttctcccacaagcctgctccaaagaaactctgtgttatgtgtaaaaaagatataactacaatgaaaggaaccattgttgctcaagtggattcaagtgagtccttccaggaattctgtagtacatcttgtttatctctctatgaagacaaacagaatcctactaaaggagctctaaataaatcaagatgtacaatctgtggtaaactaactgagattcgccatgaagtcagctttaaaaatatgactcataagctgtgcagtgaccactgctttaatagatatagaatggccaatggtttaataatgaattgctgtgaacagtgtggagagtacttgcccagtaaaggtgctggaaataatgttctggtgattgatggtcaacagaaaagattttgctgtcaaagttgtgtcagtgaatacaaacaggtaggtagccatccaagcttcctgaaggaggttcgagatcacatgcaggactctttcttaatgcagcctgagaaatatggaaaactgacaacttgtactggttgccgaacacagtgcaggttttttgatatgactcagtgtataggtcctaatggatatatggagccatattgttcaactgcttgtatgaacagtcacaagacaaaatatgcaaaatcacaaagtttgggaattatttgccatttttgtaagcgaaactctttacctcaataccaagccacaatgcctgatggaaaactgtacaacttttgcaattccagttgtgtggctaaatttcaggctctaagtatgcagtcatctccaaatggccagtttgtagcgccaagtgatattcagttgaaatgcaactactgcaaaaattccttttgttcaaaaccagaaatcctggaatgggagaacaaagtgcatcagttctgcagcaaaacttgttcagatgactataagaagttgcattgcatagttacatattgcgaatactgtcaagaggagaagactcttcatgaaacagtaaatttctctggcgttaagagacctttctgtagtgaaggctgcaaattattatacaaacaggattttgccagacgtttaggattgagatgtgttacttgcaactattgttctcagctatgtaagaagggagcaactaaagaactcgatggtgttgtgagagatttctgcagtgaagattgctgtaaaaaatttcaggattggtactacaaggctgcaaggtgtgactgttgtaaatctcaaggaactcttaaagagcgagttcagtggcgtggggaaatgaaacatttctgtgatcaacattgcttactgcgtttctactgtcaacaaaatgagcccaacatgacaactcagaaaggacctgaaaacttacattatgatcagggttgtcagacatctcgaaccaaaatgacaggttcagcaccacccccttctccaacacctaacaaagagatgaagaacaaagcagttctttgcaaacctttaacaatgacaaaagctacttactgtaaacctcacatgcagaccaaatcttgtcagacagatgatacttggaggacagaatatgttccagtgcctatccctgtgcctgtgtatatcccagttcctatgcacatgtacagtcagaatattcctgttcctactacagttcctgttcctgtgccagttcctgtttttctgcctgctccattggacagcagtgagaagattcctgcagcaattgaggagctaaaaagcaaggtttcttcagatgctcttgatacagagttgcttacaatgacggatatgatgagtgaagacgaggggaaaacagagacaaccaacatcaacagtgtaattattgaaacagatataattggttcagaccttttgaagaactctgacccagagacacagtccagcatgcctgatgtaccatatgaaccagatttggatatcgaaatagattttcccagagctgctgaggagcttgatatggaaaatgaatttttattaccacctgtttttggcgaagaatatgaggaacagcccagacctcgatctaaaaaaaagggagccaagagaaaggctgtatcaggataccagtctcatgatgatagttctgacaattcagaatgcagctttcctttcaaatatacgtatggcgtaaatgcatggaaacactgggtcaaaactaggcaacttgatgaagatcttctggtattagatgagttaaaatcttctaaatcagtaaagttaaaagaggatctactctctcacaccacagctgagcttaactatgggttagctcattttgtcaatgagatccgacggccaaatggagagaattatgcacctgacagcatctattacctttgccttggaatacaggagtatttgtgtggaagtaatcgaaaagacaacatatttattgatcctggataccaaacatttgagcaagaattgaataaaatactgcgaagctggcaaccaagcatacttccagatgggtcaatattctctcgagttgaagaagactatctctggaggataaaacaactaggatcacactctccagtagctcttctgaatacactgttctactttaacactaagtattttggcctgaaaacagtggaacaacacttaagactttcctttggcactgtgtttaggcattggaaaaaaaatcctttaacgatggaaaacaaagcgtgtcttcgataccaagtgtcttccttgtgtggaacagataatgaagataaaattactactggaaaaagaaaacatgaagatgatgagccagtatttgaacaaattgaaaacacagccaatccttccagatgtcctgtgaaaatgtttgaatgctacttgtctaaaagtccacagaatcttaatcagaggatggatgttttttatttgcaaccagaatgctctagttctacagatagccctgtctggtatacgtctacttcactggaccgaaacaccttggaaaatatgcttgtacgggttcttctagtaaaagatatttatgataaagacaattatgaactggatgaagacacagactaaaaaggaacgttgcagaagcaatcgggataaaacagcattagatagtcatgctgctagatctttattatggaaaacatttcaagtttactccttctgttttgagttttgtagcagtgtacccacgctgggtattaccatgtaaataatctgtgagtgaaagttgccattattctatgtagtggttttaggatacttaacaaatacattcaaattctttttttattattatttatttgattaggtatgtttgtaactttttacattacagaatatgaatgagaatgtgccatgtataatttttttcttgtagtaagaaacatccatattgcacaactctactgttgcaaagcttccttggaagggggctcttttactgggttcttaaccagatggttgtgtatgggtagcactactaaaagtttagaacttgcagtgtctttcggaatttttaaaataaactgtaaactaataggctggggtttttgttttgttttggggttttgttttgtttggttttacattttagttactgaagccttacaaggttatgtagagagataccatcttctgtaccaaaaatagacaagagaatgctgtcaatattggtgtactgtaatgtgaatctatgctggtgaaaacaattttttgttccccttattaaaaccttagtgtccttttctcatttgtggctttctgcatcacccaatcaataaaaaacaaatatatatatgtatatatatgtatgtatgtgtgtgtgtatatatatatatatatatatatatataaatgattgtaagttgaaaacaagatcatcaagacatttcctttgtaaaaatgtctggtgaaagtataaaattctgttttcttctatgccagccataagtatctgaaatcctcttcatttatagaggtttgatttttatttctttttttccctcttaaggatacagatcatgctgcaatgttagctgtgtagtactctaaaacttagcaattttatcagaattcttgtgcctgtttacattggataaaattgtttttagaaattccactcctgaaatagttacagaaagtcaagctatgttaaataagataggatcacattttataatgaagattaccagtgtagtaattctgatattgcaaatgattgaggaacaaacaaagaaactaatagagaaagtcagtctcagaggaaatcccatttaatgttagattgtttggcttttgaaattacttcttatagaagattgcattaaaaaaaaaaacaactttgtgcttctgcatagcaatttatccattcagaccttttcttttagaataaggaaacttaaaatctactttctaaagactgaacaaagtgctagctgcaaattatcttgaaatcatttggctcttttctagcatgtgtgtaatcatgttttcttctgattcctgaatgaccatggtagcattagtgtttagaaattgttcaggggaaaattgagctattttccatagtggctagcaattgctacacatccttagatactcctctctcccataggataaatgttacagcacacaaaagaaattttctcaattctgatttggaaaatttcacaggtgtcattattgtatatctaagcaataattatctgaatgttttggcataaaaaattataatgttctaacttgttttataagttgaatgacttttcagtcccttgattttatattgttgagtgataatcagactgatagtagcaaatctgatcatacattactaaaatagattgctgattgtctatttaacgaagacaagtgggtaacatttaaaatatataatacaaaaattttctctaacttacctttttccagaactacttctttaagcacttttcctattaatgcctattgttgattaaaaggtggttaattctaaccatcttttagtcttcaaagtggtgctatattccatcaagagcaataaagtttttcccaggtgtcacttattgtatatgttaccaaataccatgaatttctgccatagtactactatcaagcaccttgtcttgctatttacagtttcttcatttgtatatttttagcttttctaagtggaaatgtctacataattttgatcttgacatgattgaggatttagagctcttgtctttgtcttgattgcaatccaacgatagattaacttgattctcagggggaaaagaaaaacttattttatgagaattgtttgttctgtgaaactcacttcacctagaacacatttcattgattcttggatcttagtttatgtggtcatagttgactgctgagaaaaggacaatgaaatgatagcaatttccttttgcttctaggtgatctctgattatagatagcatcctgtaaatataactttattgtcttgaaatgtttattgaagatgctatatttttctgttctgttttctgaagattttgccatttaaaatgatccagtgaaaaatatttatccacattgaagaaagtggatttcccatgcaaattgaatcttcattaacacattttaaaaggctttactgtattaggtaacatagatattaaaggatttttctaggcaagaagctcaactttttttttccataaaaataatttttgcttaaatagtaactcatggttttcttttattaaatggggttgttgtcagtatgttaaacattgaagtaggaggaggatgcatattgtactatgcattcaaatttatcactgttttttctgacagactttccctttgtcctttctagttatgacttgggaatggggtaacttctttatgcatagtattaagggttatagtatgaagaaatcataaaattgcaagttttggtttgcattactctaatgtgggttcatttaatctgagatcttaaatatcttgcagccttaaatcactacaaacatttgcatttttattatgccagttatttccaaaatgtattgttatacatgtcacttatgtttttaagctaatattgactgtaggataatctccttgttcccctcaaaatagtcatgaaagtgtacatgaaaatatttttaaagaataaatttctttaaattacatacttttggatttcccccttaataagccccttactcatgtttagagaagattttgaatttcatttattccattctactgtgttctgaggattatatcaatttagaagttgatgtccagaacaggttatctgtatcagttctgagaatagaaacaacctacagtgctgtcccaatttgtacttttttttctttactcggaagttagatgtcagagggacacctcaaataagtgactgtgatcccctgccttgtaatgaagtggaaaagagagggtccctaaaaatctgggcaagtggtgtcctaattagttactgagttaaaacaagttcatgaatttaggccttttgggaaagaaagagaatgtaagatttaacctgtaaatgttaagaatagaaccaaagagagggccacagaccattagttgttaagaggtatcaatcttaacagcatattttctcttgtgcaatgaaaagaacaatcgtagctcttttgggcatcttaggtcttttattctttctggatggcttacatcgaatccttgtgatttatttaaagacacatttttcctggagaggagaaagatcttctctaaaatagccttaacactgagaacatattaggcctaattttaaaagtccaattcagataactcctcagaagtaaatgcagcacactaaaattcattatcacaaaacttaatatttgttaatatgtttcctctgtgctaaaaggctgctgctaaccatggtagttagggaggaagagaaagtaaaagacattagtgttcaaaacttacatctttgggggtaaacaagacatatagtacatttaactcctagggaacttagaatatttatggtaggatagaaagagatgattgtggacacacacaagtaccccaaaaggccattatggtctagaataggtttcatagagaggattactaccacctgtgattatatggtatatgaaacatgagattttgtaacctggacattgcttttagctctgttggaaatggtcagtagagcaatttctgaatattttgatggtacggtgttgatggcatcagtccttttctgtggctttcagcccaacttaatacaagaggagttaaaaatagcacccaaaaggggtagctagagcaccctcaccatgcactaaagataaatctaaaaggtgttcaagtacattgaatcaagatgagtaatccaacttctatgttatgtaggatggatggagcacacaaattcttgcaaacattgtagaggtttttttaaacttcatccactaaggatttttttataataattacttttgaaaataaaatctcaactattttccaagttatgagtgtgctgctcttaaccctgtgagatgaaatcttcccatttggattacatatttgtagttctatatcgacatcagcagatggcaatagtatacaaatagtatacagcatgagccttccattgcttttatttctttgtttataagtatactataatccttcatctgaaacccttagggttttagaattcagaattttccccttttcagagagaatatatataatgtagattacataacaccctcaatggggcctggggcaacaccccataatcaaacattagtacattcatagtaactgggattaactatgtaaggcagtaagctacctgccttacatagtttaggtcaatttttgtcacaaacttatggaaaaactaggtttttagaaattttttggatctcagaattcgtgattagggattgctgacctctgtaaggaaactggtgtcaggtctagaattttccttctaatgaaatacgtagtcattttccccctttttaaattgcttagctttggtagaggtaactgaaggctttctttagaattcgtgtgttagattttaagaaaaatgcatgaaattgttaggacaggcataaatacaaatggcaattctagagccattacggaattttgaaacacttaacaattgctttcttttacttttcatcttgcctcaatacttgtagcattacaagtattccacgtaaataaacgtttatgaagagctgcagtcatgtcatggagccaggcatttattcattcaacaaataggttagtcttccacacacaatttcaggtgctgggaacacagaattaagacccagcccttcctctcaaggacttcgcgtagtttgggagaaacgggaatgggctggaatgtcagaataagatgggcacttaggccttattgagcatgatcacacttgtattttgaagtaaaataccctgatcaagtaatttaccaagaagctactttttgtgacacagctccgtctcctgaccgcggttccagacttcaccattacaccagtctattcccattctggaaagggagaggtatcagctcttagggggcagagattagcaaattgaaaaatagcagtgaaccagatggaaggctctcgatctttagaggttattaatcagtgtttgttcgttcaatttttaaccagtcaccttgctgttaagagcagaacataattggctggaatgtaatgtagggaatttttccctgttggatccctagcacctagaaaagttcctagcacctattaggtgttaataaatgattgttgaatgaatcagtgattacaagtacttttaagaattttgaaaataaaggaaccattggaaatacga

SEQ ID NO: 1605 - DNA, 4100 bp, HOMO SAPIENS
gtacctcatgtgacaagttccaatttcttttcaagtcaattgaactgaaatctccttgttgctttgaaatcttagaagagagcccactaattcaaggactcttactgtgggagcaactgctggttctatcacaatgaaacggctggtttgtgtgctcttggtgtgctcctctgcagtggcacagttgcataaagatcctaccctggatcaccactggcatctctggaagaaaacctatggcaaacaatacaaggaaaagaatgaagaagcagtacgacgtctcatctgggaaaagaatctaaagtttgtgatgcttcacaacctggagcattcaatgggaatgcactcatacgatctgggcatgaaccacctgggagacatgaccagtgaagaagtgatgtctttgatgagttccctgagagttcccagccagtggcagagaaatatcacatataagtcaaaccctaatcggatattgcctgattctgtggactggagagagaaagggtgtgttactgaagtgaaatatcaaggttcttgtggtgcttgctgggctttcagtgctgtgggggccctggaagcacagctgaagctgaaaacaggaaagctggtgtctctcagtgcccagaacctggtggattgctcaactgaaaaatatggaaacaaaggctgcaatggtggcttcatgacaacggctttccagtacatcattgataacaagggcatcgactcagacgcttcctatccctacaaagccatggatcagaaatgtcaatatgactcaaaatatcgtgctgccacatgttcaaagtacactgaacttccttatggcagagaagatgtcctgaaagaagctgtggccaataaaggcccagtgtctgttggtgtagatgcgcgtcatccttctttcttcctctacagaagtggtgtctactatgaaccatcctgtactcagaatgtgaatcatggtgtacttgtggttggctatggtgatcttaatgggaaagaatactggcttgtgaaaaacagctggggccacaactttggtgaagaaggatatattcggatggcaagaaataaaggaaatcattgtgggattgctagctttccctcttacccagaaatctagaggatctctcctttttataacaaatcaagaaatatgaagcactttctcttaacttaatttttcctgctgtatccagaagaaataattgtgtcatgattaatgtgtatttactgtactaattagaaaatatagtttgaggccgggcacggtggctcacgcctgtaatcccagtacttgggaggccaaggcaggcatatcaacttgaggccaggagttaaagagcagcctggctaacatggtgaaaccccatctctactaaaaatacaaaaaattagccgagcacggtggtgcatgcctgtaatcccagctacttgggaggctgaggcacgagattccttgaacccaagaggttgaggctatgttgagctgagatcacaccactgtactccagcctggatgacagagtggagactctgtttcaaaaaaacagaaaagaaaatatagtttgattcttcatttttttaaatttgcaaatctcaggataaagtttgctaagtaaattagtaatgtactatagatataactgtacaaaaattgttcaacctaaaacaatctgtaattgcttattgttttattgtatactctttgtctttttaagacccctaatagccttttgtaacttgatggcttaaaaatacttaataaatctgccatttcaaatttctatcattgccacataccattcttattcctaggcaactattaataatctatcctgagaatattaattgtggtattctggtgatggggtttagcaactttgatggaagaaaatattaggctataaatgtcctaaggactcagattgtatctttgtacagaagaggattcaaaacgccacgtgtagtggctcatgcctgtaatcccaacactttgggaggctgaagtaggaggatcgtcttgagcccaggagttcaagaccagcctggacaacatagtgagaccttgtctccacaaaaataaaaaagaaactatccaggagtggtggtgtgtgcctgtggtccctgctatgcagatgtctaagacaggaggatcacaagagcccaggaggttgagaatgcagtgagcttgtaattgcaccactgcactccagcctgggtgacagagcaagaccctgtcttaaaaaaagaggattcaacacatatttttatattatgttaaagtaaagaaatgcataaaagacaagcactttggaagaattattttaatgatcaacaatttaatgtattagtccaaattatttttacgtagtcatcaacaatttgaccagggcctttatttggcaaataactgagccaaccagaataaaataaccaatactccactgctcatatttttatctaattcagatggatcttccttacaactgctctagattagtagatgcatctaagcaggcagcaggaactttaaattttttaagttcatgtctatgacatgaacaatgtgtgggataatgtcattaatatatcctaaattaacctaaacgtatttcactaactctggctccttctccataaagcacattttaaggaacaagaattgctaaatataaaaacataaataataccataatacatggctatcatcaaaagtgtatagaatattatagtttaaaagtatttagttgattacttttcagttttgttttgttttttgagacggagtctcactctgttgcccaggctggagtgcagtggcaccatctcagttcactgcaacttctgcctcccgagttcaagcgattctcctgcctcagcctcccgagtagctggaattataggcgtgcaccaccacgcccagctaatttttgtatttttagtaaagacagggttttgccacattagccaggctggtctcaaactcctgacctcaggtgatccacccaccccagcctcccaaagtgctaagattacaggcgtgagccactgagcccagcctacttttcagtttttaacataatttttgttttatccacaacttttcaagtattgaaagtagaataaaaacatgggttcttagtctttagctatctgttaaagcctatgaatgccttcttaaaatcatgtttttaaatgcataaaatatataggattacaaaggaatctaattatatcgaaatacagttattaaaatgttaaaagataagtttgttatatattaatatgcatgcttctttataaatgcattaaataagagttaatagctatcctaaatttgaaatagtgataagcataatgaaaatagatgcaaaaaactaatgtgatatgaaaatatctgggtttttcttttgatgatgaagtattgctaatattaccgtggtttatgaactatgttcagaattgaagaaaatcctaactttcagttagaggttagtgacggggttcaggacaccctacacaaaatacagcactttgacatattgaatattttaagctgaaggcatttgaggaaattgcagaagcaggaaggtgactctgaccttctgcctgctgttctccccagaagcagccataaaacctgggaaggattttctgaccttcccctgaagtagatcataagactgtcatgtaagaggtgctctcctggcacccagagaaaaggagcatccttacctccaaaagcacagggacacaaagaggaatctaaacaaacaggcctctcagtttcccccagtttattacatttagcttgttcacactttgccctatgacatttctacatcactggctgctcttcatcaaacctactataaaaaacattcaagttcaactgtttctttgggcctttatttccttatggagcccctcgtgtcgtgtaaaacttatattaaataaatgtgcatgcttttctcttgctaatctctcttttgttatagagatctcagccctaaacctaggatggatagaaggaaacatatgttctcccctacattagtaaaaataaaaatggaattttttacccatacaaa

SEQ ID NO: 1606 - DNA, 4190 bp, HOMO SAPIENS
aagtgtctgtagcgtccctccctctcaaccacaataacaggcggagggtcggcgtaggtactttgaactcaagtaaacaaaagggaagattttctcgttgatactggagactgcacaacaatggggccacgaaagaaaagtgtgaaaacatgtatcatgaataatgaaattccagaagaaatgacagcagatgaaacaaaggactatatgaatcaactttcacatgaagtactttgccatatttttaggtacctccctctgcaggatatcatgtgtatggaatgtctttcccggaagctaaaggaagcagtgaccctatatctgcgagttgtgagagttgtagatctctgtgcagggcggtggtgggaatacatgccaagtggctttacagatgccagttttctaacactattaaagaagatgccagatgttgaacagctatatggccttcaccctcgataccttgagaggcgaagagtaaggggccatgaggcttttagcattccaggagtcctagaagctttgcaggcatgcccaaacttagtgggtgtggaaacttctcatttggagttggtagaatccatttggacatatatgccccatgttcatattttggggaaatttcgtaatcgtaatggagcttttccaattcctcctgaaaataaactgaaaattcctataggagccaaaattcaaactttacatttagttggggtgaatgttcctgaaattccttgtatcccaatgctaaggcacctttatatgaagtgggtaagactcactaaaccacagccatttaaagacttcctttgtatcagcttaagaactttcgtcatgaggaactgtgcaggacccacaaattccttgaaatatgtccctttagtaacaggcttagcctctgcccgaaacttggaacacttagaaatggttcgagttcctttccttggaggtcttatccaacatgttgttgaagacagttggagatcaggtggttttagaaatttgcacactattgttctgggagcttgcaaaaatgctcttgaagtagatcttggttacctcatcattactgctgcccgtaggttacatgaagttcggatccagccttccctaaccaaagatggtgtcttttctgccctaaagatggcagagttggagtttccccagtttgaaacccttcatctaggatatgtagatgagtttttgctacagagcagaatggctaatgcggatctggtgaagtatggtttggctgatgtggtagaaaatcctggtatcatcactgatatagggatgaaagcagtcaatgaagttttttcctgtatcaaatatctggcaatttacaattgccctcatctacacaacccatacaattggatctcagaccactcaagatggactcgattggttgatatcaacctagtacggtgccatgctttgaagctggactcttttggccagtttattgaattattacccagcctagagtttatttcactggatcagatgtttcgtgaaccacccaagggttgtgctcgagttggtctgagtgcaggcacaggaattggtgtttcatcagctcttgttagcaaccagaactccaacaatgacgataataatgcccagaataacaatgccaacatccacgacaacaatcaccatcatccagatgactcagacgaggagaatgactttcggcaagatctgcagccaggagagcagcagtttgcagctgacgcattaaatgagatggaagacatcgtccaagaagatggagaggtggtggccgagagtggaaataatactccagctcacagccaggcaattattcctgtggatgttgatgaggaacaagcaggacccagtggtcttcagcgtgtagtaaaaccaacctcaattactgttcatgattcagagagtgatgatgaagaagatagtctagaactccaagaagtctggattcctaagaacggtactcggcgttactctgaacgtgaagaaaaaactggagagtcagtgcagtccagagaattgtcagtaagtggaaaaggcaagactccacttcgaaagaggtacaactcccatcagatgggccagtcgaagcagtttcccctcgaggaaagcagctgtgagaaaggctgtcaggtcaccagtgagcagatcaaagccgatatgaaagcagctagggatattcctgaaaagaaaaaaaacaaggatgtttatcccagctgcagcagcaccaccgccagcacagtgggaaactccagctcacacaacactgcttctcaaagccccgactttgtaaggacggtgaacagcggcggctcttccgagcctagccctacagaagtggatgtgtccaggcagtgtgcctgctcccccggtgggtcagaggactctgaggccatggaggagggagatgcagagagttctgtctgccccagatgctgctgtcacaggccccaggaatcccaaaggagaactagcaggtgttctgatgaggaacgtccttcaaccagccgagcctgtgttgtgaatggcccggatgaagtagccaaaacaaagccacgtcacgccatgaaacggaagcggacagcagataaatccactagtacaagtgatcctgtgatcgaggatgaccatgtgcaggttcttgtattaaaatccaagaatcttgttggagtcactatgaccaattgtggaatcacagatctagtgctaaaagactgtccaaagatgatgttcatccatgctaccaggtgcagggtactaaaacatttaaaggtagaaaatgcaccaattgtaaaccgatttgactatgcacagtgcaagaaactgaacatggatcaggtactagaccagatactaagaatgccacccgagagaaaccgcatcatatacctacgcccaatgcagcaggtggacactctaactttggagcagaagctatttagtggtccctacccctatcacatctgtattatccatgaattcagtaaccctcccaatgtccggaataaggtgcgcattcgcagctggatggacactatagcaaacatcaatcaagagctcattaaatatgaattcttccctgaagccactcgaagtgaagaagacttaaagaaataccccaagtacccctgggggagagaaatctatactttagaaggtgttgtggatggagctccatattccatgatttctgacttcccttggctgaggtcattacgagctgcagagcccaacagcttcgctcgatacgactttgaagacgatgaagaaagcactatctatgctcctagaaggaaaggacagctgtctgcagacatctgtatggaaacaataggagaggaaatttcagagatgcgtcagatgaagaagggtgtatttcagcgagtagtggcaatttttatccactattgtgatgtcaatggagagccagttgaagatgactacatttaattggtccctcctcctttccagctattttgtcagaaagcaagtagggccatccagctgccagagtgctccacagggacttgaggcatgcagttgggaggtcctggctcggtttgctatatagggaatatataaggaacatcgaaattgtatacaaagatttgtacataaaaaatatacaaagacgcttcctaaagtaccaactttatatcatatgtttatacaatttaatttaaaaattcattttaaggaagacagataatttgaaagacttttgtttttcttgacttaattcatgaagtatcattttttgactgagtctccatttacttcattcttaatgattattgtcatccctttaaatctgtgcctttttcttcttgagcgaagctgtttgagtaaacctgttgaagagtgtttgtgtcttttgtgcttttttgttgttattaaaacaccaactaaaccttatagtcaagacaaggctctatgtttctgtacaaagctgtagttctttcttagtattatagttgccatgtttcttaaaatcaagtaaaaagacttatgagcttaaaaaaaagtgagtttgagagggaaatggaaaagtttccagagtatttctagtaatttatttccacattgaattgtgtatatgctttatcttgaatataaaataaaagtttattaaaaactttaaaaaaaaaaaaaaaaaaaaaaaaaaaaaaaaaaaaaaa

SEQ ID NO: 1607 - DNA, 1055 bp, HOMO SAPIENS
ggcggagccgcctgggctgcagtcccacccgggagccggcagggagcggagctgcggagccgcctggtctcccgcgtccatcggtccattcctgcgtcgttctgtccttccgaacgcacacttcaggagcagccgcgagggtggcatggcagcgagcacagacatggctgggctggaggagagcttccgcaagtttgccatccatggtgaccccaaggccagtgggcaagagatgaatggcaagaactgggccaagctgtgcaaggactgcaaggtggctgacggaaagtccgtgacagggaccgatgtggacatcgtcttctccaaagtcaaggggaagtctgctcgggtcatcaactatgaggagttcaagaaggccctggaagagctggcgaccaagagattcaaggggaagagcaaggaggaggccttcgatgccatctgccagctggtggcaggcaaagagccagccaatgtgggcgtcactaaagcaaaaacagggggtgctgtagaccggctgacggacaccagcagatacacgggctcccacaaggagcgcttcgatgagagcggcaagggcaagggcattgcgggacggcaggacatcctggacgacagtggctacgtgagcgcctacaagaatgcaggcacctacgatgccaaggtgaagaagtgaggcttgggaagaccgccctgccaagtgcggctgcccctgccagaggctcaggcctgggtctaaggggcacgtggagcaagagatcctggtcccctccctgctggacctgccacccagagcttcctgcctagtcccactgggctggcccaccaggcctctgacccaggctgctctgcggccccttcctcctcctcttcctgctccaacttctgtccacctggggacagtctgtgcctgtagcctcatgaccccaacccagccccaggcatggctaacccctgactgcttgcctcatatttaagctgctgctctggccaagtgcctaattttaacccagacctcaataaagacaccttttgtaccaaaaaaaaaaaaaaaa

SEQ ID NO: 1608 - DNA, 431 bp, HOMO SAPIENS
  misc_feature (47)..(47): n is a, c, g, or t
  misc_feature (56)..(56): n is a, c, g, or t
gtgtgcatggcttagtacagttgctaagttaactgaattaacacgtncaaggggcnttagcactgggattggctcatggtcaggttccctaactcttggctgcgactctttcaacctgtgagtcctgggggattgaggatggcgatcagggaagccttcaactggcagagaggaccttgggagaactggcaaggggtgctgagccaagggagaggtgaacagcatgagaagaaggtaggaggtaggtgaggccattctgtatttggggacagtgaggtcaccttcccactcgtgtgtgtgggcggccgatgattgatttctgtcatacctgttaccatttggtgcagtatcgatgtatcgttggtgtctgtcattaactctgaagtaacttttacttgatcagtactgaatttcattcctaggcttctcag

SEQ ID NO: 1609 - DNA, 2277 bp, HOMO SAPIENS
gggaaatggcggccgcgggcttggtcgctgtggcagcggctgccgagtactctggcacggtagcgtcgggaggtaacctccctggtgttcactgcggcccaagctccggggcaggccctggttttggcccgggctcgtggagccgctctctcgatcgagccctggaggaggcggcggtcactggggtgctgagcctgagcggccggaaactgagggagtttccccggggagcggccaaccacgacctgacggacaccacccgggcggacctgtcgcgaaatcgcctttcagaaattcctatagaagcatgtcactttgtttctctggaaaatctcaacttgtaccaaaattgtattcgttatattccagaggcaattttaaacctacaagctctaacattcttaaatattagtcggaaccaactgtcaacattgccggtacacttgtgtaatttgccattgaaagtcttaattgctagtaataacaaattggtgtcacttccagaagaaattggacaccttagacatttgatggaacttgatgtgagctgcaatgaaattcaaactataccttcccaaattggtaacctggaggccttgagagaccttaatgtaagaagaaatcacctagtacatttgcctgaagagctggcggagttgcctttgatacggttagacttctcatgcaataaaattaccacaatccctgtttgttatcggaacctcaggcacctacagacgatcaccctagataacaatccactacaatcacctcctgcacagatatgtataaaaggcaaagtccacatatttaaatacctgaacatacaagcttgtaagattgctccagatctgccggattatgataggagaccgttgggttttggctcctgccatgaagaactgtactcaagtcgcccttatggagcccttgattcaggcttcaatagtgtggacagtggtgataagagatggtcagggaatgaacctacagatgaattttcagatctgcctcttcgagtagcagagattactaaagaacaaagactacgaagagaaagccagtaccaagagaaccgcggcagtttggtagtaacaaacggcggagtggaacatgatctggatcagattgactacatagacagctgcaccgcagaggaagaggaggccgaggtgagacagcccaagggaccagacccagacagccttagttcacagtttatggcgtatattgaacagcggcgaatctctcatgagggttcaccagtaaagccagtagccattagggagtttcaaaaaacagaagatatgagaagatacttacatcaaaacagggttccagctgagccatcttccctcctgtcactatcagcaagtcacaatcagctgtcacacacagacctggaacttcatcagagaagggagcagttagtagagcgcactcggagagaggctcagcttgctgccctgcagtatgaggaggagaaaataaggaccaagcagatccagagagatgctgtcctggactttgtcaaacaaaaagcatcacaaagtccacaaaaacagcacccgctcctagatggcgtagatggtgagtgccccttcccatccagaaggtctcagcacactgatgatagtgccttgtgcatgtcgctgtcagggttgaatcaagtgggctgtgctgctaccctgcctcattcttctgccttcacgcctcttaagagtgatgacagacctaatgctctattaagttcacctgcaacagaaacagttcatcattcccctgcatattcttttcctgctgctatccagagaaatcagcctcagcgccctgaaagcttccttttccgagcaggtgtcagggcagaaaccaacaaaggtcatgcttcaccccttcctccatctgctgcacctaccactgattctacagattccataacaggacagaattcaagacagagagaagaagagctggaattaatagaccaactgcgtaaacatattgagtaccggttgaaagtgtctctaccttgtgatctcggagcagctctaactgacggtgttgttctttgccatttggccaatcatgtgcgacctcgatctgtcccaagcattcatgttccctcaccagctgtagtaagttgataatcctaaaaagccttggctattcatcagacatttgttaagcacagtggacagacatttcttaagcattgtgctagatattaaggatacagatataaagagtccagtctctacaaaaaaaaaaaaaaaaaaa

SEQ ID NO: 1610 - DNA, 563 bp, HOMO SAPIENS
  misc_feature (93)..(93): n is a, c, g, or t
  misc_feature (537)..(537): n is a, c, g, or t
aatgtgaaacaggtggctgggacccagaaaccctcttaccctgcacctctgtcatacttctcccggggcatagggagagttattctgcttctntttgccttgttttgtaacatggggtagttgttggtgcagccatgttgtgctgagtgaacatatattaagatctttggaacctttaggagactgaaaataggtaagtatgaattagtatttctggaatggtattcagagaacttcgtaccatttttataaatgtgaaaggtaacctaattagaacagcttggcacttgtcagtacactactagatttcaaaatcagattctacttacagggagaaaaaaaaagcccaatatgttgaacagtattgaaattgttgcataaataaaagtccatcattgtagaccagcttactgaagtgaagaaagaaaaaaagtatatctttgtcttgaaggagtagatagtgacatgtcatgtttctttcaggatatttaggatctggcctaattcaaaagaatatttactgaatgcctatgttantgctgctgctgtcacatttacatgaa

SEQ ID NO: 1611 - DNA, 238 bp, HOMO SAPIENS
gggtctcttcatgttacccgggctggtcctgaactcctaagctcgagccatctgtccaccttggcctcccgaagttctgggattacaggtgtgagccaccacgccccgcccacagctaatgttgtagttgctagttctccatattgattaaagcaacaataacagtaacctctacccttttgaataaaagataatgagactattataatttcaggccctcagatgatgacttagattt

SEQ ID NO: 1612 - DNA, 9794 bp, HOMO SAPIENS
gaaaagaaaaagaaggaaggtgctcagaaaaaggctgctgatcaaaaaaccaaagtgccagaacctactaagacctgttcaagccagccccaacctgccggtaccagtaccagtacttccaccagcactatctcaagcagcaacaatggcaaacgtgcatctgccagtggccagcagccagctgcatcccgttacctgcctcgtgaggtgcctccacgcttccgccagcaagaacagaagcagctattaaagagaggccagccattgcctacggggactctaaccagtgtgagcccaacccagggtgctgggcctgcaggggtaagcccacctcccctacctggagccggaacacagcatcatcccagtaagctccaaccagatctcagtcatagtggattggcagatcattatgaaaattcccactggggacagcagcctacttacagaagcgaagccaactgcagctgggataaagtgataatagataggactgacaaggaggcgtggccttccatcacaggaacagagactgaatctgcctcagaatgtactacagacactgactctgcctccaactgtggctcagagaacagtagcatggctacagggagtgcccagggcaacttcactggacataccaagaagacaaatggcaataatggcaccaatggcgcactcgtccaaagcccttctaatcagagtgcccttggagcagggggagcgaacagtaatggaagtgcggccagagtgtggggtgtagccacaggctccagctctggcctggctcactgctctgtcagtggtggggatggaaaaatggacactatgattggagatgggagaagtcagaattgctggggtgcttccaactccaatgctggcattaatcttaaccttaatcctaatgccaacccagctgcctggcctgtacttggacatgaaggaaccgtggcgacaggcaacccttccagtatttgcagtccagtcagtgccataggtcaaaatatgggcaaccagaacgggaacccaacaggcactttaggtgcttggggaaacttgctgccacaagagagcacagaaccacaaacgtccacttctcagaatgtgtctttcagcgcacaacctcagaaccttaacactgatggaccaaataacactaaccccatgaactcttcacccaaccctatcaatgcaatgcagacaaatggactgccaaactggggcatggctgttggtatgggggccatcatcccgccccacctgcaaggccttcctggtgctaatggatcatcagtttctcaagtcagtgggggcagtgctgaaggaataagcaattctgtgtggggactgtccccaggtaaccctgccacaggaaatagcaattctgggttcagtcaggggaatggagacactgtgaactcagcattaagtgctaaacaaaatggatccagcagtgctgtgcaaaaggaaggaagtggaggaaatgcttgggattcaggacctcctgctggtcctggaatactcgcctggggaaggggcagtggcaacaatggcgttggtaatatccattcaggagcttggggccaccccagccgaagcacctctaacggtgtgaatggggaatggggaaagcccccaaaccagcattccaacagtgacatcaatgggaaaggatcaacagggtgggagagtcctagtgtcaccagccagaaccctaccgtacagcctggtggtgaacacatgaactcctgggccaaagcggcatcttctggaactacagcaagtgaaggaagtagtgatggttctggcaaccacaatgaaggaagcactgggagggaaggaacgggagaaggccgaaggcgagataaagggattatagaccaagggcacatccagttgccaaggaatgatcttgacccaagagttctgtctaatactggttggggacagactcctgtaaagcaaaacactgcctgggaatttgaagaatcccctaggtctgaaaggaaaaatgacaatgggacagaggcctggggttgtgcagctactcaggcttcaaactcaggggggaagaacgatgggtccatcatgaacagtacaaatacctcttcagtatctgggtgggtcaacgcgccacctgccgctgtgccagcaaacacaggttggggagacagcaacaacaaagcgccaagtggcccgggggtttggggggactcgataagctctactgctgttagtactgctgctgctgccaagagtggccatgcttggagtggggccgcaaatcaggaggacaagtcacccacctggggtgagcctccaaagcccaaatcccaacactggggagatggacaaagatcaaatccagcctggagtgcaggagggggagattgggcagattcatcgtctgtccttggacacttgggggatgggaaaaaaaatggatctggatgggatgctgacagtaataggtcagggtctggttggaatgacaccacgagatctgggaacagtggctggggcaacagcacaaatacaaaggccaatccaggtacaaactggggggagactttaaaacctggcccccaacagaactgggctagcaaaccccaagacaacaatgtgagtaactggggaggagctgcttctgtgaaacagacaggaacagggtggatcggggggccggtaccggtcaaacagaaggacagcagtgaagcaactggctgggaagaaccctctccaccgtccattcgccgcaaaatggaaattgatgatggtacctcagcttggggggacccaagcaactataacaataaaactgtaaacatgtgggatagaaacaacccggtcatccagagcagtaccacgaccaataccaccaccaccaccaccactaccacgagcaacaccacacacagggtcgagacgccgcccccgcaccaggccggtactcagctgaatcgatcaccgttgcttggtccagtttcatcaggctggggagaaatgcctaatgttcactcaaagactgaaaactcttggggagaaccatcctccccttctaccctggtggataatggcacagcagcatgggggaagccacccagcagtggcagcgggtggggagatcaccctgcagagccgccggtggcatttggaagagctggcgcacctgttgctgcctcagccctgtgcaaaccagcttcaaaatctatgcaagaaggctggggcagtggtggggatgaaatgaacctcagtaccagccagtgggaggatgaagaaggggacgtgtggaataatgctgcttcccaagaaagcacctcctcctgcagctcctgggggaacgcccccaaaaaaggacttcaaaagggcatgaagacgtctggcaagcaggatgaggcctggatcatgagccggctgatcaaacaactcacagacatgggcttcccgagagagccagctgaggaggccttgaagagtaacaatatgaatcttgatcaggccatgagcgctctgctggaaaagaaggtggacgtggacaagcgtgggctgggagtgaccgaccataatggaatggccgccaagcccctcggctgccgcccgccaatctccaaagagtcttccgtggaccgccccacctttcttgacaaggatggcggcctcgtggaagagcccacgccttcaccgttcttgccttccccaagcctgaagctccccctttcacacagtgcactccccagtcaggccctgggtgggattgcctccgggctgggcatgcaaaacttgaattcttctagacagataccgagtggcaatctgggtatgtttggcaatagtggagcagcacaagccaggaccatgcagcagccgccacagccaccagtgcagcctcttaactcttcccagcccagtctccgtgctcaagtgcctcagtttctatcccctcaggttcaagcacagcttttgcagtttgcagcaaaaaacattggtctcaaccctgcactattaacctcgccaattaatcctcaacatatgacgatgttgaaccagctctatcagctgcagctggcataccaacgtttacaaatccagcagcagatgttacaggcccagcgtaatgtgtccggatccatgagacaacaggagcagcaagttgcgcgcacaatcactaatctgcagcagcagatccagcagcaccagcgccagctggcccaggccctgctcgtgaagcagccaccaccgccaccgcccccgccgcacctgtctctgcacccctctgcaggcaaatcggccatggacagcttcccctcgcacccacagactcccggcctacctgacctgcagaccaaagagcagcagtcttcacccaacacctttgctccttaccctctcgctggactgaacccaaacatgaatgtcaacagcatggacatgaccggtggcttgtcggtgaaggacccatcccagtcccagtcacgcctcccccagtggacgcaccccaactccatggataacttgcccagtgccgcttcccccctggagcagaaccctagcaagcatggtgctatccctggaggtctaagcattgggcctccaggtaagtcctccattgatgactcctatggccggtacgatttaatccagaacagtgagtcaccagccagtcctcccgtagctgttccccatagctggtcacgtgccaaatctgacagtgataaaatctcaaatggctctagcatcaactggcccccagaattccatccgggagttccatggaaaggactgcagaatattgaccctgagaatgaccctgacgtcactcctggcagtgtccccactgggcctaccatcaacaccaccatccaggatgtcaaccgctacctcctcaagagtggagggtcctccccgccatcatctcagaatgccacgctgccttcttcgagtgcctggccactcagtgcctccggctacagtagctctttcagcagcattgcatccgcacctagtgttgcaggtaaactgtcagacatcaaatcgacgtggtcctctggccctacctcccacacgcaagcctctctgtctcatgaactatggaaggtgcccagaaacagtactgcacccacgaggccacctccagggttaaccaatcccaagccctcctccacctggggtgccagccccctcggctggaccagctcctactcctcgggttctgcctggagcaccgacacctcaggaagaaccagcagctggctcgttcttcgaaacctcactccccagattgatggttctacactgcggacattgtgtttgcaacatgggcctcttatcacattccacctgaatctgactcaaggcaatgctgtggtccggtacagctccaaggaggaggctgccaaggcccagaagtctctgcacatgtgcgtcctgggaaacactaccatcctggccgagttcgctggtgaagaagaagtgaatcgcttcttagcccaaggccaggcgctgccacccacttccagctggcagtccagcagcgcgtccagccagccgcggctcagcgcagcgggcagctcccatggcctggtacgcagcgacgctggccactggaacgccccgtgcctgggtggcaaggggagcagtgagctgctgtggggcggggtgccccagtactccagcagcctgtggggcccgcccagcgccgacgacagcagggtgataggcagccccacgccgctaaccaccctgctgcctggggacctgctcagcggggagtccctgtaggctctgccatcatcagcaccaggagagccgacccctcccgggacccctcccggctgggcggccccacagacccgctggaacccagcagcggccgcccttttgagtacctctgtccaggactgaagacgaaccttggccgcagtccttgcgaactgttcgcaaaacagtgcgggctgcggtgggtcagcgtcacatgctaatgacaggatgttcctcgtagctttttattttgtgcgtcttatgtttgtatagtgtgttgtcattttgattttttttttttttttaagtataaaagctgcttagaatagttctatcatgaagggcacttttcagattgtgggctggaaagggttattttatctgtgggggagggagggagacgtgaagcctatttaaaatgagcctgtgacgattatgcacatgaccagaggcggccggtaatcagggcagagtctggtgtggaccgccgggcgcagagcggctccgcggcgggagctgagcggaaggcgcgggctgcgatctgctctctgttcccctggatccgcctatgcacattacccttgtttcattactttttcatgtcatttttttatcccaaaaaatattttttaaaagttaaaaaaagacatatcaaacatgcaaatacttgaatccagcaggccaatagtgaaatgtgaacactttctaattctacacttccaggttgacatcagtacacagaaacaggctctaggaaaaatttctaagttcatagcctacgtgtgtgtatgtgtgcgtgttgaaacagaagtgtgtgtgtgtgtgcatgtgtggcgcgtgctcctgcacggcgtgcagttttctgtgtttgtgtgtttgaaagcgtgtgaggatttaactgtgggttttcccttgtattcagtatacgctttttttttggcgcattggtcaaacggttgttattattagcttctaactttgcactgagtgtcctcgcccttcctttagctaatcctatacattacagagaattcctaggacagggctggcgacaattcatgtgtaaatgtttactcaaggactctgtgactgcgtttaaaaagtacagtgtatatctctggagaaataacatgtatacctacctttagcagctttttattgtggactaatgcaagaaaattattaccagagtattgcaccatttttccatttggaatataaagttaaagagaaaaaaaaaaaaaactgttgttgaactgtggccatagatacttgtaaagaatggatggttccgtggaaggaacagaaacaagcacttgggcgtgggttgtgactgcttttgggggagcctggggtttgggctcccacctgtttacagacctttttttctccttcagactttaaaattttaaaaatttaaaaaggaattaaaaaaaaaaaaagacttccgtcgtaaagaaacctattttcagaatgcagatgcgttccttcagagctctgggacgggacagtgttgttccctcggccatcgtcgtggactctgtcgattgctttcgccccttcgtcaaggtgacaggcgttgtggccactgtcttgcacatgccggacgcgctctcaggaaagccagggctcccgagggcagctccacaccatttcatgtatttttaaacccaactcctagcactgaagatgttatttaaaaaaaaaaaaaacaaaacaaaacaaaaaaatgaaaaaaaagaaaaagaggaaaaaaaaacacaaagaagaaaaatacctaatctctaatgtgtagcagttacatatttaccaaataatggactcaaaagaaatagatgtttgaagagtgctttatatattaaaaattgctttatgttttaaaaatgatcaatgttttgattgttttgcaaggaagaaagacaatggaataacataccttcaagtatgttttaaaaaatatatatatgaacattgtgctccctgcctgcttgatcaggaaacttgtgcattacatttttttaattagctttttaatggttttatcaaaacaaaaaaaatacaaaaaaaaaaaaaaaagtcctgcaagactgcagatccacaaaagctggttttatagaggatcatgaactatgcacaaactgggttcaagactttttttctcaagtttagtaggatatttagaaaaaccaaccttcctcagagtgactgcatctcattgccattacatgcgttctatatattcgatggacatacacctgcgtatgtatatccaatatgtgtgcgtgtgagcatgcgtgtgcgtatgtgcgtccgacataccacttcccgtgctgccggcgagcattgagttgtagaaaaactgttgttttaaaattggggatggaagtcaagaatatgtttgtttgtttttgggttttgttgggtttgaggggttttttgtttgtttgttttttgttttttttaccttttattttgaacttaatatgtctgtaactctgagattaaacaacaagttcgtggctcttaatgttttcctcatagaatgtgactgttgaagaacatgcatcgaaagttgctttcgaaagtacaacgctttattgaatcttaataaattgcaatttttttcttggctgttcaaagtaatgtgtttttcatttttcaaaagacactatggatgtctactttgcacgctgcgattgggagagctgtcccgctgcatgcgttccctctgtaatttcctcagagctcacatacgtacctctctcacgagtgaactcagattttccattgttttgctttattctatcatttgctttgtggttttgctgtaaatattgaaatcttaatcatcatcgagaggcacagccaagctttccagctctccacccccgtggcccatccaagtctgttcatctggtaacttctgttgtctgggacggcagcaagaagatgccggggcttgcctggagtcctggcagaggagtgccactcacttttgcctagggtccagttggggcttaaaaaatatttggagagaagagtaatgaggattttttgtgtttcctagacattttatgcatctatttttgtaaaatcaccttcgctaactttcaccaagcactttgagcacagtggaacttcagaagcacaaccagcctaaccccagaatctcaggtggcacagctagaaattgagtcccttcctaggacactggccgtggccttcagggtgaccagtcagtgccaccgggttggcattggtgttacagacaggcctctgaagacaaaccgagcaccccagcggcccctcaaactaagcaaggatcttttttctgtctgcgctccctggggcaaggtcaaaggtggacccgcccactgtgggtcaattccttcgaaaagatgggacccgcacccccgccacaggctggcccccccccacccatggggaaggtggtgtgctgctggctctgaccatactcttttggaaattgagaaggaaagcattgagtgggacctaatccggagaagaaattaaagaccagaaaaagaaggaagctgggaatgaaactcaaaatgcacttgaacctggaagcggcaaccctcagctctgcgcggccgagcctcagcaagagttcgttttgtgcctgagttactactacaggggcaaactgtacccgtgcctgtgcgctgggagaacaaggtcagcgcccaagggtgtgcaaaggatgtggcaggcttcatggaggaggtggcatttgccctgggcctgggagaccaggttggattttgacagactgggaactcgggggacaggagggcagcacagtgtaagctaaagccctgtgtagggaccccacgcaaagacctcgtgggcctgggtgtccagggcaccatttccacccatgggtgaaaaagaggcttgaggaagacaacaggttcttcacctgcatctgtggatatatatttttttaagtttattaaatttttttttaaatggcagtttcagacctgcaaaaaaaaaaaaaaaaaaaaaaa

SEQ ID NO: 1613 - DNA, 12381 bp, HOMO SAPIENS
aatctctagctcgctcgcgctccctctccccgggccgtggaaaggatcccacttccggtggggtgtcatggcggcgtctcggactgtgatggctgtggggagacggcgctagtggggagagcgaccaagaggccccctcccctccccgggtccccttcccctatccccctccccccagcctccttgccaacgccccctttccctctccccctcccgctcggcgctgaccccccatccccacccccgtgggaacactgggagcctgcactccacagaccctctccttgcctcttccctcacctcagcctccgctccccgccctcttcccggcccagggcgccggcccacccttccctccgccgccccccggccgcggggaggacatggccgcgcacaggccggtggaatgggtccaggccgtggtcagccgcttcgacgagcagcttccaataaaaacaggacagcagaacacacataccaaagtcagtactgagcacaacaaggaatgtctaatcaatatttccaaatacaagttttctttggttataagcggcctcactactattttaaagaatgttaacaatatgagaatatttggagaagctgctgaaaaaaatttatatctctctcagttgattatattggatacactggaaaaatgtcttgctgggcaaccaaaggacacaatgagattagatgaaacgatgctggtcaaacagttgctgccagaaatctgccattttcttcacacctgtcgtgaaggaaaccagcatgcagctgaacttcggaattctgcctctggggttttattttctctcagctgcaacaacttcaatgcagtctttagtcgcatttctaccaggttacaggaattaactgtttgttcagaagacaatgttgatgttcatgatatagaattgttacagtatatcaatgtggattgtgcaaaattaaaacgactcctgaaggaaacagcatttaaatttaaagccctaaagaaggttgcgcagttagcagttataaatagcctggaaaaggcattttggaactgggtagaaaattatccagatgaatttacaaaactgtaccagatcccacagactgatatggctgaatgtgcagaaaagctatttgacttggtggatggttttgctgaaagcaccaaacgtaaagcagcagtttggccactacaaatcattctccttatcttgtgtccagaaataatccaggatatatccaaagacgtggttgatgaaaacaacatgaataagaagttatttctggacagtctacgaaaagctcttgctggccatggaggaagtaggcagctgacagaaagtgctgcaattgcctgtgtcaaactgtgtaaagcaagtacttacatcaattgggaagataactctgtcattttcctacttgttcagtccatggtggttgatcttaagaacctgctttttaatccaagtaagccattctcaagaggcagtcagcctgcagatgtggatctaatgattgactgccttgtttcttgctttcgtataagccctcacaacaaccaacactttaagatctgcctggctcagaattcaccttctacatttcactatgtgctggtaaattcactccatcgaatcatcaccaattccgcattggattggtggcctaagattgatgctgtgtattgtcactcggttgaacttcgaaatatgtttggtgaaacacttcataaagcagtgcaaggttgtggagcacacccagcaatacgaatggcaccgagtcttacatttaaagaaaaagtaacaagccttaaatttaaagaaaaacctacagacctggagacaagaagctataagtatcttctcttgtccatggtgaaactaattcatgcagatccaaagctcttgctttgtaatccaagaaaacaggggcccgaaacccaaggcagtacagcagaattaattacagggctcgtccaactggtccctcagtcacacatgccagagattgctcaggaagcaatggaggctctgctggttcttcatcagttagatagcattgatttgtggaatcctgatgctcctgtagaaacattttgggagattagctcacaaatgcttttttacatctgcaagaaattaactagtcatcaaatgcttagtagcacagaaattctcaagtggttgcgggaaatattgatctgcaggaataaatttcttcttaaaaataagcaggcagatagaagttcctgtcactttctccttttttacggggtaggatgtgatattccttctagtggaaataccagtcaaatgtccatggatcatgaagaattactacgtactcctggagcctctctccggaagggaaaagggaactcctctatggatagtgcagcaggatgcagcggaacccccccgatttgccgacaagcccagaccaaactagaagtggccctgtacatgtttctgtggaaccctgacactgaagctgttctggttgccatgtcctgtttccgccacctctgtgaggaagcagatatccggtgtggggtggatgaagtgtcagtgcataacctcttgcccaactataacacattcatggagtttgcctctgtcagcaatatgatgtcaacaggaagagcagcacttcagaaaagagtgatggcactgctgaggcgcattgagcatcccactgcaggaaacactgaggcttgggaagatacacatgcaaaatgggaacaagcaacaaagctaatccttaactatccaaaagccaaaatggaagatggccaggctgctgaaagccttcacaagaccattgttaagaggcgaatgtcccatgtgagtggaggaggatccatagatttgtctgacacagactccctacaggaatggatcaacatgactggcttcctttgtgcccttgggggagtgtgcctccagcagagaagcaattctggcctggcaacctatagcccacccatgggtccagtcagtgaacgtaagggttctatgatttcagtgatgtcttcagagggaaacgcagatacacctgtcagcaaatttatggatcggctgttgtccttaatggtgtgtaaccatgagaaagtgggacttcaaatacggaccaatgttaaggatctggtgggtctagaattgagtcctgctctgtatccaatgctatttaacaaattgaagaataccatcagcaagttttttgactcccaaggacaggttttattgactgataccaatactcaatttgtagaacaaaccatagctataatgaagaacttgctagataatcatactgaaggcagctctgaacatctagggcaagctagcattgaaacaatgatgttaaatctggtcaggtatgttcgtgtgcttgggaatatggtccatgcaattcaaataaaaacgaaactgtgtcaattagttgaagtaatgatggcaaggagagatgacctctcattttgccaagagatgaaatttaggaataagatggtagaatacctgacagactgggttatgggaacatcaaaccaagcagcagatgatgatgtaaaatgtcttacaagagatttggaccaggcaagcatggaagcagtagtttcacttctagctggtctccctctgcagcctgaagaaggagatggtgtggaattgatggaagccaaatcacagttatttcttaaatacttcacattatttatgaaccttttgaatgactgcagtgaagttgaagatgaaagtgcgcaaacaggtggcaggaaacgtggcatgtctcggaggctggcatcactgaggcactgtacggtccttgcaatgtcaaacttactcaatgccaacgtagacagtggtctcatgcactccataggcttaggttaccacaaggatctccagacaagagctacatttatggaagttctgacaaaaatccttcaacaaggcacagaatttgacacacttgcagaaacagtattggctgatcggtttgagagattggtggaactggtcacaatgatgggtgatcaaggagaactccctatagcgatggctctggccaatgtggttccttgttctcagtgggatgaactagctcgagttctggttactctgtttgattctcggcatttactctaccaactgctctggaacatgttttctaaagaagtagaattggcagactccatgcagactctcttccgaggcaacagcttggccagtaaaataatgacattctgtttcaaggtatatggtgctacctatctacaaaaactcctggatcctttattacgaattgtgatcacatcctctgattggcaacatgttagctttgaagtggatcctaccaggttagaaccatcagagagccttgaggaaaaccagcggaacctccttcagatgactgaaaagttcttccatgccatcatcagttcctcctcagaattcccccctcaacttcgaagtgtgtgccactgtttataccaggtggttagccagcgtttccctcagaacagcatcggtgcagtaggaagtgccatgttcctcagatttatcaatcctgccattgtctcaccgtatgaagcagggattttagataaaaagccaccacctagaatcgaaaggggcttgaagttaatgtcaaagatacttcagagtattgccaatcatgttctcttcacaaaagaagaacatatgcggcctttcaatgattttgtgaaaagcaactttgatgcagcacgcaggtttttccttgatatagcatctgattgtcctacaagtgatgcagtaaatcatagtctttccttcataagtgacggcaatgtgcttgctttacatcgtctactctggaacaatcaggagaaaattgggcagtatctttccagcaacagggatcataaagctgttggaagacgaccttttgataagatggcaacacttcttgcatacctgggtcctccagagcacaaacctgtggcagatacacactggtccagccttaaccttaccagttcaaagtttgaggaatttatgactaggcatcaggtacatgaaaaagaagaattcaaggctttgaaaacgttaagtattttctaccaagctgggacttccaaagctgggaatcctattttttattatgttgcacggaggttcaaaactggtcaaatcaatggtgatttgctgatataccatgtcttactgactttaaagccatattatgcaaagccatatgaaattgtagtggaccttacccataccgggcctagcaatcgctttaaaacagactttctctctaagtggtttgttgtttttcctggctttgcttacgacaacgtctccgcagtctatatctataactgtaactcctgggtcagggagtacaccaagtatcatgagcggctgctgactggcctcaaaggtagcaaaaggcttgttttcatagactgtcctgggaaactggctgagcacatagagcatgaacaacagaaactacctgctgccaccttggctttagaagaggacctgaaggtattccacaatgctctcaagctagctcacaaagacaccaaagtttctattaaagttggttctactgctgtccaagtaacttcagcagagcgaacaaaagtcctagggcaatcagtctttctaaatgacatttattatgcttcggaaattgaagaaatctgcctagtagatgagaaccagttcaccttaaccattgcaaaccagggcacgccgctcaccttcatgcaccaggagtgtgaagccattgtccagtctatcattcatatccggacccgctgggaactgtcacagcccgactctatcccccaacacaccaagattcggccaaaagatgtccctgggacactgctcaatatcgcattacttaatttaggcagttctgacccgagtttacggtcagctgcctataatcttctgtgtgccttaacttgtacctttaatttaaaaatcgagggccagttactagagacatcaggtttatgtatccctgccaacaacaccctctttattgtctctattagtaagacactggcagccaatgagccacacctcacgttagaatttttggaagagtgtatttctggatttagcaaatctagtattgaattgaaacacctttgtttggaatacatgactccatggctgtcaaatctagttcgtttttgcaagcataatgatgatgccaaacgacaaagagttactgctattcttgacaagctgataacaatgaccatcaatgaaaaacagatgtacccatctattcaagcaaaaatatggggaagccttgggcagattacagatctgcttgatgttgtactagacagtttcatcaaaaccagtgcaacaggtggcttgggatcaataaaagctgaggtgatggcagatactgctgtagctttggcttctggaaatgtgaaattggtttcaagcaaggttattggaaggatgtgcaaaataattgacaagacatgcttatctccaactcctactttagaacaacatcttatgtgggatgatattgctattttagcacgctacatgctgatgctgtccttcaacaattcccttgatgtggcagctcatcttccctacctcttccacgttgttactttcttagtagccacaggtccgctctcccttagagcttccacacatggactggtcattaatatcattcactctctgtgtacttgttcacagcttcattttagtgaagagaccaagcaagttttgagactcagtctgacagagttctcattacccaaattttacttgctgtttggcattagcaaagtcaagtcagctgctgtcattgccttccgttccagttaccgggacaggtcattctctcctggctcctatgagagagagacttttgctttgacatccttggaaacagtcacagaagctttgttggagatcatggaggcatgcatgagagatattccaacgtgcaagtggctggaccagtggacagaactagctcaaagatttgcattccaatataatccatccctgcaaccaagagctcttgttgtctttgggtgtattagcaaacgagtgtctcatgggcagataaagcagataatccgtattcttagcaaggcacttgagagttgcttaaaaggacctgacacttacaacagtcaagttctgatagaagctacagtaatagcactaaccaaattacagccacttcttaataaggactcgcctctgcacaaagccctcttttgggtagctgtggctgtgctgcagcttgatgaggtcaacttgtattcagcaggtaccgcacttcttgaacaaaacctgcatactttagatagtctccgtatattcaatgacaagagtccagaggaagtatttatggcaatccggaatcctctggagtggcactgcaagcaaatggatcattttgttggactcaatttcaactctaactttaactttgcattggttggacaccttttaaaagggtacaggcatccttcacctgctattgttgcaagaacagtcagaattttacatacactactaactctggttaacaaacacagaaattgtgacaaatttgaagtgaatacacagagcgtggcctacttagcagctttacttacagtgtctgaagaagttcgaagtcgctgcagcctaaaacatagaaagtcacttcttcttactgatatttcaatggaaaatgttcctatggatacatatcccattcatcatggtgacccttcctataggacactaaaggagactcagccatggtcctctcccaaaggttctgaaggataccttgcagccacctatccaactgtcggccagaccagtccccgagccaggaaatccatgagcctggacatggggcaaccttctcaggccaacactaagaagttgcttggaacaaggaaaagttttgatcacttgatatcagacacaaaggctcctaaaaggcaagaaatggaatcagggatcacaacaccccccaaaatgaggagagtagcagaaactgattatgaaatggaaactcagaggatttcctcatcacaacagcacccacatttacgtaaagtttcagtgtctgaatcaaatgttctcttggatgaagaagtacttactgatccgaagatccaggcgctgcttcttactgttctagctacactggtaaaatataccacagatgagtttgatcaacgaattctttatgaatacttagcagaggccagtgttgtgtttcccaaagtctttcctgttgtgcataatttgttggactctaagatcaacaccctgttatcattgtgccaagatccaaatttgttaaatccaatccatggaattgtgcagagtgtggtgtaccatgaagaatccccaccacaataccaaacatcttacctgcaaagttttggttttaatggcttgtggcggtttgcaggaccgttttcaaagcaaacacaaattccagactatgctgagcttattgttaagtttcttgatgccttgattgacacgtacctgcctggaattgatgaagaaaccagtgaagaatccctcctgactcccacatctccttaccctcctgcactgcagagccagcttagtatcactgccaaccttaacctttctaattccatgacctcacttgcaacttcccagcattccccaggaatcgacaaggagaacgttgaactctcccctaccactggccactgtaacagtggacgaactcgccacggatccgcaagccaagtgcagaagcaaagaagcgctggcagtttcaaacgtaatagcattaagaagatcgtgtgaagcttgcttgctttcttttttaaaatcaacttaacatgggctcttcactagtgaccccttccctgtccttgccctttccccccatgttgtaatgctgcacttcctgttttataatgaacccatccggtttgccatgttgccagatgatcaactcttcgaagccttgcctaaatttaatgctgccttttctttaactttttttcttctacttttggcgtgtatctggtatatgtaagtgttcagaacaactgcaaagaaagtgggaggtcaggaaacttttaactgagaaatctcaattgtaagagaggatgaattcttgaatactgctactactggccagtgatgaaagccatttgcacagagctctgccttctgtggttttcccttcttcatcctacagagtaaagtgttagtcctatttatacatttttcaagatacaagtttatgagagaaatagtattataaccccagtatgtttaatcttttagctgtggactttttttttaaccgtacaaaactgaaagaaccatagaggtcaagcctcagtgacttgacaccataaagccacagacaaggtacttgggggggagggcagggaaatttcatattttatagtggattcttaagaaatactaacacttgagtattagcaataattacaggaaaataagtgcgaccacatatatcttaacattactgaattaaaactatggcttctaagtccttatccaaactcagtcatccaaactagtttatttttttctccagttgattatcttttaatttttaattttgctaaaggtggtttttttgtgttttgttttttgtaaaccaaaactatactaagtatagtaattatatatatatatatattttttcccctccccctcttctttcctaactaattctgagcagggtaatcagtgaacaaagtgttgaaaattgttcccagaaggtaattttcatagatgtttgcattagctccatagcaaaatggaatggtacgtgacatttagggtagctgatatttttattttgttaaataatttccaagaatagagtatggtgtatattataaatttctttgataagatgtattttgaatgtcttttaatcttcctcctcctctccaaaaaaatcagaaacctctttaagaaaacatgtaggttatatatgctagaattgcatttaatcactgtgaaaagactggtcagcctgcattagtatgacagtaggggggctgttagaattgctgctatactggtggtatggattatcatggcattggaattttcatagtaatgcagatccaatttctttgtggtacctgcagtttacaaaataatttgacttcagtgagcatattggtatctggatgttccaatttagaactaaaccatatttattacaaaaagatattaatccctctactcccaggttccctttatatgttaagatataatggctttgaggggggaaaaaataaacctaggggagaggggagtttcctgtagtgctgtttcattagaggatttcagtaaattaaattccacagctaattcaataaataatggtacatttaagtgttctgattttaataatatatttcacatttatccacacagtaacaatgtaatatgttaatgtaaataaaattggttttgatactcagaaataacaagaatttaattttttaaatttgtttacagtcctgggaaaagtaagaattatttgccaaaataagaggaaagaaaaccttagtattattaatgagtttaccatagaattgttggaaatactgaagacaggtgcaatttactaaacttttgtttttaaactattgtagaggctgcattagaagaaaatgtttataatgacagagcaactatgactatataaaaaagctgaaattagaactgtgtttagaaatagatcagtaacccagtgccaaggatgccaagctgccaccatggtcttggctctcccacaacccagtgtttctggggtaagtttcacagtttctaggccctggaatagcaggcagtgtaagcctttgataactttagttcgatgtttttcttgtttttgtttgttggtttggtgcatatgatagtgggtgttatgctattttgctcttcccatcaaaataaagaaacttccagaggtttactgttaaaaatactgatatttccataaacgggtttaccaagggtgtagtatttcataccgcctgaaatgatcagcattggcacaaatcaaaattcagccgcctttgaaatgcaaaaatacctttgactagtaagtacatcctaggagtttgaaaacttaactaaggtttaaaatttaccttgtttaaagaacttctgacttttgaggaaaatctagctttccaagtaactaaaatgtacatgagataaacctctcaccactatgtgtcccttgagaaatgcaacacttttttagtcttcatacttgtaatctataaaagaaattctgaagtttagaccaagttgcccatttctgcgtaattgacataagttctgttaaaaatattataagtaattcgtttcggtttgtagatgtttcccctgacttgttaaagaggaaaccaggaactcagtcatgtttttgtcctggataatctacctgttatgccagtactcccatccgaggggcatgcccttagttgcccagatggagatgcagttcagtagatttggggcaaagtggctacagctctgtcttccattcactcaacacctgttcatgactgagccaggtgcccaggacacatcctaaacagtcagcttctatcctgtgtcctagttggggagacagagtgccagccagcaaccctcccaggtttgtaggttttaggggttttcagttttgtttgggttttttgttttttgtttttgtttctacatccttccccgactcccaggcataatgaggcatgtcttactcaatgttatgcaatggatttaggcaaaaattcattcttagtgtcagccacacaattttttttaatgcagtatattcacctgtaaatagtttgtgtaaaatttgacaaaaaaagtatatttactatactgtaaatatatgtgatgatatattgtattattttgcttttttgtaaagcagttagttgctgcacatggataacaacaaaaatttgattattctcgtgttagtattgttaacttctttttgcgactgcgttacatcatttaaagaaaatgctgtgtattgtaaacttaaattgtatatgataacttactgtcctttccatccgggcctaaactttggcagttcctttgtctacaaccttgttaatactgtaaacagttgtacgccagcaggaaaaatactgcccaacagacaaaatcgatcattgtaggggaaaatcatagaaatccatttcagatctttattgttcctcaccccattttcctccttgtgtatgtacttcccccacccccctttttttaagtaaaatgtaaattcaatctgctctaagaaaaaaaaaaaaaaaaaaaa

SEQ ID NO: 1614 - DNA, 7760 bp, HOMO SAPIENS; identical to SEQ ID NO: 1267

SEQ ID NO: 1615 - DNA, 411 bp, HOMO SAPIENS
ccgcagggcgaggtggacaagggtgtgagttactttgacttcaagacgtctcagtggcggctggttctggagagaggctttatgctggagcacttccagcaaagttcggctggggcctccttaactcactggctggtcacccttggcctcggttttcaaccaaagcctaaggcctcagttttcaacgctgtaaatggaaataaatgagagaagaaagtacagcccgtgtgacaagtgcagcaagcaatgcaacttccttgggacctaccctttgtggtcccttgctttaaaagtatagattcacatttagttagacctgtttcttcctcgcatgcaatttcaccagtcttttcccagacttctgtactcaacagaggaagttccttcctgggagaccatagctgtttgtat

SEQ ID NO: 1616 - DNA, 1791 bp, HOMO SAPIENS
ccgagctgcaggaggccgcgggcgcgagactgggaatgcgcagggcccccgcctggctctacaagcccgggccgcggcccccgccttccccgccgcctcccggcgctccgtgcccgccccacgaggccggcggctgctgctacctggggccgttgctgcttgtgccgtgagcgacggccagccattgtccccgccgctccgtcagccgcgcccggccgcgcgcgcaccggaaggcgcattggcgtcttgcgggctccgggccgggtgggcaggatggcctccacaagccgcatggcgcgcatggggagcctccgttgatgccgccgcgccgccctccgaggctgcatccgcggaagcccggctccccgagcgctccggcccggcccggcgccccggacctgagtgcgtccccatgaaggcgcccgggctggcccaggcggccgtggcagaggagaccccggactgggcgcccgagctctgccccagctccgaggcgcggtcgccggagccgcctgccaaccgccttcaagacttcgacacgctggtcaccgtgggaaagcaactagaagccatttgtgtcaaggtaacgtctggagaaacaaaaggtcaggaatggccaacgtccctactggccacagtccagccccaatctgcaagacagagccagccgccccgggggaattcccgcctggtgggactccacgtcaccagcccccagctgctcagggtacagcccctcgtgagaaccgagccacagtcatgtttcctacatcagcctcctgctcaggggtttgtacagagaccactgccagccctctaggtggtccctgcaaagagagtcccagcccccaaggctccaaatggacagggcaccatgttgaccccttcgtcggcctccagtttgccgactgtaacatgtttcatccagttcaggacgtttatttatttccaacttgcatacaaaacatactgagaaactaaaaccatcgttaaaagtgaagacacgttgagacaggtatctcgacctgccaagtataaagctaaagctgagttcataaaaagggatgatttggccgacggtcatctgccagattctgatgatgattcagaagtcagtgtggaagaagatcagagggagaggcaggcgctctttgacttatcaagctgctccctgaggcccaaaagcttcaagtgtcagacttgtaaaaagtcatatatagggaagtggggactggcccagcattttaaacttaatccaggccatggccagctggaccctgagatggtgctatctgagaaagccaatgggagcaccctccgggggtgcacagaggaaaggacgctcagcctgaccttcccggggctgtccgtgccagcggctccgcgtgagggaggggcccgctcctgcttggtgagagagtcagcacgcggtggcctgcagggttatagagtggaaagtcccacaatctttttcttctctattttcagaaaaacgttgacctcttggcgagaatgcaaagaagggaacgcttgcttatacgctgttggtgaactgtcacccctacaactcagcttgcaaccagccctggccaccagtttccccacactgagctgaatatcggacatgcccatctcagacattccagcccattctgaaattccacatcgattcacctgacaaagtctgaagttccagggcaatttatctggaaaagcttacctggaatcacgtgtcatttcaaccaacaactgttgaagaggacgtggcattaaaaccaagggtatcaatta

SEQ ID NO: 1617 - DNA, 2758 bp, HOMO SAPIENS
agcagctcttaaagctttggattcggctgtcgtggagataacgggcaccagaaaaacttgtaggagtagcaacagctatttggtcggatggaggccagaagccaagaataatcgaaacacgctgccagcgcccattagatggatgggaaatgagtgtaactcattgggaaagatattagacttcaaatcacctaaggcaaaccctacttcctggggcgcgggcgcgggcgctggcgttaggagacgtcactcccgcgcataactgacatggggccctcttggtcggcgtttccgggcgggtccttccgacggccgccgcggtgattccatcactcggctttcttcccggcctgcctcgcgcccgtagccgggctgggccagaacagcccaagatggccgacttcgatgatcgtgtgtcggatgaggagaaggtacgcatagctgctaaattcatcactcatgcacccccaggggaatttaatgaagtattcaatgacgttcggctactacttaataatgacaatctcctcagggaaggggcagcacatgcatttgcccagtataacatggatcagttcacgcctgtgaagatagaaggatatgaagatcaggtcttaattacagagcacggtgacctgggtaatagcagatttttagatccaagaaacaaaatttcctttaaatttgaccacttacggaaagaagcaagtgacccccagccagaagaagcagatggaggtctgaagtcttggagagaatcctgtgacagtgctttaagagcctatgtgaaagaccattattccaacggcttctgtactgtttatgctaaaactatcgatgggcaacagactattattgcatgtattgaaagccaccagtttcagcctaaaaacttctggaatggtcgttggagatcagagtggaagttcaccatcacaccacctacagcccaggtggttggcgtgcttaagattcaggttcactattatgaagatggcaatgttcagttggttagtcataaagatgtacaggattcactaactgtttcgaatgaagcccaaactgccaaggagtttattaaaatcatagagaatgcagaaaatgagtatcagacagcaattagtgaaaactatcaaacaatgtcagataccacattcaaggccttgcgccggcagcttccagttacccgcaccaaaatcgactggaacaagatactcagctacaagattggcaaagaaatgcagaatgcttaaaggctgaatgtaggattcttcagtatgtggaaagacaaggattcaacgtgtggtcatatgataaataagtgatttataaacaagagtgatattttgctagggctttcaaagttaaccggttttctagcctcatggaatactgttgaacctatagcgttgtcttgattcttttgtgttctctgccttgtaattttctgttactgctatatctacgtgtaaatctttttttctttttttttttttttttttggttaattctgccacatttaatgttggtgagagagtgatctatcctaatgacattttactgtttaaaaaagtttcctagccatgaagccctgctactgatttagacaaggtattatggtcattactttgtacccctatccttccaagcacttctggtacttcagtcgtttttactgatccaccaacacctaaagaggctatgctacagtctctagctaaatggaagacacattcatccttctccctctgactgctttgatcatcatttattgcatctcataactaattttctaaagtttggattgggacttttcaggtcctttttggagggcaaaggaagtgccagcttctctggggaacttgtttttaaatccaaagacttgaaccacattccctgcacatgaacatgtttgcttttatcccttctctcattgtctccttcccatcttagtaccattgtagttataaacatctgcattttttagaagcattttacccatttatttttttaaacattcaagaactgctgacgtactgtggatgtagagtataaaacttgaaaaatgcagatgttgaaggaataataggtatcttgtgctttaatactttatggcaggattgtactataagcaaatgaattaaacagctatgtaaatcataaagaaaaactaaaaatgaaccaaagtgaaaggataacttccaggcagtatctttctattgtaacctgttatttaaggaaatactagtgatttcttctaaataggatgtaaaacttctttcaaattactcttcctcagtcctgcctgccaagaactcaagtgtaactgtgataaaataacctttcccaggtatattggcaggtatgtgtgtaatctcagaatacacaggtgacatagatatgatatgacaactggtaatggtggattcatttacattgtttacacttctatgaccaggccttaagggaaggtcagttttttaaaaaaccaagtagtgtcttcctacctatctccagatacatgtcaaaaaaagaaaggtgtttgtgcttccgttttgtttctgctcagtaatatagtcaagcaagtttgttccaggtgacccattgagctgtgtatgcatttttgtttatttcaataaaatatatttgtattatttgtccttcatactatccatccataccacactatcttctgtatcaggtagtctaatagaaatatacctgttttgttctaaaattgaaaaaaaaaaaaaaaaaa

SEQ ID NO: 1618 - DNA, 3352 bp, HOMO SAPIENS; identical to SEQ ID NO: 660

SEQ ID NO: 1619 - DNA, 483 bp, HOMO SAPIENS
  misc_feature (69)..(69): n is a, c, g, or t
  misc_feature (446)..(446): n is a, c, g, or t
gcatgtggtcctaaaattctatatcaaattcatatcttgaaaatctacacgtgtaataatctaaatgtncatttctattggtgacaaagtcacaggtactctgatcctactgtggactgtttcctatattcgtaattgaaggaaatgttatatttcagttagaagttggtgaaaagaaagatttaaaatttttcccatccaagttcaccagacccctggtttagaggttgtcttaattttacttttgtcattttaagagtaaattattttgttttcttgttcaattctcaattatttgggcttattttactgcctcttgcatgcttttttatgcttgaatggtttttgcagtgttagaacagtaataattgaagacttgggtggaaaaaaatcagcacctgattgaaaatgaaaggtttcaacaaaagctcttgataatgttaccnccaggtgtaccatcatgccaccattattggtgctaca

SEQ ID NO: 1620 - DNA, 353 bp, HOMO SAPIENS
  misc_feature (326)..(326): n is a, c, g, or t
aggtagctgattagagcagtgcctctcaagtcgcctgggggcttcctagaatcacaggcaagcagtcccacacctgggcactctgatgcgacaaataagtaaggcatggtccacagccacaaggagcttatagtccaggatataaataactcatgagaaatgaaaaatgcaatcaaaaagaggcataaagtgcatgaaaattaagagaggggcaaaattaattctgatgcagagtggggctggagcaggggagagagggaattagggaaagtgtcagtgaaggaggtggtatatgaaataagtctcatggtatgggtaggatttgnatgtgcaatggtgggtagggtgtgcag

SEQ ID NO: 1621 - DNA, 518 bp, HOMO SAPIENS
aagaattctatgtctaatctccagaacctgtgaatatgctaccttacctggcaaaaggaactggtagatgtgataaagttatgaagattatcttgggttatctacatggacctaatgtaatcacaagaatccttatgaaggagacaaaaaggtcaaaggcagaagaaggaaatgcgacaaagaaagcagaggttggaatgatatactttgcagatggaggaaggggctgtgagtcaggaaatacaggctgcctctagaagcttcaaagacaagaaaatgaatactcccctgcagcctccagaagtacagccctgctgacacctttattttagccatataaggcacattttggtattctgactcccagaactgtaagataataaacttgtattgttttaaacacccagtctgtgagtttgttacagcagcagtaggaaactaatatacatgacaatagttcccaaattaatctacaaattcaacacaatcccttgcaaagtcccagctggcttttttac

SEQ ID NO: 1622 - DNA, 449 bp, HOMO SAPIENS
acagtcagttcaaagcaccatttattgatggtttactgtatgccagacactgtattttttctttacgtattaccctacttaatcctcaacacaattttatgaagtagttattgttagcctgaaactggcatttctccatccttttatggtgctgtctttgaaaagtctcagatgtgtaacatgtcctagaagtagataattatcaaaggaagactgcaactgtaactcacttccctctgagaaaaaatatccctgactagattacatatctagttccagaccagaacctggtggtattaaaagtgttttggttgactattgtataccataatgagtacctacattcccaaattgcctgcctggttgttgtacagacttaaaaatctagcctgccttgatttttacttttcagatacacatgtttaaagagatctttgctggtcacagta

SEQ ID NO: 1623 - DNA, 439 bp, HOMO SAPIENS
  misc_feature (33)..(33): n is a, c, g, or t
  misc_feature (46)..(46): n is a, c, g, or t
  misc_feature (66)..(66): n is a, c, g, or t
  misc_feature (214)..(214): n is a, c, g, or t
gtcagaacccataacaacaggccagagctctantacattttgtctntattagaaggttttggctantttttttttctatcagcaatttgtacctcaaaagacctcataccatacctgtaatatttaagaagataaattttttgccgcactcttagtttttttgcccgactccagttgcaggtagctactctggaaagtctatataaaatactcnttttcttcttagccaaatacttctccttttggatcacaaatgcattgataattttcgtcttagtccccttaatggtagtaggtgtgcctctctcccatgaacggatatcgctttatcagtgttaaagtctaaatgttaacagaaaaaatgaggaagattttattgccactactgtgaggtttgggttacctacctaacaagtgtagctgaacttccttagtatca

SEQ ID NO: 1624 - DNA, 5349 bp, HOMO SAPIENS
tgaccaagaggaacagaacacagagcagcctggcagtgtccaagcaacaagcctccgctcctccttcctgcaccctggggctcctgaaactcacatgagaaggagggctgtctgagattcgagggaaacaagctctcaggacttccggtcgccatgatggctgtgggcggtaaacgcggttagtgcaagcatctgggccatcttcaatggtaaaaaagatacagtaaagacataaataccacatttgacaaatggaaaaaaaggagtgtccagaaaagagtagcagcagtgaggaagagctgccgagacgggtatacagggagctaccctgtgtttctgagaccctttgtgacatctcacattttttccaagaagatgatgagacagaggcagagccattattgttccgtgctgttcctgagtgtcaactatctgggggggacattcccagtgtatcagaagagcaggaatcttcagagggacaagattcaggagacatttgctcagaagagaatcaaatagtttcctcttatgcttctaaagtctgttttgagatcgaagaagattataaaaatcgtcagtttctggggcctgaaggaaatgtggatgttgagttgattgataagagcacaaacagatacagcgtttggttccccactgctggctggtatctgtggtcagccacaggcctcggcttcctggtaagggatgaggtcacagtgacgattgcgtttggttcctggagtcagcacctggccctggacctgcagcaccatgaacagtggctggtgggcggccccttgtttgatgtcactgcagagccagaggaggctgtcgccgaaatccacctcccccacttcatctccctccaagcaggtgaggtggacgtctcctggtttctcgttgcccattttaagaatgaagggatggtcctggagcatccagcccgggtggagcctttctatgctgtcctggaaagccccagcttctctctgatgggcatcctgctgcggatcgccagtgggactcgcctctccatccccatcacttccaacacattgatctattatcacccccaccccgaagatattaagttccacttgtaccttgtccccagcgacgccttgctaacaaaggcgatagatgatgaggaagatcgcttccatggtgtgcgcctgcagacttcgcccccaatggaacccctgaactttggttccagttatattgtgtctaattctgctaacctgaaagtaatgcccaaggagttgaaattgtcctacaggagccctggagaaattcagcacttctcaaaattctatgctgggcagatgaaggaacccattcaacttgagattactgaaaaaagacatgggactttggtgtgggatactgaggtgaagccagtggatctccagcttgtagctgcatcagcccctcctcctttctcaggtgcagcctttgtgaaggagaaccaccggcaactccaagccaggatgggggacctgaaaggggtgctcgatgatctccaagacaatgaggttcttactgagaatgagaaggagctggtggagcaggaaaagacacggcagagcaagaatgaggccttgctgagcatggtggagaagaaaggggacctggccctggacgtgctcttcagaagcattagtgaaagggacccttacctcgtgtcctatcttagacagcagaatttgtaaaatgagtcagttaggtagtctggaagagagaatccagcgttctcattggaaatggataaacagaaatgtgatcattgatttcagtgttcaagacagaagaagactgggtaacatctatcacacaggctttcaggacagacttgtaacctggcatgtacctattgactgtatcctcatgcattttcctcaagaatgtctgaagaaggtagtaatattccttttaaattttttccaaccattgcttgatatatcactattttatccattgacatgattcttgaagacccaggataaaggacatccggataggtgtgtttatgaaggatggggcctggaaaggcaacttttcctgattaatgtgaaaaataattcctatggacactccgtttgaagtatcaccttctcataactaaaagcagaaaagctaacaaaagcttctcagctgaggacactcaaggcatacatgatgacagtcttttttttttttgtatgttaggactttaacactttatctatggctactgttattagaacaatgtaaatgtatttgctgaaagagagcacaaaaatgggagaaaatgcaaacatgagcagaaaatattttcccactggtgtgtagcctgctacaaggagttgttgggttaaatgttcatggtcaactccaaggaatactgagatgaaatgtggtaaatcaactccacagaaccaccaaaaagaaaatgagggtaattcagcttattctgagacagacattcctggcaatgtaccatacaaaaaataagccaactctgacatttggattctaccatagactctgtcattttgtagccatttcagctgtcttttgattaatgttttcgtggcacacatatttccatccttttatgtttaatctgtttaaaacaagttcctagtagacaccatctggttgagtcagttttttttatggtgtattttgaacccattctgatagtctcttttaactggaagatttcaattacttacgttaatgtaattattaatatgttaggatttatcctcagtcagccagtttgttatgtcttttctattctactgttatcacatttgtaccacttaaagtggaatctaggcactttatcaccatttagatcctattaccttttctcatctaggatatagttatcttctacataatctttctgtatcttaaaacccatcaataaattattatatattttctacttttaatcactcagaagatttaaaaaactcatgagaagagtaatctgttatgtttttccagatatttaccatttctgttgctcttccttcattattttccaaatttcgttctgcaaatttccacttcctctgatagacgttttttagttcttttagagtggttctgataggtacagattctcttattttttgcttcctctgaggacatctttttctcaccttcattctcagtgatgttttttgcttgtagtatttttagttgacattgttttctgttcagcagtttccttttagcttccgtatttcctgatgagaaatctgcagtcattcaaattgttgtttccctgtatgtagtgtgtcatttttctgtcagatttcaaggtatttatctttagtttttagccatttcattatgttggggatgagtttccttgttttattccctttggaatttgctccaattcataaatttgcagttttatgtcttttaccaaacttagaggttttcagcctaatttctaaaaatactttttattagcctgattttcatctttataggaaatagtttaagtgatgacaagttccaatagcttatatgcccagaaggccttcaaaataagaattttgaaagaatacagaaaacaaacttttatatccttctcatgtcttctactgtaaaattcatatgctttgctactctaaacctagtttgaaatcaacagtcttgagaatagatgaaaattttgatgaatagtggaattcttttaaatggaaacctcttacatgtgattttccttgccatctagaaataaaccatagtatttatgttgaatcaatcaatattatattttgtttttttcctcctcttctgagactcttattgtggaaatgttagacttttatgttttcctaaatgtccctgatattctacttatttagaacatcttttcattttttccattattctgattgggtaattttaatttgtctattttcaaatttgctggagtgttcacctgttgttatctgtgtcgtcccactgagtgcattcaccaccttttaaattttggtcactgtatgtatcagttctaaaatttccattttgttctctatattttaaatttcttgccttatattctattttcctgcaaatgtgtcagcatttgcttgtttgagctttttttttttcaagacagggtctcaactctgttacccaggctggagtgcagtggtgcgatctcagctcactgcaacctctgcctcctggttcaagcgattattgtgcctcagcctccagagtagctgggattacaggcatgcaccaccacagcccagctaattttttgtatttttagtagagacagagttttgctatgttggccaggctggttttgaactcctggcctcaagtgatccacccacctcagcctcccaaagtgctgggattacaggccactacacctggcacatttgagtatttttttttttttttttttttttttgagatggagtctcgctctgtcatctaggctggagtgcagtggtgtgatctcagctcactgcagcctctgtctcccgggctcaagcgattctcttgcctcagcctcctgagtagctaggactacaggtgcatgccaacacgcccggctaatttttttttaaaaatatttttagtagagacagggtttcaccattttggccaggatggtcttgatctcctgacctcatgatccacccgcctcggccttccaaagtgctgggattacaggcatgagccaccgtgcctggcctcatttgagtatttttataatgtctcttttaaagtctttgtcagataatttcactgtacatgttattcagtgtttggtgtccactgagttgtcatttgccagacaagtggagatttttgcagctcatccttgtattctcagtagttccgatatgtaccctcgaaatgtgaatgttatcttatgagactctgttttatttgtatccaacagaagatgtttattatttatttggctttctgtgaactgaggtcttaatatcagctcattttaaaagtctttgcagtggtattcggatctatcctgtgtgtgcctatgagattgggtgcagtgtatcctgttagctccattctcagggcgtttgaatgtgaattaggaccagcgcaatgaatgctcaagttggggttgggcgttagaattcataaaagtctttatatgctcagattctgcagctccatcctcttcatgattgtgatcgtaaggacagtggaattttgcagttgtctataccttatcttgaagtagaactaaattgttacatttgaagaatgtacttcataaatttacaaaaataaaaaaataggttaatgttattaaaacaaaaaggcacacaaaaaaaaaaa

SEQ ID NO: 1625 - DNA, 3182 bp, HOMO SAPIENS
ggcaggcgagccggacgccgctcgcagcaccggagagggcgcactgcaaaggcgggcagcagaccgtggagagcccgggagcggagctggacaccgcctcggagggaagaaatgaggtagcggcggttcccggacccggccatgcccgtcccctgttctcggagcccagcgccgtctcggccaggccagcccggacactgagcgggccgagcgcgagtccccggcgtccggcggagcgaagatgcagtgagtccccgcgggactgctgcgcggggcccgccgcggccagccggacccagcatccgaccgcactttgggcgagctgctgacttgagaccagcccaaacggggggctttccatctccagcacccctcggaggtggggagcaccggcccctaggcacactcgctgtagagtttccgcgggttttggccccagtcctgagggttgtgtgtgttaggggacccacctcacgttcgccgaggagttcctgcatattcttgcaccatcccgggtgctgttgctggggctctctttatttgcacgcgcgcttctagcttttttcctgacattttccactctacgctcgttctttctcccttgcattttgttgcttgcctgagactctttgctctcgcccttgcccaggctggggtaattctgtgtgcgcgcgtgtctcccccgcaccaaccttttttgcacactcgaagctgaatattttcttttttagagaatttacccgcacctcctgcggggttcctaagcactctctctgctcccctccccccaactccctaccacagggccgctcccagtagttttattcttcgatcttgcccgggccgagcctggcaggggccggtggctcagcgggcctcgcacccggcgctccgccgccgccgccgcccagctgcgccggggcgccctccggagatgctgccgtggaagaagcacaagttcgagctgctggccgaggcgccgccgcggcaggcgtccaagcccaagggctacgctgtgagcctgcactactcggcgctcagctcgctggcgcgggcgtgccccgaaggcgcgcttagccgggtgggcagcatgttccgctccaagcgcaagaagctgcacatcactagcgaggacccaacttacaccgtgctctacctgggcaatgccaccaccatccaggcgcgcggcgacggctgcaccgaccttgctgtgggcaagatctggagcaagagcgaggcgggccgtcagggcaccaagatgaagctgacggtgagtgcgcagggtatccgcatggtgcacgccgaggagcgcgcgctgcgccgcccgggccacctctacctgctgcaccgcgtcacctactgcgtggccgacgcgcggctgcccaaggtcttcgcctgggtgtaccggcacgagctgaagcacaaggccgtgatgctgcgctgccacgccgtgctggtgtccaagcccgaaaaggcgcaggccatggccctgctgctctaccagacgtcggccaacgcgctggcggaatttaaacgcctcaagcggcgggacgacgcgcgtcaccagcagcaggagctggtgggcgcacacaccatcccgctagtgccgctgcgcaagctgctcctacacggaccctgctgctataaaccgccggtggagcgcagccgcagcgcgcccaagcttggctccatcaccgaggacctgctcggcgaacagctggagcaggagctgcaggaggaagaggaagaggagcaacccgagggctgcccggaggaggaggagaaccgtgcggcagagggagatccagcagaggaggaggccgaggcgcagcgtgcgctagtggtcgccatgcactttgagtgcggggacttgttggatactctggagaatggccgtggggaggcgctaggaggcggcgggggctccctgggcccgggggccgggccgccgcctctgctgctgggcagcgcctccgacatgaaggctgagctgtcgcaacttattagcgacctgggcgagctcagcttcggcaacgacgtgcgcaccctgcaggccgacttgcgggtgacgcgcctgctgtcaggcgacagcacgggcagcgagagctccatcgagggcgggggccctgacgccacctccgccaccgccggggactcgtcccgccaggccgacggcgccagtgcagacgagccccactcgggctgagctcctccgcgcgtcgccggcgctccaccgtggctacccatccgtggtcccgacaacctccctgtcccttgcccgcccccaggaagggggaaatggggcatttggggcccagacctacacttggagcccaggtccagcgttcccccgaccgctttcccctacctcccggcccccgctcccgccccagcacttttggctctgttgcgcgtggggatgcggggagatttgagaggggaaaaccccgccaggagggagagagaggcacccctctgggatgcgggtgagggaaggttggctgaagttcctagtctcaggccgtaggtgcctggccagtttcctgtttgtggggcagctggggcctgaggaggaggggttcacttcctcctcccaccccctgggagcggccctgcgctgtcactgacatctcattaaaaaaaaaaaaaaatttgctctcaaggtgtttgaggctttaatgcaaccctttagcccttggttctttttggtgcaagaattctggctgtttacctcagactcagacccctgaaatgttgccaaattcttcaaataactgtttggggggtggggggagatgaaagagagtcgcgttttgtttacagttaaagacatccaatatcttaaaaaggagttttcctttagaaacacacacacccttcctcttgctcaaaagatctcactccatgatactgtgtaaaatatttttgcactgttgtgaagtatttttgacttttttctgtacataactgtgttctcagagctgaatgtttatatcttttgctgtgcaaaagaaacatgtaaaatgttgttcagttgtatatacagaaatgtgtataaaacattttgttattttttaaaagtagcactgttctggttctgtttgcacgccagtggggagagaataaagaggaaaatttaacagaaaaaaaaaaaaaaaaaaaaaaaaaaaaaaaaaaaaaaa

SEQ ID NO: 1626 - DNA, 5565 bp, HOMO SAPIENS; identical to SEQ ID NO: 1249

SEQ ID NO: 1627 - DNA, 5480 bp, HOMO SAPIENS
tatatccgtggtttcctgctacctccaaccatgggccttttgggaatactttgttttttaatcttcctggggaaaacctggggacaggagcaaacatatgtcatttcagcaccaaaaatattccgtgttggagcatctgaaaatattgtgattcaagtttatggatacactgaagcatttgatgcaacaatctctattaaaagttatcctgataaaaaatttagttactcctcaggccatgttcatttatcctcagagaataaattccaaaactctgcaatcttaacaatacaaccaaaacaattgcctggaggacaaaacccagtttcttatgtgtatttggaagttgtatcaaagcatttttcaaaatcaaaaagaatgccaataacctatgacaatggatttctcttcattcatacagacaaacctgtttatactccagaccagtcagtaaaagttagagtttattcgttgaatgacgacttgaagccagccaaaagagaaactgtcttaactttcatagatcctgaaggatcagaagttgacatggtagaagaaattgatcatattggaattatctcttttcctgacttcaagattccgtctaatcctagatatggtatgtggacgatcaaggctaaatataaagaggacttttcaacaactggaaccgcatattttgaagttaaagaatatgtcttgccacatttttctgtctcaatcgagccagaatataatttcattggttacaagaactttaagaattttgaaattactataaaagcaagatatttttataataaagtagtcactgaggctgacgtttatatcacatttggaataagagaagacttaaaagatgatcaaaaagaaatgatgcaaacagcaatgcaaaacacaatgttgataaatggaattgctcaagtcacatttgattctgaaacagcagtcaaagaactgtcatactacagtttagaagatttaaacaacaagtacctttatattgctgtaacagtcatagagtctacaggtggattttctgaagaggcagaaatacctggcatcaaatatgtcctctctccctacaaactgaatttggttgctactcctcttttcctgaagcctgggattccatatcccatcaaggtgcaggttaaagattcgcttgaccagttggtaggaggagtcccagtaacactgaatgcacaaacaattgatgtaaaccaagagacatctgacttggatccaagcaaaagtgtaacacgtgttgatgatggagtagcttcctttgtgcttaatctcccatctggagtgacggtgctggagtttaatgtcaaaactgatgctccagatcttccagaagaaaatcaggccagggaaggttaccgagcaatagcatactcatctctcagccaaagttacctttatattgattggactgataaccataaggctttgctagtgggagaacatctgaatattattgttacccccaaaagcccatatattgacaaaataactcactataattacttgattttatccaagggcaaaattatccactttggcacgagggagaaattttcagatgcatcttatcaaagtataaacattccagtaacacagaacatggttccttcatcccgacttctggtctattacatcgtcacaggagaacagacagcagaattagtgtctgattcagtctggttaaatattgaagaaaaatgtggcaaccagctccaggttcatctgtctcctgatgcagatgcatattctccaggccaaactgtgtctcttaatatggcaactggaatggattcctgggtggcattagcagcagtggacagtgctgtgtatggagtccaaagaggagccaaaaagcccttggaaagagtatttcaattcttagagaagagtgatctgggctgtggggcaggtggtggcctcaacaatgccaatgtgttccacctagctggacttaccttcctcactaatgcaaatgcagatgactcccaagaaaatgatgaaccttgtaaagaaattctcaggccaagaagaacgctgcaaaagaagatagaagaaatagctgctaaatataaacattcagtagtgaagaaatgttgttacgatggagcctgcgttaataatgatgaaacctgtgagcagcgagctgcacggattagtttagggccaagatgcatcaaagctttcactgaatgttgtgtcgtcgcaagccagctccgtgctaatatctctcataaagacatgcaattgggaaggctacacatgaagaccctgttaccagtaagcaagccagaaattcggagttattttccagaaagctggttgtgggaagttcatcttgttcccagaagaaaacagttgcagtttgccctacctgattctctaaccacctgggaaattcaaggcgttggcatttcaaacactggtatatgtgttgctgatactgtcaaggcaaaggtgttcaaagatgtcttcctggaaatgaatataccatattctgttgtacgaggagaacagatccaattgaaaggaactgtttacaactataggacttctgggatgcagttctgtgttaaaatgtctgctgtggagggaatctgcacttcggaaagcccagtcattgatcatcagggcacaaagtcctccaaatgtgtgcgccagaaagtagagggctcctccagtcacttggtgacattcactgtgcttcctctggaaattggccttcacaacatcaatttttcactggagacttggtttggaaaagaaatcttagtaaaaacattacgagtggtgccagaaggtgtcaaaagggaaagctattctggtgttactttggatcctaggggtatttatggtaccattagcagacgaaaggagttcccatacaggatacccttagatttggtccccaaaacagaaatcaaaaggattttgagtgtaaaaggactgcttgtaggtgagatcttgtctgcagttctaagtcaggaaggcatcaatatcctaacccacctccccaaagggagtgcagaggcggagctgatgagcgttgtcccagtattctatgtttttcactacctggaaacaggaaatcattggaacatttttcattctgacccattaattgaaaagcagaaactgaagaaaaaattaaaagaagggatgttgagcattatgtcctacagaaatgctgactactcttacagtgtgtggaagggtggaagtgctagcacttggttaacagcttttgctttaagagtacttggacaagtaaataaatacgtagagcagaaccaaaattcaatttgtaattctttattgtggctagttgagaattatcaattagataatggatctttcaaggaaaattcacagtatcaaccaataaaattacagggtaccttgcctgttgaagcccgagagaacagcttatatcttacagcctttactgtgattggaattagaaaggctttcgatatatgccccctggtgaaaatcgacacagctctaattaaagctgacaactttctgcttgaaaatacactgccagcccagagcacctttacattggccatttctgcgtatgctctttccctgggagataaaactcacccacagtttcgttcaattgtttcagctttgaagagagaagctttggttaaaggtaatccacccatttatcgtttttggaaagacaatcttcagcataaagacagctctgtacctaacactggtacggcacgtatggtagaaacaactgcctatgctttactcaccagtctgaacttgaaagatataaattatgttaacccagtcatcaaatggctatcagaagagcagaggtatggaggtggcttttattcaacccaggacacaatcaatgccattgagggcctgacggaatattcactcctggttaaacaactccgcttgagtatggacatcgatgtttcttacaagcataaaggtgccttacataattataaaatgacagacaagaatttccttgggaggccagtagaggtgcttctcaatgatgacctcattgtcagtacaggatttggcagtggcttggctacagtacatgtaacaactgtagttcacaaaaccagtacctctgaggaagtttgcagcttttatttgaaaatcgatactcaggatattgaagcatcccactacagaggctacggaaactctgattacaaacgcatagtagcatgtgccagctacaagcccagcagggaagaatcatcatctggatcctctcatgcggtgatggacatctccttgcctactggaatcagtgcaaatgaagaagacttaaaagcccttgtggaaggggtggatcaactattcactgattaccaaatcaaagatggacatgttattctgcaactgaattcgattccctccagtgatttcctttgtgtacgattccggatatttgaactctttgaagttgggtttctcagtcctgccactttcacagtgtacgaataccacagaccagataaacagtgtaccatgttttatagcacttccaatatcaaaattcagaaagtctgtgaaggagccgcgtgcaagtgtgtagaagctgattgtgggcaaatgcaggaagaattggatctgacaatctctgcagagacaagaaaacaaacagcatgtaaaccagagattgcatatgcttataaagttagcatcacatccatcactgtagaaaatgtttttgtcaagtacaaggcaacccttctggatatctacaaaactggggaagctgttgctgagaaagactctgagattaccttcattaaaaaggtaacctgtactaacgctgagctggtaaaaggaagacagtacttaattatgggtaaagaagccctccagataaaatacaatttcagtttcaggtacatctaccctttagattccttgacctggattgaatactggcctagagacacaacatgttcatcgtgtcaagcatttttagctaatttagatgaatttgccgaagatatctttttaaatggatgctaaaattcctgaagttcagctgcatacagtttgcacttatggactcctgttgttgaagttcgtttttttgttttcttctttttttaaacattcatagctggtcttatttgtaaagctcactttacttagaattagtggcacttgcttttattagagaatgatttcaaatgctgtaactttctgaaataacatggccttggagggcatgaagacagatactcctccaaggttattggacaccggaaacaataaattggaacacctcctcaaacctaccactcaggaatgtttgctggggccgaaagaacagtccattgaaagggagtattacaaaaacatggcctttgcttgaaagaaaataccaaggaacaggaaactgatcattaaagcctgagtttgctttcaaaaaaaaaaaaaaaaaa

SEQ ID NO: 1628 - DNA, 6039 bp, HOMO SAPIENS
tctcgcaggcagggctgggccgggcaggagctgcgaggccggcacaagggaggcggccctggggacctgacagggcgggggcgggggcgggcacgccgccgcctgcgcggttccgggtgctcccggcgcggcgctgcccagggcacacttgaccgaggtcgggctgcggggaaaggcgggtctggggagaaccccgagagacgcggcgtcctccaactcctcctccttctcctcgcggccgccgaagccacagcccgagcccgagcccgagcccgagccggcgccaccgcgcccccggccatggcttttgccaatttccgccgcatcctgcgcctgtctaccttcgagaagagaaagtcccgcgaatatgagcacgtccgccgcgacctggaccccaacgaggtgtgggagatcgtgggcgagctgggcgacggcgccttcggcaaggtttacaaggccaagaataaggagacgggtgctttggctgcggccaaagtcattgaaaccaagagtgaggaggagctggaggactacatcgtggagattgagatcctggccacctgcgaccacccctacattgtgaagctcctgggagcctactatcacgacgggaagctgtggatcatgattgagttctgtccagggggagccgtggacgccatcatgctggagctggacagaggcctcacggagccccagatacaggtggtttgccgccagatgctagaagccctcaacttcctgcacagcaagaggatcatccaccgagatctgaaagctggcaacgtgctgatgaccctcgagggagacatcaggctggctgactttggtgtgtctgccaagaatctgaagactctacagaaacgagattccttcatcggcacgccttactggatggcccccgaggtggtcatgtgtgagaccatgaaagacacgccctacgactacaaagccgacatctggtccctgggcatcacgctgattgagatggcccagatcgagccgccacaccacgagctcaaccccatgcgggtcctgctaaagatcgccaagtcggaccctcccacgctgctcacgccctctaagtggtctgtagagttccgtgacttcctgaagatagccctggataagaacccagaaacccgacccagtgccgcgcagctgctggagcatcccttcgtcagcagcatcaccagtaacaaggctctgcgggagctggtggctgaggccaaggccgaggtgatggaagagatcgaagacggccgggatgagggggaagaggaggacgccgtggatgccgcctccaccctggagaaccatactcagaactcctctgaggtgagtccgccaagcctcaatgctgacaagcctctcgaggagtcaccttccaccccgctggcacccagccagtctcaggacagtgtgaatgagccctgcagccagccctctggggacagatccctccaaaccaccagtcccccagtcgtggcccctggaaatgagaacggcctggcagtgcctgtgcccctgcggaagtcccgacccgtgtcaatggatgccagaattcaggtagcccaggagaagcaagttgctgagcagggtggggacctcagcccagcagccaacagatctcaaaaggccagccagagccggcccaacagcagcgccctggagaccttgggtggggagaagctggccaatggcagcctggagccacctgcccaggcagctccagggccttccaagagggactcggactgcagcagcctctgcacctctgagagcatggactatggtaccaatctctccactgacctgtcgctgaacaaagagatgggctctctgtccatcaaggacccgaaactgtacaaaaaaaccctcaagcggacacgcaaatttgtggtggatggtgtggaggtgagcatcaccacctccaagatcatcagcgaagatgagaagaaggatgaggagatgagatttctcaggcgccaggaactccgagagcttcggctgctccagaaagaagagcatcggaaccagacccagctgagtaacaagcatgagctgcagctggagcaaatgcataaacgttttgaacaggaaatcaacgccaagaagaagttctttgacacggaattagagaacctggagcgtcagcaaaagcagcaagtggagaagatggagcaagaccatgccgtgcgccgccgggaggaggccaggcggatccgcctggagcaggatcgggactacaccaggttccaagagcagctcaaactgatgaagaaagaggtgaagaacgaggtggagaagctcccccgacagcagcggaaggaaagcatgaagcagaagatggaggagcacacgcagaaaaagcagcttcttgaccgggactttgtagccaagcagaaggaggacctggagctggccatgaagaggctcaccaccgacaacaggcgggagatctgtgacaaggagcgcgagtgcctcatgaagaagcaggagctccttcgagaccgggaagcagccctgtgggagatggaagagcaccagctgcaggagaggcaccagctggtgaagcagcagctcaaagaccagtacttcctccagcggcacgagctgctgcgcaagcatgagaaggagcgggagcagatgcagcgctacaaccagcgcatgatagagcagctgaaggtgcggcagcaacaggaaaaggcgcggctgcccaagatccagaggagtgagggcaagacgcgcatggccatgtacaagaagagcctccacatcaacggcgggggcagcgcagctgagcagcgtgagaagatcaagcagttctcccagcaggaggagaagaggcagaagtcggagcggctgcagcaacagcagaaacacgagaaccagatgcgggacatgctggcgcagtgtgagagcaacatgagcgagctgcagcagctgcagaatgaaaagtgccacctcctggtagagcacgaaacccagaaactgaaggccctggatgagagccataaccagaacctgaaggaatggcgggacaagcttcggccgcgcaagaaggctctggaagaggatctgaaccagaagaagcgggagcaggagatgttcttcaagctgagcgaggaggcggagtgcccaaacccctccaccccaagcaaggccgccaagttcttcccctacagttctgcggatgcttcttaacaaccgcccggggctgtggctggcagcttggtgggccccagggccttctccttcattctctgtgaacatgtaactcaggaccccttttccctcttgcgtctgtgccagctcaaatccagcccctcgccctgtgccaccccaactgtgcctgatagacctgccccagcgttcctgacttcttgctggcctgtggagggtgaggtgtaattatttgtcacctgaacctaatgtatattctccttgagccccagatcccttcaagctggaagggatggggctgttggtggggtcagggtccaagaggaatgggtgttctgtggcctcgagtcctctcctgtttgcgaaaataccagttttgctctctgtgggacaaagcactgctgatgaagtccccgtgggctcatccgggctggaattcttggtttttcagccattccctgcagagtcactcaatcatcaagtccctcacagccatttctgttcccagaggagccaggcctgcagctggctgctcaggagatggcctcattcctcctgttctcccagtttgctttccacttaagacaaagccttgtctatgtggggggcggggaccggggaaagagggaggctgaaatgtttattctgcttctcccgtgtttcatgccatctcgcgtcccccttcctgcacatgggtgtgaatgcacacacatacgcgtacacacaggacttggtctgctggcctggcctcttctgcccaggtgggttggaacacgtttgctgcctgagcctgtgccactgagcatgttaggtggagcagttggtgtggcacgtgcggggtgttggcaccggaggcatggaaaagcacaggctgtactgccaggctgcgatgcgtgctggcccccgcacaggctcctgtgtgcagggactgattcctcagcacacgaggcttccacaacccagtctgctccatagcactctggcccaccctgtctgcaggtgaaacaggagggctgtttgcctctgccccatccccccgactgtgttcaggagtcccaccttgcatttcagacctgggctggcagtctgttggacttctcttcaggaagaaaaagcatcagggggaaatggaatgcccctgccccaggaacatggcagaagcacaggttctgtacctcagatggactcctgctgggccttcggggtctcagttggcttcccccagattctgattctacagctgcagaatgtatataacgcaataaaagcaaatgtttgaaccagtatgcgggtttacttacaaggaaaccttttttcaccctgatttctaattattttattgaaacaactataaaatgtatggtttctccaggaagatatctgctttttaaaacaacaaacaagaacaacaacacaaaactggtaatgatttggagtaatcatgcgggcatattgagtctgggtagtgtttcgctggtggtagagtggttgagacttcctgggaggactttttccgccttcactcctacagatttaagattctttatttttaggccgggcatggtgactcacctgaggtgaggagttcgagactagcctggccaacatggcaaaaccctgtctctactaaaagtacaaaaattagccaggcgtggtggtgcatgcctataatcccagctactcgggaggctgaggcaggagaatcgcttgaacccaggaggcagaggttgcagtaagccaaggtcacaccactgcactccagcctaggtgacagggcgagactctgtctctcaaaaaaaaaaaaaaaaaaaattctttgagacagggtctctaatatgttgcccaagctgatctcaaactcgtggctcaactgattctcccgcttcaaccttgagtagctgggacgacagatacatgctactgcacccagctaggttaaggttctgtatactctgtctttctaaagcaattccctggaaattttctcaacattggttataactgaatgcttgggaagggaggggcagcccttcaacaggaaaaggggactgcccaaatcttaaatgcacagtcaagattctcttggagctagcaatggttctcaggttagtgagcatttagcttgcctgctgcagaatttgacccagatgggggtgttttttaggtctctcacaaatgagacaagcgaaacaattgtctccttttattctctttggtgcattggtgctggggaaacatgaactagcggcagtgtaactgcagaacatagacccagttctaccaggccaggccagcgttgggaaccaccagacagggctgctttgggctttgcttacagtatttccatgtgtagcctggcgtgtgagaaagtattaggtgaaatgccagtttcatggttcaggtgaaagtctgtgatcattcccctcgtggctcgtccttcacatcacttttgcccttcaaggagttgccgcgtccccgctcagtgccgcctgagccctcagagctcccctgtgcttttctggatggggactggcggggtcacctagcctcaccgtggagccaccgtgcaatgcccatctctgagaggcccacgcggtattcctcgtgccctgtgttagtgctttctgtataagggacagacagaactgggtttttttcctctgtctggttttagagtaaatgtaactaacttttattttccctttatgaaagatagaaattatttttatgtagtttccagactttatacaaaatttttgtaaaatgttctctggaaagttaactacaagaatgtaaatatgcttctaataaaataacaaggttatttgccgttaaaaaaaaaaaaaaaaaaaa

SEQ ID NO: 1629 - DNA, 4576 bp, HOMO SAPIENS; identical to SEQ ID NO: 1317

SEQ ID NO: 1630 - DNA, 3932 bp, HOMO SAPIENS; identical to SEQ ID NO: 313

SEQ ID NO: 1631 - DNA, 3121 bp, HOMO SAPIENS
taggactgatctccaggaccagcactcttctcccagcccttagggtcctgctcggccaaggccttccctgccatgcgacctgtcagtgtctggcagtggagcccctgggggctgctgctgtgcctgctgtgcagttcgtgcttggggtctccgtccccttccacgggccctgagaagaaggccgggagccaggggcttcggttccggctggctggcttccccaggaagccctacgagggccgcgtggagatacagcgagctggtgaatggggcaccatctgcgatgatgacttcacgctgcaggctgcccacatcctctgccgggagctgggcttcacagaggccacaggctggacccacagtgccaaatatggccctggaacaggccgcatctggctggacaacttgagctgcagtgggaccgagcagagtgtgactgaatgtgcctcccggggctgggggaacagtgactgtacgcacgatgaggatgctggggtcatctgcaaagaccagcgcctccctggcttctcggactccaatgtcattgaggtagagcatcacctgcaagtggaggaggtgcgaattcgacccgccgttgggtggggcagacgacccctgcccgtgacggaggggctggtggaagtcaggcttcctgacggctggtcgcaagtgtgcgacaaaggctggagcgcccacaacagccacgtggtctgcgggatgctgggcttccccagcgaaaagagggtcaacgcggccttctacaggctgctagcccaacggcagcaacactcctttggtctgcatggggtggcgtgcgtgggcacggaggcccacctctccctctgttccctggagttctatcgtgccaatgacaccgccaggtgccctggggggggccctgcagtggtgagctgtgtgccaggccctgtctacgcggcatccagtggccagaagaagcaacaacagtcgaagcctcagggggaggcccgtgtccgtctaaagggcggcgcccaccctggagagggccgggtagaagtcctgaaggccagcacatggggcacagtctgtgaccgcaagtgggacctgcatgcagccagcgtggtgtgtcgggagctgggcttcgggagtgctcgagaagctctgagtggcgctcgcatggggcagggcatgggtgctatccacctgagtgaagttcgctgctctggacaggagctctccctctggaagtgcccccacaagaacatcacagctgaggattgttcacatagccaggatgccggggtccggtgcaacctaccttacactggggcagagaccaggatccgactcagtgggggccgcagccaacatgaggggcgagtcgaggtgcaaatagggggacctgggccccttcgctggggcctcatctgtggggatgactgggggaccctggaggccatggtggcctgtaggcaactgggtctgggctacgccaaccacggcctgcaggagacctggtactgggactctgggaatataacagaggtggtgatgagtggagtgcgctgcacagggactgagctgtccctggatcagtgtgcccatcatggcacccacatcacctgcaagaggacagggacccgcttcactgctggagtcatctgttctgagactgcatcagatctgttgctgcactcagcactggtgcaggagaccgcctacatcgaagaccggcccctgcatatgttgtactgtgctgcggaagagaactgcctggccagctcagcccgctcagccaactggccctatggtcaccggcgtctgctccgattctcctcccagatccacaacctgggacgagctgacttcaggcccaaggctgggcgccactcctgggtgtggcacgagtgccatgggcattaccacagcatggacatcttcactcactatgatatcctcaccccaaatggcaccaaggtggctgagggccacaaagctagtttctgtctcgaagacactgagtgtcaggaggatgtctccaagcggtatgagtgtgccaactttggagagcaaggcatcactgtgggttgctgggatctctaccggcatgacattgactgtcagtggattgacatcacggatgtgaagccaggaaactacattctccaggttgtcatcaacccaaactttgaagtagcagagagtgactttaccaacaatgcaatgaaatgtaactgcaaatatgatggacatagaatctgggtgcacaactgccacattggtgatgccttcagtgaagaggccaacaggaggtttgaacgctaccctggccagaccagcaaccagattatctaagtgccactgccctctgcaaaccaccactggcccctaatggcaggggtctgaggctgccattacctcaggagcttaccaagaaacccatgtcagcaaccgcactcatcagaccatgcactatggatgtggaactgtcaagcagaagttttcaccctccttcagaggccagctgtcagtatctgtagccaagcatgggaatctttgctcccaggcccagcaccgagcagaacagaccagagcccaccacaccacaaagagcagcacctgactaactgcccacaaaagatggcagcagctcattttctttaataggaggtcaggatggtcagctccagtatctcccctaagtttagggggatacagctttacctctagccttttggtgggggaaaagatccagccctcccacctcattttttactataatatgttgctaggtataattttattttatataaaaagtgtttctgtgattcttcagagcccaggagtcagtgctggtggttggagggacctgcccccactggttcatttaaccctctgtctcggtgccctcagaacctcagccagaaaggcaaggaggaaatcagagcaggagcctcatactcttggtgatctattcattctgtgacctcaggggtcacatataaggtcagtgtttctcgtccccgccggatctgcactgccaactgggattgggttcgaacagcttcataaacatcttcagcattttgtaccatctgctccccaatggccaaaatcacatcaccaggccgcagaccagccc

SEQ ID NO: 1632 - DNA, 479 bp, HOMO SAPIENS
  misc_feature (49)..(49): n is a, c, g, or t
  misc_feature (71)..(71): n is a, c, g, or t
gccactcagggactttaggtttacaatggggaaaagtaaacttgtgggntgtaagcggtaatgaaaggagngggtcctcgtgtgtaccaaccactcttagatagaaatgagatggaagaggtcccaacagcctggcaaaagcaatacagtatttttaaaatggtgtggccttaagaaacgcagcggttcgggggaggagacttttagaattatctttcaaacacttaagggaggagctgggtggttgggtggagtgacagaaggaaagcttttgtgcggaagaggaaactctggaaaaggcttttctggcttagtgtctagccctggtcggcttagtaaagggcaattagtgttgaaggttgtgcgtccacacctacttagtggctcagtggaaagcacgtcgcattatttaaatcctcttttaaagtaaaataactggaacaacgtttgacggtgttggggggtgctgtacattggct

SEQ ID NO: 1633 - DNA, 1653 bp, HOMO SAPIENS
gcagtgcccatggtggctcggatgggaggaaccaccgcggagccggggacagggggagcagggcagtgctctgctgggtgaggggcacccagctccagaggctaggtgggcgtcgctggtgggtggactcctgggcgctgcgcggagccgcgccggctgggttagcgcgggcggggcgcttagtcccacccccagaggaggcggaagaggagcccgagcctggccgcgggctgggccccgccgcagctccagctggccggcttggtcctgcggtcccttctctgggaggcccgaccccggccgcgcccagcccccaccatgccacccgcggggctccgccgggccgcgccgctcaccgcaatcgctctgttggtgctgggggctcccctggtgctggccggcgaggactgcctgtggtacctggaccggaatggctcctggcatccggggtttaactgcgagttcttcaccttctgctgcgggacctgctaccatcggtactgctgcagggacctgaccttgcttatcaccgagaggcagcagaagcactgcctggccttcagccccaagaccatagcaggcatcgcctcagctgtgatcctctttgttgctgtggttgccaccaccatctgctgcttcctctgttcctgttgctacctgtaccgccggcgccagcagctccagagcccatttgaaggccaggagattccaatgacaggcatcccagtgcagccagtatacccatacccccaggaccccaaagctggccctgcacccccacagcctggcttcatatacccacctagtggtcctgctccccaatatccactctacccagctgggcccccagtctacaaccctgcagctcctcctccctatatgccaccacagccctcttacccgggagcctgaggaaccagccatgtctctgctgccccttcagtgatgccaaccttgggagatgccctcatcctgtacctgcatctggtcctgggggtggcaggagtcctccagccaccaggccccagaccaagccaagccctgggccctactggggacagagccccagggaagtggaacaggagctgaactagaactatgaggggttggggggagggcttggaattatgggctatttttactgggggcaagggagggagatgacagcctgggtcacagtgcctgttttcaaatagtccctctgctcccaagatcccagccaggaaggctggggccctactgtttgtcccctctgggctggggtggggggagggaggaggttccgtcagcagctggcagtagccctcctctctggctgccccactggccacatctctggcctgctagattaaagctgtaaagacataactcatatcagtcgcatcattggacccatccacaccttccaggaacaccgccttcagctgggcccagactgttgcccactccatattccaaaagtaggggagggccagcaccagcatcggagcacagcaccatcctcacccccatccacaagcagaccaaggcggactgttcctggcttcctaaaggcttcctaaagacaatgaggtgaattttgccacagctctgaagagatgctcgtttgcactacagatattccctgctagggatcaacagctctacaacagc

SEQ ID NO: 1634 - DNA, 2383 bp, HOMO SAPIENS
actgcggccactgaagcggcggcggcggctggcccaggaggaagaagtcgagcccaagctatttccggttccggtgtcagttcgaggcgccgccgccgccgccgcagccgccggagccgcaatgcctaaaggaggaagaaagggaggccacaaaggccgggcgaggcagtatacaagccctgaggagatcgacgcgcagctgcaggctgagaagcagaaggccagggaagaagaggagcaaaaagaaggtggagatggggctgcaggtgaccccaaaaaggagaagaaatctctagactcagatgagagtgaggatgaagaagatgactaccagcaaaagcgcaaaggcgttgaagggctcatcgacatcgagaaccccaaccgggtggcacagacaaccaaaaaggtcacacaactggatctggacgggccaaaggagctttcgaggagagaacgagaagagattgagaagcagaaggcaaaagagcgttacatgaaaatgcacttggccgggaagacagagcaagccaaggctgacctggcccggctggccatcatccggaaacagcgggaggaggctgcccggaagaaggaagaggaaaggaaagcaaaagacgatgccacattgtcaggaaaacgaatgcagtcactctccctgaataagtaactgcgacccgtgggaggagatgccggggacctgggccgcgctgccaggacctctgctgtgtctcgcccaccctgtgccctggcgccgctgcaacagcccctcatggccaggagccccccatggcctggggcctcctcttcatcttggcacagaaattgtttgggggatggggggggggactgggggaggggtagctgctatctttgagacagaaagatgcaggacagcatttcatatgtaaccatttgaatgtttttgctgtttttagaattcagagcccttgctggggggtgcctgggagatggggtaagaagagctttcatttgtctggtagatagatagcatgtaagggggtggttgtcccaggaggcagctgctgacaggtttgctacacacagccccggactgtgttgcctgggtgctcattcagagaggggctatcatctgggagcctgtgcccctgggtcctcgagggtcatggcttgtccctggtcagtcctgtctgactgacctcagggcctcacctctctgcccttccctgcccggttcctactcacctggctagggccagtgcccattttcagccctacccattgatcatttcaagaaacctctgtttactgtgtggcacccaggcaaaacatgctccacaaattcaacttgtatatttggcagattaaacttgacattatcgtaatctttgttttggcaatccatcctttggcttccgtgctcgagccgtttttacccagctgggtacggtgccacgttcaggcacgtgcacccggcaaggttcagggcacatacctacctggggcatgacatctgtcaggtggcaccgagcaggatgcggggatggaccctagataccacagcctgccccctcccctcctttagccaagtcaggatcttaggcctcagcaggcagggacccttccaggccacagtaggctgaagcagcaccaggatcctggcctggcctggcctgtaggtgtcccctggtggttataattctgtaactctaggggagaaggggaatagcactagcattggatgtcgccaaggcccacattttcctgagagaagccacaaaagatgtgcaaatgcccttcagcacaggacctggtgacatgacataaactccaagacagaacctcagtttacagcacacgaaaaaaatatcttgccaacattgtaatgacaaaataaattcccgtgaagttccacaaccaggccgggcatggtggctcatgcctgtaatcccagcactttgggaggtgaggtgggtggatcatctgaggtcaggagttcaagaccagcctggccaacatggagaaactccgtctctactaaaaatacaaaaattaaccaggcttggtggtgtatgcctgtaatcccagctacttgggaggctgaggcaggagaatcgcttgatcccaggaaggcagaggtggcagtgagctgagaacgcacaactgcactccagcctgggtgacgagcaaaactccatctcaaaacaaaagttccacaaccagcctggagtgtgtagcccctttgtccaggaatttgactagtcaatcagtgacacctggtactggcagttttgggagtggcagcccaggatggacagcagtggggagggaaccatttggcataaggccgttgggcttcaggatcaattttgttggcaagcagtaaaaataagctatctaccta

SEQ ID NO: 1635 - DNA, 314 bp, HOMO SAPIENS
aggattctgccctgagttgaaaatgaaggacgctgagacaaatgtggagatataaatatgcaccatattagatattattgtggcagtggaatttctctaatgtgatcactgtggttctataggcgaatatcccactttctttggcatgtatctcctaagtacttagcggtaaagtatcattcaggatatctgcaacttcttttcaacacagaaaaaagagaaagcaaatatataacagcaaaatagtaacaattagtgaatctaggtcaaaagtttaagtgttcataatactattctttcaactctgtatttca

SEQ ID NO: 1636 - DNA, 2215 bp, HOMO SAPIENS
agccgtggcagccattttggcctgtcaggtccatccggcgatgctgggtctggacgagctcgggaggagtggttgtggccattgcacacaggcggatctgaggttcggcgacgccgctggtcgcgacccgggacaggacaacgacaggaacaccgccgagcccgcgttccccccccgcccagagtcatggcggcagcagccgctctgagggcgcctgctcagagcagtgtgacctttgaagatgtggctgtaaacttttccctggaggaatggagtcttcttaatgaggctcagagatgcctgtaccgtgacgtgatgctggagaccttgacacttatatcctccctgggttgttggcatggaggggaagatgaggcagcaccttctaagcagagcacgtgtatacatatatacaaagaccagggaggtcatagtggagaaaggccttatgagtgtggggaatataggaaattatttaagaacaagtcctgcctcactgaacccagaagagatcacaaacacaggaatgttcgcactggagaaaggccttatgagtgcagcaaatatgggaaattatttcaccaaaagcctacactccatattcatgagagatttcatactgggcaaaagacctatgagtgcagtgagtgtggaaaatcatttcaccaaagctcttcactcttgcagcgtcagacacttcacactagagaaaggccttatgagtgtattgaatgtgggaaagcctttgctgaaaagtccagtctcattaaccacaggaaagttcactctggagcaaagcgttatgaatgcaatgaatgtgggaagtcctttgcttatacatctagtctcattaaacacaggaggattcacactggagagaggccttatgagtgcagtgaatgtgggagatcctttgctgaaaactccagtcttattaaacacttgagagttcacacaggagaaaggccttatgaatgcgttgagtgtggaaaatcatttcgccgaagctcttcactcttgcagcatcagagagttcacactagagaaaggccttatgaatgtagtgaatgtgggaaatcctttagcttaaggtccaacctcattcaccatcagcgagttcatactggagaaaggcatgagtgcgggcagtgtgggaaatcctttagccgaaaatctagccttattatacatctgagagttcacactggagaaaggccttatgagtgcagtgactgtgggaaatcctttgctgaaaactccagccttattaaacacttgagagttcacactggagaaaggccatatgaatgcattgattgtggaaaatcatttcgccacagttcttcgttccgtcgccatcagagagttcatactggaatgaggccttataagtgaagcaaattttggaaattctcttgcccaggctttttgctccttcaaggccagagagttcacaccagatcaaggtgttatgagtgtgacaaatggggaatattctttagctagaatgctagcttctttacataaaagagtgctcccactgaagaagtgccttttgagtgcaatgaatgtgagaaagccttcagccctctctcattggttaccacaatatttacatgaggaaaataccacagatgtggaggtaatattattttttcttcaatataacactggaggaaaccccttatgaggatgccatctgcctaaattgaatgtcatacatcaaatagctgcatacattccaggtatgtgggaactgcatagtatttttcgacctgcccaggtctcttgctagacttctgtgacttacagttctcttctaaaaagcatttcacctttaccacttggcaggtgcccacagtacatcattcgcctaactcatcatgatccagaagtaactttgattttgtttcattcaacagagggattttttagtatcctcagcactcattctattctcatttctttctctccaatgagttaggccatgaacctgactcatttttggcacagaggactcttctgataacttgaaaaaatggactacctttttcagggatcttttggatctcacagagttcttaagatggaattttccagcctgccagtcatgaatctcagacagcctgccacctattgccctgatttgtgttataataaaggccttgttgcttaagacaccttcagtctttgcaggagggcatggaagctccaa

SEQ ID NO: 1637 - DNA, 1301 bp, HOMO SAPIENS
aaaaaggcggctgggcggagctgcgggcctccgacggcgggaggacagcgctgcgaggaggcgcccgggacagtcatggagcgccgcctgggagtgagggcctgggtgaaggagaaccggggctccttccagcccccggtctgcaacaagctcatgcaccaggagcagctcaaagtcatgttcatcggaggccccaacaccaggaaggactatcacatcgaagagggtgaagaggtattttaccagctggagggagacatggttctccgagtcctggagcaagggaaacaccgggatgtggtcattcggcagggagagatattcctcctgcctgccagggtgccccactcaccacagaggtttgccaacaccgtggggctggtggttgagcgaaggcggctggagaccgagctagatgggctcaggtactatgtgggcgacaccatggacgttctgtttgagaagtggttctactgcaaggacctcggcacgcagttggcccccatcatccaggagttcttcagctctgagcagtacagaacaggaaagcccatccctgaccagctgctcaaggagccaccattccctctgagcacacgatccatcatggagcccatgtccctggatgcctggctggacagccaccacagggagctgcaggcaggcacaccactcagcctgtttggggacacctatgagacccaggtgatcgcctatgggcaaggcagcagcgaaggcctgagacagaatgtggacgtgtggctgtggcagctggagggctcctcggtggtgacaatggggggacggcgcctgagcctggcccctgatgacagcctcctggtgctagctgggacctcgtatgcctgggagcgaacacaaggctctgtggccctgtctgtgacccaggaccctgcctgcaagaagcccctggggtgaccctcttgccatggcctgaagcagccacaggtgtgccaagcaccctcgagtgccatccctgccaaacaactctcccagcccccactacctctctgtgtactgccgctgtgtcccccacagacctgcacattgttgtcacccaccctcctgcccttctcagcccagatgccatgcccctgggcgggcagcagctccccatcttctctggcagactcagcccactgccttgccagtcttgccaggtggtctacccccggccccgctcctgcccattcctctgtccctgcagactcagtgcagcacttccacaccaagaaggccctcaataaaggcttcctgaggaacgcaaaaaaaaaaaaaaaaaa

SEQ ID NO: 1638 - DNA, 386 bp, HOMO SAPIENS
  misc_feature (103)..(103): n is a, c, g, or t
  misc_feature (361)..(361): n is a, c, g, or t
ccttaacagctgcacctagagtcctctgccttctgctgctgccagaaggagcagaagcaaactggaagcctcttgcattttcacgtctccttgcctcctcctntaccagatgaacacctactcatctttctggactgagctcagatgtcaccttctgaagagacccttcctaactactgcttttccctgttccccagtccccattagaagttggcagcccagtccttgcagctccagctgctctgtgcacactgtggcccaacacccatgaggcttcacggggttccctgatggctgtgagtctcttctgtaatctcagcttctgggggataggcatggtgttccattctgcatgctgctngtcacataataggccctccagaaat

SEQ ID NO: 1639 - DNA, 3792 bp, HOMO SAPIENS
cggcgatcccggcggagggggccgttcgccagctctgaggcagaaagtgccacgactccacacgcgcgcacgcagccagcgagcggccggagcggacggcagacggggcgggcggcgtcagggtcgcagcgtctacagctgctcgggggcggtttcttggcggaggcttggccggctcctctctcccggctccgcggcggctgcgaaggcggcggctcctgccctctcgctttccctctcgcgtctctggctgcagaaagaagcttccggttctgaggtcctggaggtgccatttccctctctgttgaagcaaaggccggggcagacctcctagtgaaaggaaagcaagccaggatggatatttacgacactcaaaccttgggggttgtggtctttggaggattcatggttgtttctgccattggcatcttcctggtgtcgactttctccatgaaggaaacgtcatatgaagaagccctagccaaccagcgcaaggagatggcgaaaactcaccaccagaaagtcgagaagaaaaagaaggagaaaacagtggagaagaaaggaaagaccaagaaaaaggaagagaaacctaatgggaagatacctgatcatgatccagcccccaatgtgactgtcctccttcgagaaccagtgcgggctcctgctgtggctgtggctccaaccccagtgcagccccccattatcgttgctcctgtcgccacagttccagccatgccccaggagaagctggcctcctcccccaaggacaaaaagaagaaggagaaaaaagtggcaaaagtggaaccagctgtcagctctgtagtgaattccatccaggttctcacttcgaaggctgccatcttggaaactgctcccaaggagggcagaaatacagatgtggcccagagcccagaggcaccaaagcaagaggctcctgccaagaagaagtctggttcaaagaaaaaagggcccccagatgccgacggccctctctacctcccctacaagacgctggtctccacggttgggagcatggtgttcaacgagggcgaggcccagcggctcatcgagatcctgtctgagaaggctggcatcattcaggacacctggcacaaggccactcagaagggtgaccctgtggcgattctgaaacgccagctggaagagaaggaaaaactgctggccacagaacaggaagatgcggctgtcgccaagagcaaactgagggagctcaacaaggagatggcagcagaaaaggccaaagcagcagccggggaggccaaagtgaaaaagcagctggtggcccgggagcaggagatcacggctgtgcaggcacgcatgcaggccagctaccgggagcacgtgaaggaggtgcagcagctgcagggcaagatccggactcttcaggagcagctggagaatggccccaacacgcagctggcccgcctgcagcaggagaactccatcctgcgggatgccttgaaccaggccacgagccaggtggagagcaagcagaacgcagagctggccaagcttcggcaggagctcagcaaggtcagcaaagagctggtggagaagtcagaggctgtgcggcaagatgagcagcagcggaaagctctggaagccaaggcagctgccttcgagaagcaggtcctgcagctgcaggcgtcccacagggagagtgaggaggccctgcagaagcgcctggacgaggtcagccgggagctgtgccacacgcagagcagccacgccagcctccgggcggatgccgagaaggcccaggagcaacagcagcagatggccgagctgcacagcaagttacagtcctccgaggcggaggtgcgcagcaaatgcgaggagctgagtggcctccacgggcagctccaggaggccagggcggagaactcccagctcacagagagaatccgttccattgaggccctgctggaggcgggccaggcgcgggatgcccaggacgtccaggccagccaggcggaggctgaccagcagcagactcgcctcaaggagctggagtcccaggtgtcgggtctggagaaggaggccatcgagctcagggaggccgtcgagcagcagaaagtgaagaacaatgacctccgggagaagaactggaaggccatggaggcactggccacggccgagcaggcctgcaaggagaagctgcactccctgacccaggccaaggaggaatcggagaagcagctctgtctgattgaggcgcagaccatggaggccctgctggctctgctcccagaactctctgtcttggcacaacagaattacaccgagtggctgcaggatctcaaagagaaaggccccacgctgctgaagcacccgccagctcccgcggagccctcctcggacctggcctccaagttgagggaggccgaggagacgcagagcacactgcaggccgagtgtgaccagtaccgcagcatcctggcggagacggagggcatgctcagagacctgcagaagagcgtggaggaggaggagcaggtgtggagggccaaggtgggcgccgcagaggaggagctccagaagtcccgggtcacagtgaagcatctcgaagagattgtagagaagctaaaaggagaacttgaaagttcggaccaggtgagggagcacacgtcgcatttggaggcagagctggaaaagcacatggcggccgccagcgccgagtgccagaactacgccaaggaggtggcagggctgaggcaacttctcctagaatctcaatctcagctcgatgccgccaagagcgaagcccagaaacagagcgatgagcttgccctggtcaggcagcagttgagtgaaatgaagagccacgtagaggatggtgacatagctggggccccagcttcctccccagaggcgcccccagccgagcaggaccccgttcagctgaagacgcagctggagtggacagaagccatcctggaggatgagcagacacagcggcagaagctcacggccgagtttgaggaggctcagacctcggcatgtcggttacaagaagaattggagaagctccgcacagccggccccctagagtcttcagaaacagaggaggcctcacagctgaaggagagactagaaaaagagaagaagttaacaagtgacctggggcgcgccgccacgagactgcaggagcttctgaagacgacccaggagcagctggcaagggagaaggacacggtgaagaagctgcaggaacagctggaaaaggcagaggacggcagcagctcaaaggagggcacctctgtctgagtttcctctttggaaaaagaagttactgttcaacttaccaaaatgccttacacattccttacaaataaaccaaccaacctacacagcgttatccaggcccaacttccggtagctccgagagaagccatgagagacaagtctcttagagccacagaagtagaccttccagagccccagtttgtaaatgaacctgtgtcacatttgataaacactatcctgggcgcagccccgggccaccgccgagtgacgccaaagccctggttgactctgacagccccgtgggtgtgtgggaggccgggcgctctggggtctgtctgtcagtgcaatcgtttagtgttttttcagtggggcggggcgggaagcgggtgggaccgggcagccagttctcaaaggctgtggggccgactggaggccacagcccctcacccctagacgttgccaaccagaactgacgtgtgacctcctgggtgttgatgccattaaaaccaacgttggtgcccggtg

SEQ ID NO: 1640 - DNA, 6038 bp, HOMO SAPIENS; identical to SEQ ID NO: 720

SEQ ID NO: 1641 - DNA, 2586 bp, HOMO SAPIENS
agcgcgcaggcgcggccggattccgggcagtgacgcgacggcgggccgcgcggcgcatttccgcctctggcgaatggctcgtctgtagtgcacgccgcgggcccagctgcgaccccggccccgcccccgggaccccggccatggacgaactgttccccctcatcttcccggcagagccagcccaggcctctggcccctatgtggagatcattgagcagcccaagcagcggggcatgcgcttccgctacaagtgcgaggggcgctccgcgggcagcatcccaggcgagaggagcacagataccaccaagacccaccccaccatcaagatcaatggctacacaggaccagggacagtgcgcatctccctggtcaccaaggaccctcctcaccggcctcacccccacgagcttgtaggaaaggactgccgggatggcttctatgaggctgagctctgcccggaccgctgcatccacagtttccagaacctgggaatccagtgtgtgaagaagcgggacctggagcaggctatcagtcagcgcatccagaccaacaacaaccccttccaagaagagcagcgtggggactacgacctgaatgctgtgcggctctgcttccaggtgacagtgcgggacccatcaggcaggcccctccgcctgccgcctgtcctttctcatcccatctttgacaatcgtgcccccaacactgccgagctcaagatctgccgagtgaaccgaaactctggcagctgcctcggtggggatgagatcttcctactgtgtgacaaggtgcagaaagaggacattgaggtgtatttcacgggaccaggctgggaggcccgaggctccttttcgcaagctgatgtgcaccgacaagtggccattgtgttccggacccctccctacgcagaccccagcctgcaggctcctgtgcgtgtctccatgcagctgcggcggccttccgaccgggagctcagtgagcccatggaattccagtacctgccagatacagacgatcgtcaccggattgaggagaaacgtaaaaggacatatgagaccttcaagagcatcatgaagaagagtcctttcagcggacccaccgacccccggcctccacctcgacgcattgctgtgccttcccgcagctcagcttctgtccccaagccagcaccccagccctatccctttacgtcatccctgagcaccatcaactatgatgagtttcccaccatggtgtttccttctgggcagatcagccaggcctcggccttggccccggcccctccccaagtcctgccccaggctccagcccctgcccctgctccagccatggtatcagctctggcccaggccccagcccctgtcccagtcctagccccaggccctcctcaggctgtggccccacctgcccccaagcccacccaggctggggaaggaacgctgtcagaggccctgctgcagctgcagtttgatgatgaagacctgggggccttgcttggcaacagcacagacccagctgtgttcacagacctggcatccgtcgacaactccgagtttcagcagctgctgaaccagggcatacctgtggccccccacacaactgagcccatgctgatggagtaccctgaggctataactcgcctagtgacaggggcccagaggccccccgacccagctcctgctccactgggggccccggggctccccaatggcctcctttcaggagatgaagacttctcctccattgcggacatggacttctcagccctgctgagtcagatcagctcctaagggggtgacgcctgccctccccagagcactgggttgcaggggattgaagccctccaaaagcacttacggattctggtggggtgtgttccaactgcccccaactttgtggatgtcttccttggaggggggagccatattttattcttttattgtcagtatctgtatctctctctctttttggaggtgcttaagcagaagcattaacttctctggaaaggggggagctggggaaactcaaacttttcccctgtcctgatggtcagctcccttctctgtagggaactctggggtcccccatccccatcctccagcttctggtactctcctagagacagaagcaggctggaggtaaggcctttgagcccacaaagccttatcaagtgtcttccatcatggattcattacagcttaatcaaaataacgccccagataccagcccctgtatggcactggcattgtccctgtgcctaacaccagcgtttgaggggctggccttcctgccctacagaggtctctgccggctctttccttgctcaaccatggctgaaggaaaccagtgcaacagcactggctctctccaggatccagaaggggtttggtctgggacttccttgctctccctcttctcaagtgccttaatagtagggtaagttgttaagagtgggggagagcaggctggcagctctccagtcaggaggcatagtttttactgaacaatcaaagcacttggactcttgctctttctactctgaactaataaatctgttgccaagctggctagaaaaaaaaaaaaaaaaaa

SEQ ID NO: 1642 - DNA, 5336 bp, HOMO SAPIENS
cggagggggaggtggctgccgcttctcccgcgtccgccattttgttgctgtggctattgggaacaagctgggcaaaagcaccccggaggcgcgacgctccttcgagttcggtgcctcgtgtgacggcgggggtcggtgaagacccgtcgagctgcggcgccggcgcgttccaggccgggagtcactggaggcacccctgggacgccgagcagcccgagaaccccggggtggcctccgctgcggctcgggtttgcctgccccgaccccccggctctgccgtgcattcccgggcggctctctccgtgtggcggccccggagcaggcgggcggcgtcggaggatgctgcgggcccggagccgagaggaaagtgctggcccagccctctgagcgctcctcgaggtgtgcgagaggcccttcctcggccccaaagccgtctgccgggctaaggcgtgcagagcaggcgaggacagccgccgcccctaccgccgcagagtccccggtccaacaccatgtcctccgccaggttcgactcctcggaccgctccgcctggtatatggggccggtgtctcgccaggaggcgcagacccggctccagggccagcgccacggtatgttcctcgtccgcgattcttccacctgccctggggactatgtgctgtcggtgtccgagaactcgcgggtctcccactacatcatcaactcgctgcccaaccgccgttttaagatcggggaccaggaatttgaccatttgccggccctgctggagttttacaagatccactacctggacaccaccaccctcatcgagcctgcgcccaggtatccaagcccaccaatgggatctgtctcagcacccaacctgcctacagcagaagataacctggaatatgtacggactctgtatgattttcctgggaatgatgccgaagacctgccctttaaaaagggtgagatcctagtgataatagagaagcctgaagaacagtggtggagtgcccggaacaaggatggccgggttgggatgattcctgtcccttatgtcgaaaagcttgtgagatcctcaccacacggaaagcatggaaataggaattccaacagttatgggatcccagaacctgctcatgcatacgctcaacctcagaccacaactcctctacctgcagtttccggttctcctggggcagcaatcacccctttgccatccacacagaatggacctgtctttgcgaaagcaatccagaaaagagtaccctgtgcttatgacaagactgccttggcattagaggttggtgacatcgtgaaagtcacaaggatgaatataaatggccagtgggaaggcgaagtgaacgggcgcaaagggcttttcccctttacgcacgtcaaaatctttgaccctcaaaacccagatgaaaacgagtgattgctgttgccctgtttcctgctgctttgttgttctgcctgtcctagtctcctttgaagtgggaaagcattttctctcataggcaagtcacactgcattgccgaagtccagctttctgcagactggcagtcgcacacacatttggaatgcacacagcggctgcctcctgatgtttgtatcatagtcgtattgtcaaagagtagccgattttagagttcttttggatcataaactggaaatactgatggaagcacacaagtggagagaagttgacatggaaagggtcttccttctcattgctgcccgtttgtacatgggactgattctgttgtgttcaccagagaaagcttgaggccatggcgagatactgcatgtttgctgttccacaaagcagtggcttagctgccatcttgcttttctttggacaacaggaagtgaaccttaaggaagagagaattctgttctaaaactccaaaatctggcttttttttttcttttgttttggtttggttttggaaaactaattaattagacttgtgtgggggtttttttttgttttgttttgtttgttttgttttgtttttttgagacggtgtctcgctgcatcacccaggctggagtgcagtggcgcaatctcgccttcctgcagtctccgcctcctgagttcaagcgattctcctgcctcagcctcccaagtagctgggactgcaggcgcgcacaccacgcccagctaatttttgtatttttagtagagacggggtttcatcatgttgaccaggctggtctcaaactcctgacttcaggtgatccacccgccttcagcctcccaacgtgctgggattacagccgtgagccgccgcgcctggcctagacttgtgtgttctaaacaggttaagtagcaggttgggtttttatgatagtgcaaggaatgactcatgcctctgagcttctaaactgaagctgctgtaactaaaggaatctgaaaagaacaaccctgaagcagaggcctttattgtcttggttgccagtagtaccttgttttgccatgtagcagacaacacacaaaataatgcagttgtggtgtgccatgctatgtgcacagccccttggattactttgttttaaaaagcatcagagttgggggtactttagggaaacctttgcttaccttgttttgccagtgataagagcagtgggttggagggcacttggccagttttctgttcagcttttcagtgaatgtacccctttaaggttcagacttaaacttccttaaaaagtggcgttgttcatagaatcgttggactcattaatgaatcgttcaactccactcactgaagcccagacctccgtgcccaggcccaatctcgtcaggctgccagagaaagttggtgctgctcatactggtctcacagtctaagtaagtgtctgtgatgctcccaagcaaaggaaatgcaagctctggaaattcgttaatgtatttgatgtcttagtgttttagtgactagggagaccattaactagtttatcattaaccacttatcagtgtattgatgttaaagcatttccctgttagctaaaagaggcctgttcatacaagccaactggtatatacgtgtggttcatccatcatctgctgcacatagcagactagaattctgggaaccctgtgcaattcagtctgctctcccttgtggaccctggtaaagaaaagcctcagctcatagtgaacacagcagacctagaaatgtagcagcagcctactgagtagctttcatttactgatcatctgctgtgactgtggccctgtctggaggttcctaggttttgagatttagagcaatgcattctggagacagaaccagcagaacagccatttttcaatttttctttaaatcagtattccatcaggcagataactgctgtattcatgaatcttgagagtgttcctgagacagaattaatggtcatttgggaaaactatcgccatggcttcccatctgtggttttcctctaaaagccttggagattagcccttccttgccagtgagaacggtgaccgcctcctgctctgcacggtctgcggcagttgccgcttctggttaggtgtgtcaggttggcttattttgggttcaggcctggcgtagcacccacaagtggcagacatatcacaagagtccccagactctgcctagaaacagtgtttgccctttggccagtgacgtggttcatcccggcccatgttgagccatgagtggagtttccaacagagggaggaatgtgtgccttgttcaaggagggcacgacccttaggcctttttcaaccagatttagctgaagggcttgacacctttgaattacagcagttgactcagagtgcaagaagtctggccattttggaaagcaaggtttcctttcagccctgtctactgaccaataccccgactcaccttgtgtggcgcacttcagaatcagatatacctagagtatacctgtggtttggttttataattaatcagctcgttacttcagcccatgaaaatggcatccagggctgccaggagattcagagctcaaaacaaggcgagcttgagttctgcactccagatatgtgccaaaactagtaaaacttaacggacttacaaccttgtcagtttttttaatgaggcagggatactctgtttttcacactaaacatatgaatgcagcactgctgcctcagctcagcttcgtgcctgggttccccactggtctgggaagactgttgtgctccatagagcagtgcacatctgacccagagggtgggtgttcataactgctacttgctctgctctaccatgtttaaagaaatatttggatgttaaattaactcactatggtttttcacctgggaaggaaacaaattacgtactagagggcattgactggttaaaaacttgtgtatcccgggaaggacctgcggtacaggagtcagccatgtctgtgctgtgtggaaccacctgatgacatggttaacgaggaagacgatgtgttgaccggctgccgtttgaggactttggtcacccagactagacaccttctgtgctcatgtttggaaagctgaaagggaaggacagctgtgccctcctgggagctcatgtgtccctggcgctgtgctagctttcctttacagctgtttacagacaaggcaggcctgaggcagatggccactgctcttgtgatgtttgctcagaggaatatgaacattttatttttgaaaagggatgatgtggttttttgccaggtgtttataattaatcctttaatattatggttattaacctcttaaacatgaatgaattcttgattgttttaacacagtacctaagactaatgctttctgtggacaccactgagctctgcctcaactccaccctctgcgaccggaggactatgcccctagtaactgctgtcggtgtggacgctgtgctggttctgttttctaaaggagcagaaggacaggtctctgagacaggatcgttgtccctacaggaggaacagtggccttgcttcttagacggtcttcactgtgtgttttaaaacaacaacaacaacaacaacaacaacataaaactcttttgacctgtaacttaaagatcataaacttcaggcaataatattttctgtgtaagcttttaaaattatttttggggatcatagcttgttttattttgtgctataaaattaacagtattaaatgacttatattcttagaatacatcgagtgtcttttcttaacagattagtgcctttttatttttgtattccgttttacgttactggtcccagcatcaaaacccttgtttccatggcctgtttgtatattgtctcaataaaacttgcatcagccggtggtggcggcagcaaaaaaaaaaa

SEQ ID NO: 1643 - DNA, 5245 bp, HOMO SAPIENS
agctgagagcccaatcgcatcaggggagcacggcccagcagcaggagctccaggctggctggacacctgggtccccacgcagactgtgagtagagggagctggaccacagtgggacaaggacacctccagacaggttgccagggccccacatggaggaggcaggtgggcccatggcccgggccaaggcccgagtggtaagtgccacattgacatggcggcagcggccccccacccaggaagagatcaaacatggttttcacaaggtgtccctggtgtcaggggcccagatggaagccccgcagaaggagatgtttgagttcagccgtcgagaggaagtggaagtcaatggctttgcaacacaggaagaagagactgtgaattgccagggccctcgggatacagctggctccaagaacttccagagccatggacccatcttttccaagaagtacataccacctcccaaggagaaaaggcctgaggggaggctgaaggaggctgtggaccagagtgatggcagccgccaagctcccaggactgagcccccatgtgtgggagctatggccaggactgagcttttggttcccctgcctgggccccgagagccaagtccccacccaggtgtaggtctcaccagtggtagctcccggagcctcgaggaataccgagtgacacgcactgtgcggaccaccacagtggtgggaggtcatgtggaccggcggatgagcagctctgtgactgtgaggccagtgtcctcaggcgaggccctgccacggggccgtcaggtctcccgcatggtgccgccagtggtggtgggctccccaccaggctcgcccagccgcagccaggccgtgaaagtgctaagtaacctcgtgcctgctgggcacagcccccctgccagtcacctgcccaggcccacggctggcgggccaaggagcacaggtctgggcagcacagtgggggcagccttgaggcagctgcctgagaccgggacagcagagcttaaagacagctctgccctggcctctacaggcatcccagccagtgctcacctgcctaagaatcaggatgcccctgcagcctgtccggacagagaccagggcagagccccggatgccagggcctgtgagctctggcaggtgctgggagcccccagttccactgagctccctctccagacttctcagggtcaagcatcagtcccctcctctcccagactcgagacccatgtcccctctcctggcctaactcaccctgcaaagcagcctgtggtgcccactcaccccggggcccggctcactccccttgttctgccccctaaaaaaaaggacgggcccgtggacccccctgctgccaccgtcctgcccatggtgaggagcgagcatgtgacagtccctggacaacctcctgctccatccactacaagaaggaaggatgtccccagcccaggaggtctttctgctccatcgtccccaaggaataagtttgttcagaactctgaaaatgtccctgtcctcccctttacccagagggaggtcgtgaagggccccggtgctcctgctgcctcatctcccacccggaaggaggtggtgcaggggtccagtgcttctgctgcctcgtcccccacctggaaagaggtcgtgaagggccctggtgctcctgctgcctcatctcccacccagaaggaggtggtgcaggggtccagtgctcctgctgccttgttccccacctggaaagaggtcgtgaagggccccggtgctcctgatgcctcatttcccacctggaaagaggttgtgaagggccctggtgctcctgctgcctcatcccccacccagaaggaggtggtgcaggggtctggtgctcctgctgccttgtccaccaccccaaaagaggttgtgaagggccctggtgctcctgctgcctcatcgcccacccagaaagaggttgtgaagggcccctgtgctcctgctgcctcatctcccacccagaaggaggtggtgcaggggtctggtgctcctgctgccttgtcccccaagtcaactgaggttgtccagggcccaaaaggcagcagtagcatccaaaaagaggctgtccagggtattgcaggcagccttgccccgcccctcaccaaggaagagactgttcaaggcccaattgctcctgccacctcactccccaaacaggataagggggtccaggactctgaagggagccccatctcatctctcacccagaaagaggttgtgcaggaccctgatgctctccctgccccatcttcctcagtggacagggtgtcccccagcccaggaggcacccctgccccagtgccaacaggagcagaggccagcacggagtcccagcttgtctctgatcccaccgagggcaagacgtgcacagagacatcaagggaggaggatgaggtggccctggccgctgacctggagatattcctggatacgctgcggagcatggagccccctgagatcctccgcactcaccggctgccacgagcccctcgctcctcctacctgtccatgtacgccacgctgcctgccattgaggaggaccagctggggccatgggtgctgggccccggaccccaggaggtgccttcactggaagagaaagaggaggaggaggaggaggaaccagagaacccctatctgagtgacgatgagaagctccagcgcaggcaggagaaagctgggcccagcccctccagggacctccaccctgccagacccacccaggtctcctgctctcctctggagatgatgaagaagcatgtagcaggaaccaagggcccccactcagagctgggattggaactgcagggaggcagcaggcccacttcccgtcttggaggcagccttctgttcggcagtctggtgcctaccgccaaggaggcctccaccccggaaccgctgggcacaaaactatctgctctgctgccccatggggcaccggggctcaggaaggtgccaggacagttgcccctgctttgcagtgaaagatcatccccaacggagaagcttgcctgttccctgcccctggaggggtggagcccagccttaaagacccagggcaagctgaacaccaggcctggaaaggtgatcttcttctcagagtctggctgccaaggcagtggcagggaggtctggggagacatcgttgatgcctcaggctgggcccccgtagcctccataagggtagttcgaggctgctgggtgctgtacgaagagccagagttccggggtcagaagctggtcctgcctgaaggagacatggaactcagaaccccagggacaaagtggagtccccaaggcatcggctccctaaggagggttgtctgggactacagcaccccggaaatcagcctcttctctgaggagggcctcaagggggagcaagtgaagctaacagaggccttgaagaattcccagggtctggagaagcccctgcaggtggcatctgccaccgtctctgcaggactgtggctactgtaccccaaaccattattcgaagacactccctacatcctggaacctggagagtaccccacctcagaggcctggggcacatcggaccccagcgtgggctccctgaagcccatgagattgggctgcccaagtgtggagaagccaggggagcccagggctgtggtgtatgaggccccaggctttcagggccgcagctgggaagtgagccgagacatctacaaccttcagcagccagaggacagccagagcccccacctggcctctgtggggtccctgagagttctcggaggctgctgggtgggctacgagaaggagggcttccggggccaccagtatctgctggaggagggggaatacccagactggtcacactggggaggctatgacgagttgctgacctccctccgggtcatccggacggacttcggggacccggccgtcgtgctatttgaggccatggacttcgaggggcacggcgtggaggtgagcaaggcattgccggatgtggagctggtgcaacacggccccagcacacaggccatccacgtgctcagcggcgtgtgggtggcctaccaggaggtgggcttctccggggaacagtacgtgctggagaagggcgtgtatcgtaactgcgaggactggggcgctggcaacagcaccctcgcctcgctgcagccggtcctacaggtcggggagcacgatctgcacttcgtctcaaagattcagcttttctcccgccccgactttctgggcgaccacttctctttcgaagatgaccaggccgctctgcccgcctccttccgacctcagtcctgccgggtccacggcggcagctggatcctgtttgatgagacgaacttcgagggtgaccagcacattctctctgagggcgagttccccactctcacggccatgggctgcctcgcctccacagtcctgggctctctccagaaggtatccctgcacttttcagagccttccattttcctgtatggactcgagtgcttcgaggggaaggagatcgagctcagcagggaggtgcggagcctgcaagccgagggcttcaacaaccatgtgctgtctgtgcggatcaaggggggcatttgggtgctatgtgaacacagtgacttccggggccgccagtggctggtgggaagctgcgagatcaccaactggctgacctacagcggcacccagagggtgggctccctctaccccatcaagcagcgccgggtttatttccgcctctggaatgcagcactggggggattcctggcagtgccggaccatgtggaggacatgaaagcaggccgtgtggtggtcgccgacccccaagctggaggtagctgcatctggtactacgaggatgggctgctgaagaaccagatggcccccaccatgagcctacaggtgattggaccccctagcccaggctccaaggtggtgctgtgggccgagagccgcctgccgcgccagacgtggagcatcagtgaatcgggccacatctgcagccagatgttcgaaggccagatcctggacgtgaagggaggccggggctacgaccgggaccacgtggtgctatgggagccggatgaggacagggcatcccagatctggactatccacgtgctttgaaacttttcccctcaccctccagccctggaggcttttgctgggatgaatgtttttatagggtttttgttgtaacataagctattttctaatatgctgccaggtacccttg

SEQ ID NO: 1644 - DNA, 5400 bp, HOMO SAPIENS
atggccgccgacgtcttcatgtgctccccgcgccggcctcgcagccggggccgccaggtgctgctcaagccccaggtgtccgaggacgacgacgactcggacacggatgagccgtccccgccgcccgcctccggcgcggccaccccggcccgggcccacgcgagcgccgcgccaccgccgcctcgggccgggccgggccgcgaggaacctccgcgccgccagcagatcatccacagcggccacttcatggtgtcgtcgccgcaccgagagcacccgcccaagaagggctacgatttcgacacggtcaacaaacagacgtgccagacctacagcttcggcaagactagctcctgccacctgtccatcgacgcctcgctcaccaagctcttcgagtgcatgactttggcctacagtgggaagttggtgtctccaaagtggaagaatttcaagggcctgaagctacagtggagagacaagatccggctcaataatgccatctggcgggcctggtacatgcagtatctggagaagcgcaagaatcctgtgtgccactttgtgacacccctggacggctctgtggacgtagacgagcaccgccggccggaggccatcaccacggaagggaagtactggaagagccgcatcgagattgtgatccgggagtatcacaagtggagaacctacttcaagaaaaggctacagcagcacaaggatgaggacctctccagcctggtccaggacgatgacatgctgtattggcacaagcacggggatggatggaagacccccgtccccatggaggaggatcccctgctggacacagacatgctcatgtcggaattcagcgacaccctcttctccacactttcttcacaccagccggtggcctggcccaatccccgggaaatagcacatctgggaaatgcagacatgatccagccgggactgattcctttgcagcctaacctggacttcatggacacctttgagcctttccaggacctcttctcttctagccgctccatttttggctccatgctacctgcatctgcctcagcacctgtaccagatcccaacaacccacctgcacaggagagcatcctgccgaccacagccctccccactgtgagccttcctgacagcctcatcgcgccccctaccgccccatccctggctcacatggatgagcagggctgtgaacacacctcccggactgaggacccgtttatccagcccacggacttcggtccctcagagccgccactgagtgtcccgcagcccttcctccctgtcttcaccatgcccctgctgtctcccagccccgccccaccgcccatctcccccgtgttaccattagttcctcctcctgccactgccctgaaccccccggctccacccaccttccatcagccacagaagtttgctggagtcaacaaagcgccgtctgtcatcacccacacggcctctgccaccctcacccacgatgcccccgccaccacctttagccagagtcagggccttgtgatcaccacccatcaccctgccccgtcagcggccccttgtgggctggcactgtctcctgtcacccggcctccccagccacggttaacttttgtgcaccccaaacctgtatccttgactgggggcaggcctaagcagccccacaaaatagtgcctgctcccaaaccagagcccgtgtccttggtgttgaagaatgcccgtatcgccccagctgccttttcaggccaaccacaagcggtgatcatgacgtcagggcctctgaagagagaagggatgttggcctccaccgtgtcccagtccaacgtggtcattgcgcctgctgccatcgccagggctcctggggtcccggagttccacagcagcatcctggtgacagatctcggccatggcacgagcagcccgcctgcccccgtctcccggctcttcccaagcacagcgcaagaccccctggggaagggcgagcaggtcccgctgcatgggggcagcccccaggtcactgtcacagggcccagtcgggactgcccaaactcagggcaggcctctccgtgtgcatcggagcagagccccagtcctcaatctccccagaacaactgctcagggaaatccgaccccaaaaatgtggctgcactaaagaaccggcagatgaagcacatctcagctgagcagaaaaggcgcttcaacatcaagatgtgcttcgacatgctcaacagcctcatctccaacaattccaagctgaccagtcacgccatcacactgcagaagactgtggagtacatcaccaagctgcagcaggagagaggccagatgcaggaggaggcccggcggctgcgggaggagatcgaggagctcaatgccaccatcatctcctgccagcagctgctccctgccacgggagtccccgttacccggcgccagtttgatcacatgaaagacatgtttgacgaatacgtgaaaacccggaccttgcagaattggaagttctggattttcagcatcatcatcaagccgctgtttgagtcgttcaagggcatggtgtccaccagcagcctggaggagctgcaccggacggcgctctcctggctggaccagcactgctccctgcccatcctcaggccgatggtattgagcacgctgcggcagctgagcacctccacctccatcctcacagacccggcacagctgccagagcaggcgtccaaggctgtcaccaggattggcaagagattgggagagtcctagctgcttagctggcatgtggccgcatgagatgccaggagacccttccctgcccatggagagtaggctgcgccccccagcccttcctgacgctcagcctcggggcctctctccaactctgccggcccaccgtggcatcgggaggccatgctcaggtctgaagcaggtttggggcctgctgacagcaatagcccgcctttgggaaccccttgctgtgaactctctcactcagtgacctcagtcaccaacctcctctgccctcggggcagcccacacaaaagggaagtgctggccgtgctggtcctgccctgctggtggcctgccgggcctggcgccggtgagcggaatcgatgggatgagggtgacagggcctgctcctgtcctgaggcccagccttgtccctcctgccacgtcctgtccacatgcatgcctctgcctgatgccctgctccactctctggtctgcccgtggggcagttggaaggcgtctttctttctcccctcaactctgacagcacccagcccttgtggatggacttgggcttctattcaggcttatgcatggcaggctgccagggggaagtgccttcttcagaggtcctccaggacacatgtgtgcagaaacggtggatgtggaacacacaggaccagaatggaagcgtgtgatgcacggtggctgctctggctgagaggccctgctgggcatgtttcatctgtccccttttagctccacctgacattgcaggatccatggggactcagcccagggccttctcggatgtcacctcaccgctgtggcccttctgccgttcttctccacttggctccagctgcagctgttgacagatcaagcatgtcctgtgggagcttagaaccctgaagttctagtgtctgaaagatcagactccacgtcctgctgtcagccttgtcatcttgtctgatgtctttcagctgggagccccaaaccaggacagttctcggaccaaagatgcccccacactcaaaagtctgtcccgtcttgtgtttggagaaggaaacaatgttggcaggcagcactctgtggtggtcagccctcagagctgtttctaggcatctctcagatcagacagcaaagaatctacccagatctgggctgggtggaggtgtggctgggctgggggccattctgagcctgcagtgagagtttggcccagcctcagtccttgctcttctctggctacctctgcagggagctgcaggggcaagcactctctccagcactcaggaagcccggccgagggtacctcctcgtggaaagaatgcactttaaagctctgctgaggagttcggagcccaggctttcaggcgacctctgccctccctgcctctcctcaccctccctctcttcctgcagggcctgggaagggctttgagggagcctgggagccatgtgaagaggggcacgcctgggctgtcccacagtttagatccagttggaggttctccctggctcctgcaggcctgcggggatctctccccacttcaggcctccggccagctgcctgccctcttgtctgtgcttcagccctgcacaaaagcagcttggtgacaccactcagccacccagagtacgtgtttacaggctttccagatcaccttcctgtggggtgaacgtaatgaggcggggctggtccttggaatttcccctggaaaatggtaacagactccatccttgacccggggatgagcatgaaggcattgtcccaaaggcagaggccaccgtggtaggaattccaccaaggccagaagggaaaaaggaagaacccaccgtgtctggctgtgcgggccctggggagggtcgtgagtgcagcccctctctacttctgtgcctttgtaaaacgtgtagataaccgcagtggttggctgagccaagaactctcctaaatcagtggctttctccccaccccttgctggggagtcatttttaaaaaaatctgtgggatataaaattggcctcctgctgcttcagcctacctctccctctgctgacttaatgtcgtgattctgtttcttcagatatttaaggctgttaggttgtgtgagccttgaagtgtgtgtgtgtgtcccagcgactgtccactgtccaggagatgcatgtctttgtattggagatatttctgtaactcattctcttggtgctcacgattgccatggccatagggccacagtgccgtatctgctgcagacatgattgtttcttgttctagaggttttcttgttttcgaatcttgcctgatgaatccagccagaccaaggggcctagatttgacctctgtcctgggctcctgggccaggtgcaggaacatctgaggccactctgctggccacctccagtgggtgctgaccacaggatgggctttgtttacactcattttcaccctgattcttgcccccactttcataaaagaaacttcaaaatgctgacgctttggagagtaagaaaatcaatcttggctgggcacggtggctcctgcctgtgatcctagcactttgggaggctgaagctgaaggatcacttgagctcaggagttggagaccaaccctggcaacataacaagaccctgtctctacaaaaaaaaaaaaaaaaaaaaaaaaaaaaaaaaaa

SEQ ID NO: 1645 - DNA, 388 bp, HOMO SAPIENS
tgatttcttcttatgggtttgctggaagtaaaaatcacattcacaaccactgaagccagacatttgattactcttaacaattaacagtattatttattaggaaagtaatgctgtaagagtcagcaaaatggggcctggcttcccggggctttgtcctagtcagcaacttgccttgcactgccctcttcctgccacctgtgtccagcctgagcaagaaaagatctgatgctcagggaatccctcattgggaaaatttaaatatggaccgtatagtagatgataatattgaaattaggttatctttttattagatgtgatgatggtaatgtgataatgtaggtgaatgttcttatttttaggtgaggcgtggggaatgtttccggatgga

SEQ ID NO: 1646 - DNA, 2867 bp, HOMO SAPIENS
agtacacaaagcctgtgggggagatctattgaccctatagatatattagcatcagggagacagggcaaaggtttcacccttcagttcagtccccaatccctgcttattatttccctaacagaagaccatcccccttgccactccctggtttttcttctctggcagcaatgaagcagctgctgacccagctctagttttcgggaagtcagatgaccttttccctcccgcggctctctacctctcgccgcccctagggaggacaccatgggcccactgatggttcttttttgcctgctgttcctgtacccaggtctggcagactcggctccctcctgccctcagaacgtgaatatctcgggtggcaccttcaccctcagccatggctgggctcctgggagccttctcacctactcctgcccccagggcctgtacccatccccagcatcacggctgtgcaagagcagcggacagtggcagaccccaggagccacccggtctctgtctaaggcggtctgcaaacctgtgcgctgtccagcccctgtctcctttgagaatggcatttataccccacggctggggtcctatcccgtgggtggcaatgtgagcttcgagtgtgaggatggcttcatattgcggggctcgcctgtgcgtcagtgtcgccccaacggcatgtgggatggagaaacagctgtgtgtgataatggggctggccactgccccaacccaggcatttcactgggcgcagtgcggacaggcttccgctttggtcatggggacaaggtccgctatcgctgctcctcgaatcttgtgctcacggggtcttcggagcgggagtgccagggcaacggggtctggagtggaacggagcccatctgccgccaaccctactcttatgacttccctgaggacgtggcccctgccctgggcacttccttctcccacatgcttggggccaccaatcccacccagaagacaaaggaaagcctgggccgtaaaatccaaatccagcgctctggtcatctgaacctctacctgctcctggactgttcgcagagtgtgtcggaaaatgactttctcatcttcaaggagagcgcctccctcatggtggacaggatcttcagctttgagatcaatgtgagcgttgccattatcacctttgcctcagagcccaaagtcctcatgtctgtcctgaacgacaactcccgggatatgactgaggtgatcagcagcctggaaaatgccaactataaagatcatgaaaatggaactgggactaacacctatgcggccttaaacagtgtctatctcatgatgaacaaccaaatgcgactcctcggcatggaaacgatggcctggcaggaaatccgacatgccatcatccttctgacagatggaaagtccaatatgggtggctctcccaagacagctgttgaccatatcagagagatcctgaacatcaaccagaagaggaatgactatctggacatctatgccatcggggtgggcaagctggatgtggactggagagaactgaatgagctagggtccaagaaggatggtgagaggcatgccttcattctgcaggacacaaaggctctgcaccaggtctttgaacatatgctggatgtctccaagctcacagacaccatctgcggggtggggaacatgtcagcaaacgcctctgaccaggagaggacaccctggcatgtcactattaagcccaagagccaagagacctgccggggggccctcatctccgaccaatgggtcctgacagcagctcattgcttccgcgatggcaacgaccactccctgtggagggtcaatgtgggagaccccaaatcccagtggggcaaagaattccttattgagaaggcggtgatctccccagggtttgatgtctttgccaaaaagaaccagggaatcctggagttctatggtgatgacatagctctgctgaagctggcccagaaagtaaagatgtccacccatgccaggcccatctgccttccctgcacgatggaggccaatctggctctgcggagacctcaaggcagcacctgtagggaccatgagaatgaactgctgaacaaacagagtgttcctgctcattttgtcgccttgaatgggagcaaactgaacattaaccttaagatgggagtggagtggacaagctgtgccgaggttgtctcccaagaaaaaaccatgttccccaacttgacagatgtcagggaggtggtgacagaccagttcctatgcagtgggacccaggaggatgagagtccctgcaagggagaatctgggggagcagttttccttgagcggagattcaggttttttcaggtgggtctggtgagctggggtctttacaacccctgccttggctctgctgacaaaaactcccgcaaaagggcccctcgtagcaaggtcccgccgccacgagactttcacatcaatctcttccgcatgcagccctggctgaggcagcacctgggggatgtcctgaattttttacccctctagccatggccactgagccctctgctgccctgccagaatctgccgcccctccatcttctacctctgaatggccacccttagaccctgtgatccatcctctctcctagctgagtaaatccgggtctctaggatgccagaggcagcgcacacaagctgggaaatcctcagggctcctaccagcaggactgcctcgctgccccacctcccgctccttggcctgtccccagattccttccctggttgacttgactcatgcttgtttcactttcacatggaatttcccagttatgaaattaataaaaatcaatggtttccacaaaaaaaaaaaaaaaaaaaaaaaaaaaaaa

SEQ ID NO: 1647 - DNA, 6482 bp, HOMO SAPIENS
gcggccgccgtcccgacgcgcagctacagccaggtacgtgggcgccgtgagggacctggcgcgagatccctcccgggccgcgtgcacgcgcccccgcgcccctccgtccctccgtgtgcgcctcgcgggcacgcccggggatccgcgacactcgccgcacacccgcccccgtccaccctgtgctcctattgggccctggaacaagggaagctctcccaggcgtcgggtcttctgcttgttttgttctcgcctcgagtctctggtcggttgggcagtgagtccaaaactacttacctggaagaccttccaccaccccctgagtatgaattggccccgtccaagttagaagaggaagtggatgatgtctttctcattcgagctcaaggactgccctggtcatgcactatggaagatgtgcttaactttttttcagactgcagaatccgcaacggtgagaatggaatacattttctcctaaacagagatgggaaacgaaggggtgatgccttaattgaaatggagtcagagcaggatgtgcagaaagccttagagaagcaccgcatgtacatgggccagcggtatgtggaagtatatgagataaacaatgaagatgtggatgccttaatgaagagcttgcaggtcaaatcttcgcctgtggtaaatgatggtgtggttcgtttgagaggacttccttatagttgcaatgagaaagacattgtagacttctttgcaggactgaatatagttgacattacttttgtgatggactatagagggaggcgaaaaacaggggaagcctatgtgcaatttgaagaaccagaaatggccaaccaagccctgttgaaacacagggaagaaattggtaatcgatacatcgagatatttccaagcagaaggaatgaagttcgaacacatgtcggttcttataagggaaagaaaatcgcatcttttcctactgctaagtatataactgagccagaaatggtctttgaagaacatgaagtaaatgaggatattcaacccatgacagcttttgaaagtgagaaggaaatagaattgcctaaggaggtgccagaaaagcttccagaggctgctgattttggaactacgtcttctctgcattttgtccacatgagaggattacctttccaagccaatgcccaagacattataaacttttttgctccactcaagcctgttagaatcaccatggaatacagctccagtgggaaggccactggagaagctgatgtgcactttgagacccatgaggatgctgttgcagcgatgctcaaggatcggtcccacgttcatcataggtatattgaactgttcctgaattcatgtccaaaaggaaaataagactctaggggctccagataataagggtgaagcaagaagcatttcatttgcacatctttcttggacttgggatatacagttccagtttattagcagcaactgctagggaaatgattttggtgttttgggttaattgcttctaagaaaagtttcatagtggactgtttagaagaagaaatgaaagatccagtttgggattatgaaataaaccacaaattaaaatttttgtttaaactgtccaggatctgatttaaaaatatggtctttgttttatatgattaaatggtttgttttcatagatgatatgttactcattgtaaagaccacatatttttattcagcagtgttctttaaacggtttcatttaaaaagtaactttttttttttgcctgtgaattgagtgctctgatgtaaaacttctcatggagtgaaacagtgatttattttaaccaaacattcaccaaagcaaagaacggtttcagacctttgaactggtatggtttggcagaatagttttaaattttgctgtatttgattacttagagataggaatttttaaaaatcaaaacaaaaaataccacagcttagtgtaaatgacaatttggcggttttatgtctttagaaatgttttgcctttctaagccttgtgctaaaggcgtataacggtggtgcctatctacttaagggggcattctagtcttaacttaaaagttgtctaaactgtccctccctggctttttttggtttggggtagacctaagggtgtttgttagtctcaaaactgtgaagtgacatgtcagaacagtccagactggtaagaaaattaatggcttcacttgaatttaaaccagctctagataggaaaaaaatcagtctcctcatttgctttttaaatggagtagtacatcccatattttagaacaagtaggggtgccttgcttaaataaaaatagcatttaatgtataattgtgtgaagggtttatggataaagctgtacttctgtcacaatgtggcagtactttctgctttaatattaaacagcttgttatttaaatattggacaaaatggctggcttcaaaatatagtcattaataaactaactttatgtgcacctgtgtaggagaatcaaaatcctgtatgctttctttgccttgttcctgttctcagggtgacgactgccaccaggagatgcagttctagttcttaaaattaaatttgcccaggtttctgacaggtgatacctggaagagagactatgtcttctcttacttaatacataaccatctttgattaccagctaagatgcgaaatcactgtactgtagtcaataaatgaagacttgtttcaggctgaagattacctaagagtatttattattggagtctgtgagtcaactgaatatattattacctcaagtcctgctatattaatataagtagtaagggttaattttcgtgtgtgtgttctctaaaatcctgtgaacatgacttaaccagcttaacatcatcagtagtactgcctagatggaaatgcgttttcatatatggttgaatatgccaagctatgagaactggtatctgtagttgtacgaactattagaatgtgatctttgttgctctttcacatttggtatctgatttgctgtggaaaagatctgtggggcctactgtgaggaattcatctgcaattgatttaagctaatgagttttatttgcacatctctggaaaaagaatgcaagcaaagcattaaaatgctatatgatggatgggtaaggttgaaaggatatatcttcttggcacgctacaggctgagttttctgtacaaaatgtggccattattgggaaatcattttatgtatttgaatgctcccttttgtttttgttcatgatctaggctagtacgtaagtgattgctaaggtggatgtagttatgggaaaggaagagaagcacataatacagtaaaagtaatcttatttccatgcaagtggaagacggtaccgtctccccacatttgagaagactgttttgcatcactctttgctattgaaggaagcagtgatggtgaatttccttctgtttgggttccttgtgtctataacttcctttgtggtaaagccatcaggaagaatagtgggagtggggcatatggtcagggtgctcatatcctgctttagcctagctgctgcttacggagtgcaagggagaactctgagaagcagtatgtaaataccagggagctgattgctgaatattgtggtctcatctgaatattgtggtctcatctaaatattgacaccaggcaatgaagcagaaatagagtatgtgtccctttatgcgtgggtaacttaagcttctgtcatgtgggaagggggaccgaatcttccctgggaggaaggctccaaattctcactacttctgtgttacttgaagggggaagcataaggaacccagtttgaaggcaacattgtgtgccatgaatctgcttattaatcaacatgccttgttaatgtcctctgccctgaacagcccttactcagttctcatttggaaagttattttttggggttacatcctgtttgtttcagaatttaaaaccctccatggtgggtcacttgaggtcaggagttcaagattagcctggccaacttagtgaaactccggctctactgaaaatgcaaaaattagccaggtgtggcacacgcctgtaatcccagttacttgggaggccaaggcaggagaatcgcttgaacctgggaggcagaggttgtagcgagccaagatcacaccattgcactccagcctgggcaacagagtgagactctgtcaaaatcaaaaaaaccaaaatacaaaaaactccattgttctgagagtttcccctaaattatcggaagacactcacattgaattggtaggacctatagtatagaggagaatggtatgtatgtcagcagtagagttccaatccaaattgcgctatcgcattagaaatacattaccctcccactccccaagttcagcaaattagaagagaatctgaagtttgtaggaagggaataaagctgctataaacatttatgtgcaggtttttgtgtagactcgttttcagctcctttgggtaaataccaaggaaccaggttgctggattgtaagttaagagtatgtttagttttggaagaaactgccaaactgttccaacatgactattttgaattcccattgacaatgaataagagttcctgtagctcctcaccctcattagtatttggtgatgtcactcttgcattttagctaatgggtgaatagtggtctcatcgttttaattcccaatcccatagtgatgtggagcaccttttcatatacttaatctgccatccttatatcatcattggtgaggtgtctggattttctgtccagaattttagttctagtggttttcttatttttagaaaggaagtataggaaggaaggtttaatctgtcttaagcctgattatatgaaaatcaagaataggctaggtgtggtggctgacatctgtaatccccgcactttgtgaggctgaagtgggaggactgcttgagcctgggaagtcaagcctgcagtgagccatgactgttgctgcactccagcctgagtgacagagtgagaccctgtctcagaaaaaaaaaaagcaggctcattttaaagttgtttatattttattttttgaaggaaataaacttgaagagatacaaacggtagtgaagattctccttcccctcctgtaattcagctgtttagtttctattctcgcacagccctgttatcagtttctagtgtaagcttgcagtgacttttactttatttataagcaagtgttagtgggtgttgtcatttcttttaaaaatataaattatactgtacatgctattttgtattttggcttttctcccacctaaacaccctaaagatcattttctgtcagtatataaaatcttggtgatgccaatacccatcccttagattgtacaagcagcattttgccatgctttatcccatagcctgcctcctgcagtctcatctttttttctatatgcatgtccaagtaagttgtagacatttttcacttttaatcctttcagcatacatgtcatgggaatttgtttttgtttttgttttttgtgtttgagacagtcgctctgtcacccaggctggagttatagtgacgtgatcccagctcattacagcctccacctcccagtttcaagcaattctcatgcctcagattcccgagtagctgggattacagatgtgcaccaccacgcctgactaatttttgtatttttagtagagatggggtttcatcatgttggccaggctggtctggaactcctggcctccagtcatttgcctgcctcggcctcccaaagtgctgggattacaggcatcagccaccacacccagccgtcattggagtttttttgagggagatttgcagtaaggtgaataaatgttaagtgtatcatttgatgaggttttttctttttttttttttttttttgagatggagtcttgtatcgcccaggctagagtgcagtggcctggtcttggctcactgcaacctccacctcctgggttcaagggagtctcctgcctcagcctcccgagtagctgggattacaggtgtgagccaccatacccagactcatttgatgagttttgatgtaaaagcatgtaactcaaacccctatgtctggaacatctgtattacatctgaattttttcacctagtcaattcctgcacctctctctcctgtcccttcttccctcccctggcagtcagctactgttaggattttgttcactgtagattaattttgcctattctagaacttcatataacggactcacttatgcagtatgtattctgtaagttccttttactcagcatgtttgtatgttcatcagtgtgtttaagctttgttcctttttatggctgagcagtgttctatgtatgaatgccacattttaacgtttcacctgttaggtgaacaactaactggtgaacaatgggctgtttctagtttggggctatcatgaataaagttggtatgaacatgtacaacaaaaaaaaaaaaaaa

SEQ ID NO: 1648 - DNA, 3486 bp, HOMO SAPIENS
tttccttcctcttttggcaacatggcgggcggagaagctggagtgactctagggcagccgcatctttcgcgtcaggatctcaccaccttggatgttaccaagttgacgccactttcacacgaagttatcagcagacaagccacaattaacataggtacaattggtcatgtagctcatgggaaatccacagtcgtcaaagctatttctggagttcatactgtcaggttcaaaaatgaactagaaagaaatattacaatcaagcttggatatgctaatgctaagatttataagcttgatgacccaagttgccctcggccagaatgttatagatcttgtgggagcagtacacctgacgagtttcctacggacattccagggaccaaagggaacttcaaattagtcagacatgtttcctttgttgactgtcctggccacgatattttgatggctactatgctgaacggtgcagcagtgatggatgcagctcttctgttgatagctggtaatgaatcttgccctcagcctcagacatcggaacacctggctgctatagagatcatgaaactgaagcatattttgattctacaaaataaaattgatttggtaaaagaaagtcaggctaaagaacaatacgagcagatccttgcatttgtccaaggtacagtagcagagggagctcccattattccaatttcagctcagctgaaatacaatattgaagttgtttgtgagtacatagtaaagaaaattccagtacccccaagagactttacttcagagccccggcttattgttattagatcttttgatgtcaacaaacctggctgtgaagttgatgaccttaagggaggtgtagctggtggtagtatcctaaaaggagtattaaaggtgggccaggagatagaagtaagacctggtattgtttccaaagatagtgaaggaaaactcatgtgtaaaccaatcttttccaaaattgtatcactttttgcggagcataatgatctgcaatatgctgctccaggcggtcttattggagttggaacaaaaattgaccccactttgtgccgggctgacagaatggtggggcaagtacttggtgcagtcggagctttacctgagatattcacagaattggaaatttcctatttcctgcttagacggcttctaggtgtacgcactgaaggagacaagaaagcagcaaaggttcaaaagctgtctaagaatgaagtgctcatggtgaacataggatccctgtcaacaggagggagagttagtgctgtcaaggccgatttgggtaaaattgttttgaccaatccagtgtgcacagaggtaggagaaaaaattgcccttagccgaagagttgaaaaacactggcgtttaattggttggggtcagataagaagaggagtgacaatcaagccaacagtagatgatgactgaagaataccagttaaataatacattcggatggatttggaagttggaattcctcttaacaaccaaggggtttattttcaaagcaatattggggaattgatttcacagttcgttaccttagtaggtaacggtaaggttattctctttttttttttttttttttttggttatgaaaacttagggactaaaattaatataaaaattggcataatgttggattgaatctacattttggcagaagttaaacattcccacataatgtcaaaattatacatcatgcagttctgtttttttgtttgttttattttgttttgtttttgagtctggctctgtcacccaggctggagtgcagtggcgtgatctgcaacctctgccccccgggttcaagcgattctcctgcctcagcctcccgagtagctgagattacaggtgcgcgccaccacacttggctaatttttgtattattagtagagacggggtttcagcatgttggctaggccggtctctcctgacctcagggtgatcagcccacctcggcctcacaaagtgctgggattacaggcgtgagccaccttgcccagcccacatcatacagtttgaaatgaaactttgccacaaccagcctttgctgtagcacacacatatatcactgaacctgtttgaaataaagttttttttctttttcatgattcgtctttgagtacctccaggctgaaagactgttgtaccagtaaaaacttaaaggcacaaattctccttgaagaccttctcccttttatgtggccccatattttatgttgctttatctttgaaattttgcatgaaaaggaaatgaatggattcgaatgaaattgtcctttagagcatgattacttgttcccatggacaaatatttttctccccttgctcttcctggcctgaaacacgggaaaccagagtcaaaagttatctccctctccctgtgatgccttgagatttttttctgcgttgtttaatgcctgaaatccaagtcttcctccatgggaaaatactgttataccaaataattctagatgagtaacaaagatctttttaggccttcattttatgttttttcttaactgttatattatgattgtgacatagattatactactactaatttttggatgtttcaaaaggtcaagaagtaaaagatgttagaaagcaatgagtgagtccttttgatttttaacttattccccatgtccctatacttcgtgtgcttttcctttttttttttgagacggaggctcactccgtcacctaggctagagtacagtggcacgatcttggctcgctgcaacctctgcctccctgattcaagtgattctcgtgcttcagcctcccatgtagctgatattacaggcacttgccaccatacccggctaatttttgtatttttagtagagatggggtttcaccatgttgcccaggctggtcttgaactcctaacctcaggtgatccgcccgcctctgccttccaaagtgctgggattacaggcgtgagccactctgcccggcttatttttctttatgtttttgcttcgtaagaggttctgttgagcagtgatttgcaactcttgctgacgttgctggggaagctttaaaaaaaaaaaagatgccccacagagattctgattttaattgttctgatttaattggcttggagtagaattcaggcattgatatctttaaaaactccccagtgttgagaaacaaatttagagagttgagaagtaggtatattaaattacagaatcttactgagttttggtagactgataatacaatttgctttgcttttcttaaatttgcattgagatgggatttgaagcatattgtgctcttgtgaatgttgaagttgcattgtagaagtttagaagctctggctatgggttgcctaaattgatgttttgaggaagcatattaatgttataaacttcgctgactttgaaggttgtgttgtagcatgaggaacacaaataaaacaattctaaatcaaactaaaaaaaaaaaaaaaaaaaaaaa

SEQ ID NO: 1649 - DNA, 3048 bp, HOMO SAPIENS
cggccactcggcatctgggttttagtcaggcagtgctccaggcgcctggctgccaggctacgggagaaaagtcctccgctcggccgcacccgttagaggcgctctccactgctgtcctcttcagctcaagatggtggcctgccgggcgattggcatcctcagccgcttttctgccttcaggatcctccgctcccgaggttatatatgccgcaattttacagggtcttctgctttgctgaccagaacccatattaactatggagtcaaaggggatgtggcagttgttcgaattaactctcccaattcaaaggtaaatacactgagtaaagagctacattcagagttctcagaagttatgaatgaaatctgggctagtgatcaaatcagaagtgccgtccttatctcatcaaagccaggctgctttattgcaggtgctgatatcaacatgttagccgcttgcaagacccttcaagaagtaacacagctatcacaagaagcacagagaatagttgagaaacttgaaaagtccacaaagcctattgtggctgccatcaatggatcctgcctgggaggaggacttgaggttgccatttcatgccaatacagaatagcaacaaaagacagaaaaacagtattaggtacccctgaagttttgctgggggccttaccaggagcaggaggcacacaaaggctgcccaaaatggtgggtgtgcctgctgctttggacatgatgctgactggtagaagcattcgtgcagacagggcaaagaaaatgggactggttgaccaactggtggaacccctgggaccaggactaaaacctccagaggaacggacaatagaatacctagaagaagttgcaattacttttgccaaaggactagctgataagaagatctctccaaagagagacaagggattggtggaaaaattgacagcgtatgccatgactattccatttgtcaggcaacaggtttacaaaaaagtggaagaaaaagtgcgaaagcagactaaaggcctttatcctgcacctctgaaaataattgatgtggtaaagactggaattgagcaagggagtgatgccggttatctctgtgaatctcagaaatttggagagcttgtaatgaccaaagaatcaaaggccttgatgggactctaccatggtcaggtcctgtgcaagaagaataaatttggagctccacagaaggatgttaagcatctggctattcttggtgcagggctgatgggagcaggcatcgcccaagtctccgtggataaggggctaaagactatacttaaagatgccaccctcactgcgctagaccgaggacagcaacaagtgttcaaaggattgaatgacaaagtgaagaagaaagctctaacatcatttgaaagggattccatcttcagcaacttgactgggcagcttgattaccaaggttttgaaaaggccgacatggtgattgaagctgtgtttgaggaccttagtcttaagcacagagtgctaaaggaagtagaagcggtgattccagatcactgtatctttgccagtaacacatctgctctcccaatcagtgaaatcgctgctgtcagcaaaagacctgagaaggtgattggcatgcactacttctctcccgtggacaagatgcagctgctggagattatcacgaccgagaaaacttccaaagacaccagtgcttcagctgtagcagttggtctcaagcaggggaaggtcatcattgtggttaaggatggacctggcttctatactaccaggtgtcttgcgcccatgatgtctgaagtcatccgaatcctccaggaaggagttgacccgaagaagctggattccctgaccacaagctttggctttcctgtgggtgccgccacactggtggatgaagttggtgtggatgtagcgaaacatgtggcggaagatctgggcaaagtctttggggagcggtttggaggtggaaacccagaactgctgacacagatggtgtccaagggcttcctaggtcgtaaatctgggaagggcttttacatctatcaggagggtgtgaagaggaaggatttgaattctgacatggatagtattttagcgagtctgaagctgcctcctaagtctgaagtctcatcagacgaagacatccagttccgcctggtgacaagatttgtgaatgaggcagtcatgtgcctgcaagaggggatcttggccacacctgcagagggagacatcggagccgtctttgggcttggcttcccgccttgtctgggagggcctttccgctttgtggatctgtatggcgcccagaagatagtggaccggctcaagaaatatgaagctgcctatggaaaacagttcaccccatgccagctgctagctgaccatgctaacagccctaacaagaagttctaccagtgagcaggcctcatgcctcgctcagtcagtgcactaaccccagctgccggcagtgctggttctccaacagagtggtgtctagatttatcagagtaacgagaagacaaactccggcactgggtttgctccctgattaaagtgccttcagccaagaccatctctccctcctggtgaagtgtgacttcgaattagtttgcacttcctgttggaaggtagagcccactgctcattgtataagccccgaggcctagagtggcagccaagagccatctgaagccacctctctgcctgttcctcccaagaggccagggtggccaggggtggtgagggcagttctgcacccagccaaacacataacaataaaaaccaaactctgtgtcagcatctttgcccttctggtttaaacgcctccttcaaaaagcaatctggaagaaagccctgtgctttgggggagtaagaatgtgtgtgcagaattctaggcagcaccttagggagggactgggatgagagaaagtgggacctggtgggctcaaccacacacacctgtctgtgcagatgctttgcccaggcttctcaccacggtgtaccgggatattaaacctctttccccagcctggaaaaaaaaaaaa

SEQ ID NO: 1650 - DNA, 584 bp, HOMO SAPIENS
gctgcaaacgtctcgctgaggtcatcctttacggcaggcgtccgcgtcgctagctagtcgttctgaagcggcggccagagaagagtcaagggcacgagcatcgggtagccatgcctttcttggacatccagaaaaggttcggccttaacatagatcgatggttgacaatccagagtggtgaacagccctacaagatggctggtcgatgccatgcttttgaaaaagaatggatagaatgtgcacatggaatcggttatactcgggcagagaaagagtgcaagatagaatatgatgatttcgtagagtgtttgcttcggcagaaaacgatgagacgtgcaggtaccatcaggaagcagcgggataagctgataaaggaaggaaagtacacccctccacctcaccacattggcaagggggagcctcggccctgaacagagcagctgctgatgtctggaggctgattttcctgttctctgttctccactggaaaggttgtttacgacaaacctccttgtcaaagtgtgtaaaaataaaggattgctccatcctatttgttctattttctcttggaaaaaaaaaaaaaa

SEQ ID NO: 1651 - DNA, 2289 bp, HOMO SAPIENS
accgcccacgctcggattggtccgaggtgagattcgcccttgtgccctcgtaggccttcggaacagcggaagagcagtgtcgggccatggccagggcccgcaggctggagctggccgaggccctggcgctggggccaggctagaggcatgcctgctatgcgctcctgcacgcgccggaccctggaattctctctggccgcctccctctgcgctacgccatactgatgcagatgcgctttgatgggcgcctgggcttccctggcggattcgtggactcgcaagacagcagcctggaggacgggctgaaccgtggtctgctggaactgctgggcgaggcggcggccgccttccgcgtggagcgccctgactaccgcagctctcacgccggatcaaggccacgtgttgtggcccacttctatgccaaatctctgacgctcgagcagctgttggctgtggaggccagcgcaacaggggccaaggaccacgggctggaggtgctgggcctggtgtgagtgcccctgtaccctgcatgatggtgtgggaggcctgcccatctttctggagaattgctttattggtgctgcctgggagcagttactggataccctccaggacttgggagtggtggaagctggtgctttctcaggacttcagatcccagttcgtctgaggcaaccctctgtggactcagggaacctgagctgaggactttggtacaaggaagggaatgttttctcttccggacctaaagacgataccaaattaaaagaagacatgtatatcatatgttttgagcagaggaccctccaattcatgggatcaggggcaaaaatccacagctcatcccaggggccctggcaggttctcagagcctacctcttccttgtatatttgcatacagcctggtaacccccaggcatgcatatgtacaatgtgaccacacacagcctgacatctttcacctgtcaagtccaatttaaccaggaattggcatttgttaccataccctgcctcttgctttgcagagagcttctacagcaaggctgagtccttcccacagtcctccatgcctgctctttagggtctaccccagcccatgttttttgggaaggatagagaagcagaggaccctctttgctttcctgaaagtagccatgcccttgctggagggttcaccacagcaattggtgggaaagggtcttaaccaatctccaacacttttcttctcctgaaactgagaaggggtaaggaagtagctaggtccccttggacggagcatggacatgagacctgtgagtactggtgtctctccttcagagctttcatctttggttcgctgtagactctgggactatcagaagagaactgacccatacctgtctagccctgcccttccaaaaaaagagcctcccattaaagaggagttagagctgggccttgaggctcttcacttctttcaacagatatttaatatgtacctactaaatgccaggtactataaaaggtatagagagccatccttgctctccaagactccagggaagggatgggcaaacattttcttaaaagccagatagcaaatactttaagctttgtaaactacatagttttttaaaaaatattttctaacattgactaataaaaattgcctatgtttactgtgtacaaaatgatgctttcaaatatgtatacattgtggcgtggctaaattgagctaattaacatatgcattacctcacatatttatcatctttcatggtaagaacacaaaatttactcttagcaattttcacaaattaatgcagtttattaactatagtcaccatttgtgcaacagatcttttgaacttatttctcctaactgaagttttatattcttcgatcaatatcttctcaattactgttccctacccccaacccctagtaaccattattttactctctgtttctatgtgtttaacttttttagatgccatatataagtgaaatcatgtggtattttcacctggcttatttcatttaacatgtcatctaggttaatccatgttgtcacaaatgacagaattttcttctattttaaggccaaatagtattccattgtgtatatataccacattttctttatctgtttatctgttgatggacacttaggttgattccacatcttggctattgtgaatagtgttgcagtgaacatgggagtgcagctatctctccagatcctaatttcaattactttgaataaataccctgtaatgggaaaaaaaaaaaaaaaaaaaaaaaaaaaaa

SEQ ID NO: 1652 - DNA, 3623 bp, HOMO SAPIENS
ttttcctcacactaaatcgaaaactctccctgttggtcctgatctgtttcagtcaggcaaattacatcctgggaaaacgtcagatgacaggggaggccactcgcttcctgctcatccagtttcgacactttctgtgctttcattagcttccagacctcagccctggccctcgctttactgtacagtcagaactggtttctacgcctcgcgagggtgggaggtcgtgtatgggaggaggaccgcttcccaccagcctcgttgggaagccaggagaaatctcttcaaatcctgcgattcagagtcaagtcccagtcgtcctttttctggtcggcccagaactgtttgtgcctcctccctcatgaggaatgatgtcagtggggccgcggtcgccgcccacgaagagtgtaaggctgcgaagtcggggctttcccgacgccccctccgtccgcgtctgcgtaggggaggtgacgagggcggggcgcggcggcggggtgacgtcacggccgcgcgcggcgtgggcggagcctcactttgaacccagttggcgggagtggctgctcgcggaggggcagtgtctgcggggccgctgtatgctgtccagcgatggatcccaccgcgggaagcaagaaggagcctggaggaggcgcggcgactgaggagggcgtgaataggatcgcagtgccaaaaccgccctccattgaggaattcagcatagtgaagcccattagccggggcgccttcgggaaagtgtatctggggcagaaaggcggcaaattgtatgcagtaaaggttgttaaaaaagcagacatgatcaacaaaaatatgactcatcaggtccaagctgagagagatgcactggcactaagcaaaagcccattcattgtccatttgtattattcactgcagtctgcaaacaatgtctacttggtaatggaatatcttattgggggagatgtcaagtctctcctacatatatatggttattttgatgaagagatggctgtgaaatatatttctgaagtagcactggctctagactaccttcacagacatggaatcatccacagggacttgaaaccggacaatatgcttatttctaatgagggtcatattaaactgacggattttggcctttcaaaagttactttgaatagagatattaatatgatggatatccttacaacaccatcaatggcaaaacctagacaagattattcaagaaccccaggacaagtgttatcgcttatcagctcgttgggatttaacacaccaattgcagaaaaaaatcaagaccctgcaaacatcctttcagcctgtctgtctgaaacatcacagctttctcaaggactcgtatgccctatgtctgtagatcaaaaggacactacgccttattctagcaaattactaaaatcatgtcttgaaacagttgcctccaacccaggaatgcctgtgaagtgtctaacttctaatttactccagtctaggaaaaggctggccacatccagtgccagtagtcaatcccacaccttcatatccagtgtggaatcagaatgccacagcagtcccaaatgggaaaaagattgccaggaaagtgatgaagcattgggcccaacaatgatgagttggaatgcagttgaaaagttatgcgcaaaatctgcaaatgccattgagacgaaaggtttcaataaaaaggatctggagttagctctttctcccattcataacagcagtgcccttcccaccactggacgctcttgtgtaaaccttgctaaaaaatgcttctctggggaagtttcttgggaagcagtagaactggatgtaaataatataaatatggacactgacacaagtcagttaggtttccatcagtcaaatcagtgggctgtggattctggtgggatatctgaagagcaccttgggaaaagaagtttaaaaagaaattttgagttggttgactccagtccttgtaaaaaaattatacagaataaaaaaacttgtgtagagtataagcataacgaaatgacaaattgttatacaaatcaaaatacaggcttaacagttgaagtgcaggaccttaagctatcagtgcacaaaagtcaacaaaatgactgtgctaataaggagaacattgtcaattcttttactgataaacaacaaacaccagaaaaattacctataccaatgatagcaaaaaaccttatgtgtgaactcgatgaagactgtgaaaagaatagtaagagggactacttaagttctagttttctatgttctgatgatgatagagcttctaaaaatatttctatgaactctgattcatcttttcctggaatttctataatggaaagtccattagaaagtcagcccttagattcagatagaagcatcaaagaatcctcttttgaagaatcaaatattgaagatccacttattgtaacaccagattgccaagaaaagacctcaccaaaaggtgtcgagaaccctgctgtacaagagagtaaccaaaaaatgttaggtcctcctttggaggtgctgaaaacgttagcctctaaaagaaatgctgttgcttttcgaagttttaacagtcatattaatgcatccaataactcagaaccatccagaatgaacatgacttctttagatgcaatggatatttcgtgtgcctacagtggttcatatcccatggctataacccctactcaaaaaagaagatcctgtatgccacatcagaccccaaatcagatcaagtcgggaactccataccgaactccgaagagtgtgagaagaggggtggcccccgttgatgatgggcgaattctaggaaccccagactaccttgcacctgagctgttactaggcagggcccatggtcctgcggtagactggtgggcacttggagtttgcttgtttgaatttctaacaggaattccccctttcaatgatgaaacaccacaacaagtattccagaatattctgaaaagagatatcccttggccagaaggtgaagaaaagttatctgataatgctcaaagtgcagtagaaatacttttaaccattgatgatacaaagagagctggaatgaaagagctaaaacgtcatcctctcttcagtgatgtggactgggaaaatctgcagcatcagactatgcctttcatcccccagccagatgatgaaacagatacctcctattttgaagccaggaatactgctcagcacctgactgtatctggatttagtctgtagcacaaaaattttccttttagtctagccttgtgttatagaatgaacttgcataattatatactccttaatactagattgatctaagggggaaagatcattatttaacctagttcaatgtgcttttaatgtacgttacagctttcacagagttaaaaggctgaaaggaatatagtcagtaatttatcttaacctcaaaactgtatataaatcttcaaagcttttttcatttatttattttgtttattgcactttatgaaaactgaagcatcaataaaattagaggacactattgagagtgagccactagcttgattttctttctcctctgatttcagttcactgttcagtttagcattaaaataataaaataatcatacagttcc

SEQ ID NO: 1653 - DNA, 4601 bp, HOMO SAPIENS
atttgaggctgactggggagaaagctgcctggaggaagctgctggggtgcggggggctgagggatttggctccccgccctctcccctagatggcggagaaatcgggctagctggaagggcgcagctcctctcccagagctcattctggagtcggagaactgggagagcggcccccgaggcggagcctccctcccgccccgagtcgcgctgccccccacctgggggagaggggcgggcgccgcgctgccttccctccgcgcctcggccgcgtggcttgcggcttattttcccagctggcaagcgtcgcgctgcagacaagggaatgcctgtggtcctgcgtgttccgaagttcaggggccccctgatcccgctgagccccctccaggagcgaaagggttaagaatgataaggaagaagaggaagcgaagcgcgccccccggcccatgccgcagccacgggcccagacccgccacggcgcccgcgccgccgccctcgccggagcccacgagacctgcatggacgggcatgggcttgagagcagcaccttccagcgccgccgctgccgccgccgaggttgagcagcgccgcagccccgggctctgccccccgccgctggagctgctgctgctgctgctgttcagcctcgggctgctccacgcaggtgactgccaacagccagcccaatgtcgaatccagaaatgcaccacggacttcgtgtccctgacttctcacctgaactctgccgttgacggctttgactctgagttttgcaaggccttgcgtgcctatgctggctgcacccagcgaacttcaaaagcctgccgtggcaacctggtataccattctgccgtgttgggtatcagtgacctcatgagccagaggaattgttccaaggatggacccacatcctctaccaaccccgaagtgacccatgatccttgcaactatcacagccacgctggagccagggaacacaggagaggggaccagaaccctcccagttaccttttttgtggcttgtttggagatcctcacctcagaactttcaaggataacttccaaacatgcaaagtagaaggggcctggccactcatagataataattatctttcagttcaagtgacaaacgtacctgtggtccctggatccagtgctactgctacaaataagatcactattatcttcaaagcccaccatgagtgtacagatcagaaagtctaccaagctgtgacagatgacctgccggccgcctttgtggatggcaccaccagtggtggggacagcgatgccaagagcctgcgtatcgtggaaagggagagtggccactatgtggagatgcacgcccgctatatagggaccacagtgtttgtgcggcaggtgggtcgctacctgacccttgccatccgtatgcctgaagacctggccatgtcctacgaggagagccaggacctgcagctgtgcgtgaacggctgccccctgagtgaacgcatcgatgacgggcagggccaggtgtctgccatcctgggacacagcctgcctcgcacctccttggtgcaggcctggcctggctacacactggagactgccaacactcaatgccatgagaagatgccagtgaaggacatctatttccagtcctgtgtcttcgacctgctcaccactggtgatgccaactttactgccgcagcccacagtgccttggaggatgtggaggccctgcacccaaggaaggaacgctggcacattttccccagcagtggcaatgggactccccgtggaggcagtgatttgtctgtcagtctaggactcacctgcttgatccttatcgtgtttttgtaggggttgtcttttgttttggttttttattttttgtctataacaaaattttaaaatatatattgtcataatatattgagtaaaagagtatatatgtatataccatgtatatgacaggatgtttgtcctgggacacccaccagattgtacatactgtgtttggctgttttcacatatgttggatgtagtgttctttgattgtatcaattttgttttgcagttctgtgaaatgttttataatgtccctgcccagggacctgttagaaagcactttattttttatatattaaatatttatgtgtgtgcttggttgatatgtatagtacatatacacagacatccatatgcagcgtttcctttgaaggtgaccagttgtttgtagctattcttggctgtaccttcctgccctttcccattgctactgatttgccacggtgtgcagcttttactcgccaccttccggtggagctgcctcgttcctttgaactatgccctcacccttctgccctcacttgatttgaaagggtcgttaactctcccttacaggtgctttgactcttaaacgctgatcttaagaagctctcttcatctaagagctgttactttttcagaagggggggtattattggtattctgattactctcaattctaattgttatatatttgagcccatacagtgtattaggttgaaccatagaaactgctattctcgtaggtcaaaagggtctagtgatggaagttttgtagataagtaccaggcatctcagtaactcctagactttttctcatcccatgccccgttttaaattgtcagttttccctctgactcttctgtgttaaaacatgaaactataaatttagtaattatcatgccttgctctttttaatctatatgactgatgcaagcccctcttcttaaccgtttcttggctttgagcccagaaacacagctctccctgtctccaactccagtaagccctcctcagcctcaccttacgaatccaaagaactggggtttgttaggttctttctctaatgtagaggcccagatcccatcacaaagtttttcattcttccttgtccaccatgatcttcatcacagtctttgatatgtctgcatgcaaagtggaacagagttgggcggcaatgacagaagagcttccttggcctgactcggtgtgcggccacttcggcactgcttaatccagatattcttgttaactaagcattgtgcttcccaggtggtctgaagtcaggtactctctctctcaacacctgtagttgaatatgatttggtcagttgctcgttgtaacttggagaaattcctataaagtaagatctccttgcctcttccatccattgttggcacccccttgcaaaaggaaaagaacagcaaaagtcaggagcagtaatctgagaaagttaactccaggataggtaggtttctattgttatagctagatgtaaatctttagttccaagaagtgatagagtttctgctttaataatttgttgataagtttacataaacagaaataaaagatactatctttaccgtagtagttcaggccaagattatgcttagttttagttctccaggtagttacttttgccatgtcctattgatcagtgacactgccagaggcccataccggcaagaggaagaggacgtcattttgtaaagtttaacttcttagcgaactgatgtgccacccagtcacagagtggagttgtgaattcatgtagaggtggcaaacctctaccttgtgttgatgagagaataatcttgggcagtctgggaaaataaggaaggcatctccttcttactcatggagattcaactatagagagttgaaacctaaacccgccttccttttatagaagctggactagagacggactgaccatcagctctgaactgtggctttttttgttcacctatgatgccatgtaccaaattcagaagctatcgttaataatttgttttataattgagtagtacaagcgaggaaaaaatacggaggataaccactatttttgtgcaaataatatgaaagtgaagtaaaagcaatagaagaaatttctataggatctgggtttagagtgtgtatcattaataaatatacctttgctcttttcagggaaaataacaaccacccttactgatagttgggaaaagaagattgggttattttgccatatcatttagctggaagtgacatttaaaagcaccctgcatcactagtaatagtgtattttgctattctgcccttgtaatcggtgtccctgtaaaacaatccccacagattactttcagaaatagatgtatttctctacgtaagggccaggtttattttctccttttttgagatttctagaaaaaatgctgcttgcacatgttggttcttgaaaccttagctagaagaatttcaggtcataccaacatgtggataggctatagctgttcagaggtctcctgggggagcttaaaacgggggaaacactggttttcacagatgctccacatggctgtctttaaaagactcaaaacttttttttgtcctctttgttatgcttggaagctcccccccccccaacagtgtgtcgagtctttgcaaagaaacctttagatgtggttcatagatatatgaatacgtatctgtgtaaaacagtgagtgtgcagtgtgtaaatactttaaattattatgctagaaaaataaagttacataccttgctgtggaaaaaaaaaaaaaaaaaaaaaaa

SEQ ID NO: 1654 - DNA, 865 bp, HOMO SAPIENS
atgactcgccggcagccctgggcttgtccacagtacctccatgatgaacaaggcccacctctatggtgtcggcgaaggcgcgccattgtgacgtcacggaaggcgcgctcttgtgacgccacggaaggcgcgctcttgcggcgtcacggaaggcgcgctcttgtgaggtcgcaggggaccgccactcacgcggagccaatcggaactcgcggcggggctgctggctctgtgtcgctaggcttcggcccggccgccgccgcacataagctgcgaggaggagctttacgacttcccggtcttcggggccgggcgcagcaagggccagactctgcgctagcaggcgctgcgcgccaaccggccggcacctgtcgcagaaggtgcaaccgatcgcactgtcgcgccgaagctcctcaatggccagcgccagctgcagccccggccgcccactcgcctcacctgagcctgggcgaatctggattgggaaagttgacattaatcaactcattattcctcccagatttgtattctccagagtatccgggtccttctcagagaattaaaaagcctgtacaggagcttgaaaaatcacatttgagaagaggattggatcctagccataacataaatataagggtggaaccaaagttttaatcaaagaaggtggtgttcagttgctgcttacaatagttgataccccaggatttggagatgcagtggataacagtaattgctggcagcctgttatcaattacattgatattaaatttgaggactacctaaatgcagaatcgcgagtgaacagatgtcagatgcctggtaacagggtgcagtgttgtttatacttcattgctccttcaggacatgg

SEQ ID NO: 1655 - DNA, 6159 bp, HOMO SAPIENS
atggccatagaccggcggcgcgaggcggcgggcggcgggcctgggcggcagccggccccggccgaggagaacggctccctgccgcccggggacgcggcggcctcggcgcccctcgggggacgcgcgggccccggcggcggcgcggagatccagccgctgcccccactgcatcctggaggcggcccgcacccgagctgctgctccgcggctgcggccccgagcctcttgttgctggactatgacgggtcggtgctgcccttcctcgggggcctgggcgggggctatcagaagaccctcgtgctgctcacctggatcccggcgctgttcatcggcttcagccagttctcggactcgttcctcctggaccagcccaacttctggtgccgcggggccggcaaaggcaccgagctggcaggggtcaccaccacaggccggggcggggacatgggcaactggaccagcctccccaccacccccttcgccactgccccctgggaggctgcgggcaaccggagcaacagcagcggcgcggacggaggcgacacaccacccctgccatcccctccggacaagggggacaacgcctccaactgtgactgccgcgcatgggactacggcatccgcgccggcctcgtccagaacgtggtcagcaagtgggatcttgtgtgtgataatgcctggaaggtccatatcgctaagttctccttactggttggattaatctttggctacctaataactggatgcattgctgactgggtcggccggcggcctgtgctgctgttttccatcatcttcattctgatctttggactgactgtggcactgtcagtgaatgtgacaatgttcagcacactcaggttctttgaaggattttgcctggctggaatcattctcaccttgtatgctttacgaatagagctgtgcccccctggaaaacggttcatgattacgatggtggcgagcttcgtggccatggcgggccagttcctcatgcctgggctagccgccctgtgccgggattggcaggtgctgcaggccctcatcatctgccccttcctgctcatgctgctctactggtcgatattccccgagtccctccggtggctaatggccacccagcagtttgagtctgcaaagaggctgatcctccacttcacacagaagaatcgcatgaaccctgagggcgacatcaagggtgtgataccagagctggagaaagagctttcccggaggcccaagaaggtctgcatcgtgaaggtggtggggacacggaacctgtggaagaacattgtggtcctgtgtgtgaactcgctgacggggtacgggatccaccactgctttgccaggagcatgatgggccacgaggtgaaggtgccgctcctggagaacttctatgctgactactataccacggccagcatcgcgctggtgtcctgcctggccatgtgcgtggtggtccgattcctcgggcgcaggggagggctgctgctcttcatgatcctcaccgccctggcctcactcctgcagctcggcctcctcaacctgattggaaagtacagccagcacccagactcagggatgagtgacagcgtcaaggacaaattttccatcgcgttttccatcgtgggcatgtttgcctcccatgcggtggggagcctcagcgtgttcttctgtgcggagatcaccccgacggtgataaggtgtggcgggctggggctggtgctggccagcgcgggcttcggcatgctgacggcacccatcatcgagctgcacaaccagaaaggctacttcctgcaccacatcatctttgcctgctgcacgctcatctgcatcatctgcatcctcctgctgcccgagagcagggaccagaacctgcctgagaacatttctaacggggagcactacacgcgccagccgctgctgccgcacaagaagggggagcagccactgctgctcaccaacgccgagctcaaggactactcgggcctccacgatgccgcagccgcgggtgacacactgcccgagggtgccacggccaacggcatgaaggccatgtagcccggcctgcggaacccggggctccagggtctggggcagcttgggcacaggtttacagaccagggaccgaacacgcagccaggggtgggaaagctgcctcagccaagctgagcctctcaactggtgtggggaaatcctgtctttccaaaagtccaaggagcgcgggtcggaggagacaaactctttggaaataaccctttcaagactttcttttctgccgttaaatgtgtgtatttattttggtcatttttacgagaagcactttattccctctccctctcactgatcacaaatggaatcacctccctgggcagcgagacgcagttgctctgggaagatgccacagtgaccagggccatggccggtccctctggggagatgggacacggctcctggcagcacccaggagccccccaggctgcctgcctgcgtgcagaggcaggagaggaccgtggagcgtttccgggactgcattttagacggagtgaaatgtacatgaatttggcttttgctagagtctgtgtatggttttttaaggtcctttttccctttctgtttgtaaggtaagagcttctgttcgtgtgcagggaaagcagctcacagacgccgttaaaaccagcttcatctttccttcaggatcatccttttgtacttgatgctggaagctcttggagaaaaagcttaaacatttcaccagaaatcttaattgagcagcagtcatatcgccacagctttgtgagtacacagctaacagatgcgtcgagacctgagatgtgctcgtttttattcctcctctcccagattggctccagcagaaaagtccctcgtgcacaggcagctcttgtgccggcactacttgaaaacatggctactttctaagctacaaaccattagaaaataactcaaaaagatggcagaggcaaatccacagaaggggggctgccctccacacacacacgcccgtcacccacaccttgagcacacaccatgaagatcaccagcttggatggccgtcacctcagacatcactccagggagcacccgcaggagctgggccccctcacgcctgccttcctgggccagcttcctgcttgcagtcactcgcatagcacagaggtggggcttcgggcagggagcggagattcctcataggtgagtccaaatgacctccagcctctcgaaggcatcaagacaaattgaaagaaagcaataactcaccaaagctcaacgctgcccctgcctcgacctccatgggtctcttcgtgttcctcgtttcaccccagaaagtggaggtttcctcttggcattttcggaggaaacttgtaggacacccaaggcgactaagagacagcctccttggcaagggcaggcaccactttgtagcaacttgggcaccagcttttctggacagcctggcttcttactggcattgtccaactcatcccttctcgaagcatgtctttgccatgggctgtgtccttccagggaaattgtggtctcgggcctgggtgagacaatgaagtgacttccaaccgacagttgctagaattcacagggcagaaaaggggttgaccttctccccttctggctttccacccggcctgctgcttgctgtcgccactcatgtctcctccacatgcggtccacacatcagtaagggcctggagatgtgtaaagacacagcaaggggcaagcagactcttggccacgtgtttccagtggctggaccacgccgacacctgggatcttgagatacccaggaagggaggctgtctggccagcctctccctgcctccacttgctccacgtccagctcctcaccttccctcttttttaaagtcacatttccatgtttcaacattagtttgcattcacctttacaaaggcctttctttagatctgtgcagcctttgcgtgccaaacttgtgaaattccttttaccttttttggagtacttgctataaagccacctgtcaacaaacccccattatgtacagaataggacctatccagtagccaggccagtaggcagttggggaaggtgggaaggatccagcgaggcccctgagcctgcacctggacaggtgtacgtctgcacccatcaccctcagcaccaggccaccctgcagtccacttactgtactgtgttgtggaaggatatgctaagtgatgaaagttgcgagcagtctcactggtcgtgtaaacttttttttttttttggaaattgaagctgtagagtgctgcccgaaatctctaggaagttggtggcaagggacagcactcacactcttctggtcatgatctctgatctccacctcaaatgacaataaaaaactggtccaacgaagacactgctcagcacttcagccatcaggactaatccatcgatgactggaaaagaggctagctttgaggaaaacagcctgggctcttgggagcagagtccagtgggtgtgaggctgacttgccgacggtcggcaggtaatggctctcagccggcgaggcggtcccacagctctcctcccagggcagcctgaggaggaggaggccgggtgcctgtttggtggcagcttcagcctagggatacctgaagctgttgagcaacacctttatgaaatgttgccagagcagcaacacttccctgtgggcacagccccgggaaatccggtaccaagtgagcaaggtggcaggacccacccaagcctgatacgcatctgggcccgccgggctcagcaggggaggctgctacggctgcccacttcccagcaccgtctgtcacgcttgaacccctctgtgctgttcccttcctggctaatagggagacccttcgcaggcacccactgtttcaacttgaccctcccaccccctgctactctcctccacacacccctccgttccgctagcctaccctgtcagcctttcaataaaagttatgcacaaatgtgaacacctgagatggagctgaacatttcttcactttgttctttttctgaagtcaaactcttatcaaatgccctaaaattattaccacccaagagaaacaggaaaaaggttacatgtttttgtttactgagagtaagatcacctgcatctggaagacgggctggtaaattggtttggctacagaacagaaagaaaacaaaaacaaacctcgtaagggaagtatcacactcagacaccaccgcttcctagagccaaatgagcaatcccaaactgcaagtgccataagtgggcctgtgaggtcacaccgcccggcccgaggtatcgcatgtgcgggggaggtccacactacagctgtcctctcgtctagaaggcaccacctcgctttcatgtcccgtgtgttttggaaaagcagtatggtgtgtcatgtctagcggcgaacacttccctccctgtccttgaggttgtaatataaaaactgtgtttctgtacgtgtgggtgggaattctctgacggtgctcgttcatagcacaagcttacgctgagttctgaactgtcgttcacagctgcgtgtctgcatggtgtcgcatctgttgtacctttggggaaaatttgtatgtaaatgtacagaaataaaaacgttgccccattaacagatttcctctggaatgtcttccctacctcacctgatggtatccaccgaagggcatttcactaccattaatggtgagtaataaaatcctccgtgttcattcagacctcactgcgtcactactttgaacgcctctgtaagctgtgtcttcactcgccccgaggtgggtggagggaggcctctcactctgcttcgagtcctggtcttaaaggtagtcagaggcagaggctggattaaacacacactgtttaccaagtgccactctcagaccacctgagagacgggggccatcagtaaaattaagaggaatttttttcccttgttcgtgtatgttctgctgatccgtggcctgaaggttcctagagacgtcaagaaatgaatatcttacactgtgattctgtgaggaaagactggtaacccaaaactctcttctctaatgtattttttaacgaaaatgacaatatttctttaataaagtatttataccaaaaaaaaaaaaaaaaaaa

SEQ ID NO: 1656 - DNA, 4907 bp, HOMO SAPIENS
aggcgcagcggcgacggcgtcggcggcggcggcggcagcggctccggccgaggtgcgcgctgggggggagggggggccggagaggagcatgaatggagcaaaatggcggatcatgtgcagagcctggcccaactagagaatctgtgcaaacagctgtatgaaaccacagacacaaccactcgactccaggcagagaaagccttggttgaatttaccaacagccctgattgcctgagcaagtgccagctactcctcgaaagaggaagttcctcttactcccagttactggcagctacatgccttaccaagcttgtatcacgcacaaacaaccccctaccattggaacagcgaatagatattcggaactatgtgctcaactaccttgccactcggccgaagttggctactttcgtgacacaagcacttattcagttatatgccagaatcacaaaactgggctggtttgactgtcagaaggatgactatgtcttcagaaatgcaatcacagacgtcacaaggtttttacaggatagtgttgaatactgcatcattggtgtcacaattttatctcagctaaccaatgaaattaatcaagtaagtgctacagccttcctcattgaagcagacaccacccatcctttaaccaagcacagaaaaatagcctcttcttttcgcgattcatcattatttgatatcttcacactttcctgcaatttactaaaacaggcttcaggaaagaatctaaacttgaatgatgaaagtcagcatggcttgctcatgcaactgctcaagctcactcataactgcctcaactttgacttcatcggcacttccactgatgagtcctcagacgacctgtgtacagtgcagattcccaccagctggagatcagccttcttagattcttcaaccttgcagctgttttttgacctgtatcattccatccctccttcattttcacctctggtattatcctgcttggtacagatcgcttcagtcagaagatccctgtttaacaatgcagagagggccaagtttctctctcatcttgttgatggtgttaaacgaatactggaaaacccacagagtttatcagacccaaacaattaccatgagttttgcagactactggcccgattgaagagtaactatcaactgggagaattggtaaaggtggaaaactaccctgaggtcatccgattgatagccaacttcacagtgaccagcctacagcactgggaatttgctccaaatagtgtgcactatcttctgagcctgtggcagcggctggcagcctctgtgccgtatgtcaaagccacagagccccacatgctggaaacttacactcctgaggtcaccaaagcctacatcacatcccggttggaatctgtgcacatcatactgagagatggcctggaagatcccctggaggatacggggctggtccagcagcagttggaccagctgtccaccattgggcgttgtgaatatgagaagacgtgtgcactcctcgtgcagttgtttgaccagtcggcccagtcgtaccaggagctgctacagagcgccagcgcaagcccaatggacattgcagtgcaggagggaaggctgacatggctggtttacattattggagcagtgatcggtggccgggtttcttttgccagcactgatgagcaagacgccatggatggtgagcttgtctgtcgggtgctccagctgatgaacctaacagattctcgtttggcccaggcgggtaatgagaagctagagttggccatgctgagcttttttgaacagtttcgtaagatctacattggggaccaagtgcagaaatcctctaagctgtaccgccgactctcagaagttctgggcttgaatgatgagaccatggtcctaagcgtcttcataggaaaaatcatcaccaacttgaagtactggggccgttgtgaaccaatcacctccaagacactacagcttctcaatgacctgtccattgggtacagtagcgtaaggaagctagtgaagcttagtgcggtacagttcatgctgaacaatcacacgagcgagcacttttcatttttgggtattaacaatcagtccaacctgacagacatgcggtgtcggactaccttctacacagcacttgggcgtctcctcatggtggatttaggagaggatgaagatcagtatgagcagttcatgctgccactcacagcagcatttgaggctgtggcccagatgtttagcaccaatagtttcaacgagcaggaggcaaagcgaactctagttggcctagtaagagacctgagagggatcgctttcgctttcaatgccaagaccagcttcatgatgctctttgaatggatatatccatcctatatgccaattctccaacgggcaattgagctctggtaccatgatccagcctgtactacacctgtactcaagttgatggctgaattggttcataataggtcccagcgactccagtttgatgtctcttcccccaatggcatcttactcttccgagaaaccagcaagatgataacaatgtatggcaatcgcatcctgacactaggagaggtcccaaaggatcaggtctatgctctgaagctcaagggcatctccatctgcttctccatgctgaaggctgctctcagtgggagttacgtcaatttcggagtctttcgtctctatggagacgatgccctggacaatgctctgcagaccttcatcaagctgctcctctctattcctcacagtgatctcttggattaccccaagctcagccagtcttattattcactactggaagtcctgacccaggaccatatgaactttattgcaagcctggaacctcacgtcatcatgtatattctctcttccatttctgaaggacttactgcacttgacaccatggtatgcacaggctgctgctcctgcctggaccacattgtgacatacctcttcaagcagctgtcacgtagcaccaagaagaggaccacacccctgaaccaggagagcgaccgctttctgcacatcatgcagcagcatccagagatgatccagcagatgctgtccacggtgctgaacatcatcatctttgaagactgtaggaaccagtggtctatgtcccgaccactacttggcttgatattgcttaatgaaaagtatttttctgacctaagaaacagtattgtgaacagccagccaccggagaagcagcaggccatgcacctgtgttttgagaacctgatggaaggcatcgagcgaaatcttcttacgaaaaacagagacaggttcacccagaacctgtcagcattccgtcgagaagtcaacgactcaatgaagaattccacttatggcgtgaatagcaatgacatgatgagctgacacctccttggactctacctgtacagagcagcgtccctttggtttggcccagaggggcgaacaattgcaagggagagggcctggctgatcctggctcttttctccaggggtgtggggaaaatggcaaaggtcaactagctgcttccccagggaataggggtgtgagtacactcactagggggcagggcgctgctggttcctgggggactgggtgggaagggtggtgggaggagataagagatacaaactgagactccagcctctcctcctggggccacccaagtggggagaacccctagtgtcctgccacaacctgccttgtataaacatgtacattttttcataacattttgaacaaggtttatattgactcaagtttaaaaacaaaaagtgtgactgaaaaatttttacagagtctagtgcaccaatgctgatgtgaggggttgtgtatgcgagtgaagaaaatgtgtattctggtggcctgaagctttactggacaaggatgtgtgagagtgcagagatatatttagtgacacagtagagaggcaaaaaaaaagctaaaattccaaatgtatattttttcgtattgccctgtcctcacccagaaatgatcaattcctgttactgtattaacccttgttattaggaactctaagccatgccagaacaccgtccctccccttggaccgtgtagattctgccctgggtccctagccccttgcagtgataaataactccagctaaaagtgtttggtgttcttatctccaccctctttcctactttgcttaccctcatcctcagacagatgcctcttgcttttaaaagttggatttaacgacgtgttgtagggttcttggtctgtgtgaaggcagagaccagagagaaggaagtgagcccactgctctcctgggagcaatgtgggtgagtccaccagaggccctgctgtgtgtggccaataaattttagtcttccccagccctcgaggcagtgtgtgtggatgtatgcgtgtggatatttatatatgtaccctgcactcatgaatgtatgaactggaggaagttactacagtggaagggttcttaataacaaggtctacctagcatgaagtatttaacattctcccatcccttaaaaaatatacatttttataaaatgaaaaccataataaatgttttgaatattaaaaaaaataataacctacagaggaaaattaatggagacagctatttgccttgtactttttccacaattgttgctgctagttgtacacatctctagttcagctcttgcccacgggacactcatcaattaggttttatttttatttctttcctctacccccagaaacaagcctgttaattttttttccttctcctctggcgactgtgtgatgaatcctttcttgcgtgatcaggttgcggatagacttgtaagggtgtttgctgcatacagtgtaagcattgtgaccgccaataaacttcaatggtttctactgaaaaaaaaaaaaaaaaaa

SEQ ID NO: 1657 - DNA, 414 bp, HOMO SAPIENS
  misc_feature (37)..(40): n is a, c, g, or t
  misc_feature (52)..(52): n is a, c, g, or t
  misc_feature (84)..(84): n is a, c, g, or t
tgcggccttgtggccaagcacagaacgtgtgcagtgnnnntggtgcaacttntaggtcgtccccagcatggaaaatgagccctnggcatggaagatgagccctggtcctgcagcggtgctctttcctcttctcacaagctggaatgtgcatgtgctcccacccagctttgaccatggggcgaaaacagtactctgcagtctggcagagcaacaaggtggaaagggcctgggtccttgagtgacgtcatgagccctctcactgtcccgactttgggactgttatatgataaggactttctgtgagtcactgtcttttagagtctctctgttttagctgcctggactttatcctgaataatatggctgttatcatgggtatagtgttactatgagcctcatctaagtaatttctac

SEQ ID NO: 1658 - DNA, 897 bp, HOMO SAPIENS
aggtccccttccacactgttgaagctttgttcttttgctctttgcactaaatcttgctactgctcactctttgggtccacactgcttttatgagctgtaacactcaccgtgaaggtctgcagcttcactcctgaagccagcaagaccacgaacccaccaggaggaatgaacaactccagacgcaccaccctaagagctgtaacactcaccgcgaaggtctgcagcttcactcctgagccagcgagaccatgaacccaccaaaaggaagaaactctgaacacatcttgacatcagaaggaagaaacaaactccagacacgccacctttaagaactgtaataacactcaccgcgagggtctgcggctttgttcttgaagtcagtgagaccaagaacccacaattctggactcaataactttattcataattaccaaaaatgagaaaaaaacaagatgtacttcaataggaccgcggcggctaggtcacctcctccggacgccgacacgcgctgccctggcaaccgtcaccagggaaacaagcgacgtcacttgcgcgttttcaacgctactctacgggggccgagggggcgccaagagttctgaaagtgacagaggcgctgatggcgcgctgggctggatccaagcgagcacgatctcgagtgcgctggagattttaaatcttctggagtatatttttaaaaaagttttgtggaccaaacgttctgcacagagatgcccattccgctctcctgttggggagttaaaaagcgaacgatctcaccatgaaatttaaagtagccattcagatatatttgaaaaatgtaaaacagtgtggggaaaggccatgttatgatggtgagtgaaggaagcaggacgcaatatagcaatgctaaataaa

SEQ ID NO: 1659 - DNA, 396 bp, HOMO SAPIENS
agaagctgtctatcgggctccagcggtcatgtccggcagaggaaagggcggaaaaggcttaggcaaagggggcgctaagcgccaccgcaaggtcttgagagacaacattcagggcatcaccaagcctgccattcggcgtctagctcggcgtggcggcgttaagcggatctctggcctcatttacgaggagacccgcggtgtgctgaaggtgttcctggagaatgtgattcgggacgcagtcacctacaccgagcacgccaagcgcaagaccgtcacagccatggatgtggtgtacgcgctcaagcgccaggggcgcaccctgtacggcttcggaggctaggccgccgctccagctttgcacgtttcgatcccaaaggccctttttagggccgacca

SEQ ID NO: 1660 - DNA, 370 bp, HOMO SAPIENS
  misc_feature (52)..(55): n is a, c, g, or t
  misc_feature (57)..(62): n is a, c, g, or t
  misc_feature (65)..(66): n is a, c, g, or t
  misc_feature (70)..(71): n is a, c, g, or t
  misc_feature (73)..(89): n is a, c, g, or t
  misc_feature (91)..(92): n is a, c, g, or t
  misc_feature (94)..(96): n is a, c, g, or t
  misc_feature (145)..(145): n is a, c, g, or t
  misc_feature (196)..(196): n is a, c, g, or t
  misc_feature (203)..(203): n is a, c, g, or t
  misc_feature (209)..(213): n is a, c, g, or t
aacaaaagatcctagcggtcctcatctctaccatggactaaccagagggaannnngnnnnnntcnncacnnannnnnnnnnnnnnnnnncnncnnngtggggaacacagagccctgcccagaggcttgaacctggcaccacaggngtctggaattacacagaagacgggtgacagccaaggtggatcatgaacggngagaagntccagnnnnngacaaggggaagggtctaaagggtggagggcacagcgcaagcaaagtcttggcaacaaaagagctaatgcatcccagaaatggggcaggtggagtactggaagctacaccaagcttcagagtggtcctgtggcctcggtgtggtagctcaggcctat

SEQ ID NO: 1661 - DNA, 2005 bp, HOMO SAPIENS
caacggctcattctgctcccccgggtcggagccccccggagctgcgcgcgggcttgcagcgcctcgcccgcgctgtcctcccggtgtcccgcttctccgcgccccagccgccggctgccagcttttcggggccccgagtcgcacccagcgaagagagcgggcccgggacaagctcgaactccggccgcctcgcccttccccggctccgctccctctgccccctcggggtcgcgcgcccacgatgctgcagggccctggctcgctgctgctgctcttcctcgcctcgcactgctgcctgggctcggcgcgcgggctcttcctctttggccagcccgacttctcctacaagcgcagcaattgcaagcccatccctgccaacctgcagctgtgccacggcatcgaataccagaacatgcggctgcccaacctgctgggccacgagaccatgaaggaggtgctggagcaggccggcgcttggatcccgctggtcatgaagcagtgccacccggacaccaagaagttcctgtgctcgctcttcgcccccgtctgcctcgatgacctagacgagaccatccagccatgccactcgctctgcgtgcaggtgaaggaccgctgcgccccggtcatgtccgccttcggcttcccctggcccgacatgcttgagtgcgaccgtttcccccaggacaacgacctttgcatccccctcgctagcagcgaccacctcctgccagccaccgaggaagctccaaaggtatgtgaagcctgcaaaaataaaaatgatgatgacaacgacataatggaaacgctttgtaaaaatgattttgcactgaaaataaaagtgaaggagataacctacatcaaccgagataccaaaatcatcctggagaccaagagcaagaccatttacaagctgaacggtgtgtccgaaagggacctgaagaaatcggtgctgtggctcaaagacagcttgcagtgcacctgtgaggagatgaacgacatcaacgcgccctatctggtcatgggacagaaacagggtggggagctggtgatcacctcggtgaagcggtggcagaaggggcagagagagttcaagcgcatctcccgcagcatccgcaagctgcagtgctagtcccggcatcctgatggctccgacaggcctgctccagagcacggctgaccatttctgctccgggatctcagctcccgttccccaagcacactcctagctgctccagtctcagcctgggcagcttccccctgccttttgcacgtttgcatccccagcatttcctgagttataaggccacaggagtggatagctgttttcacctaaaggaaaagcccacccgaatcttgtagaaatattcaaactaataaaatcatgaatatttttatgaagtttaaaaatagctcactttaaagctagttttgaataggtgcaactgtgacttgggtctggttggttgttgtttgttgttttgagtcagctgattttcacttcccactgaggttgtcataacatgcaaattgcttcaattttctctgtggcccaaacttgtgggtcacaaaccctgttgagataaagctggctgttatctcaacatcttcatcagctccagactgagactcagtgtctaagtcttacaacaattcatcattttataccttcaatgggaacttaaactgttacatgtatcacattccagctacaatacttccatttattagaagcacattaaccatttctatagcatgatttcttcaagtaaaaggcaaaagatataaattttataattgacttgagtactttaagccttgtttaaaacatttcttacttaacttttgcaaattaaacccattgtagcttacctgtaatatacatagtagtttacctttaaaagttgtaaaaatattgctttaaccaacactgtaaatatttcagataaacattatattcttgtatataaactttacatcctgttttacctataaaaaaaaaaaaaaa

SEQ ID NO: 1662 - DNA, 2564 bp, HOMO SAPIENS
ataacggcgctggccccgccccttctcgagaactcgcagagctgggctggtaaaattgcagtgctgaagacactggacccgcaaaaggctgtccctcccaaacctgggattctgggctcactgagttcacctgcgagtcagccctacctgcactgctctggtctagtacaaacaggctgctggcattgagggacggagtctccaactcctggcctctagcagtcctcctgtgtaggtctcccaaagtgctagtgtgtccggaattggtgggttcttggtctcactgacttcaagaatgaagccgcggaccctcgcagtctgctacaatgctgctgctgcacagagctgtggtcctcaggctccaacaggcctgcagactcaagtcaatcccctcaaggatctgcattcaggcctgctccacaaatgattcatttcagccccagcgccccagcctcaccttctctggtgataactccagcacccagggatggagagtcatggggaccctattaggtctcggtgcagtgttggcctatcaggaccatcggtgtagggctgctcaggagtcaacacacatatacactaaggaggaagtgagttcccacaccagccctgagactgggatctgggtgactctgggctctgaggtctttgatgtcacagaatttgtggacctacatccaggggggccttcaaagctgatgctagcagctgggggtcccctagagcccttctgggccctctatgctgttcacaaccagtcccatgtgcgtgagttactggctcagtacaagattggggagctgaatcctgaagacaaggtagcccccaccgtggagacctctgacccttatgctgatgatcctgtacgtcacccagccctgaaggtcaacagccagcggccctttaatgcagagcctccccctgagctgctgacagaaaactacatcacacccaaccctatcttcttcacccggaaccatctgcctgtacctaacctggatccagacacctatcgcttacacgtagtaggagcacctgggggtcagtcactgtctctttccctggatgacttgcacaactttcccaggtacgagatcacagtcactctgcagtgtgccggcaaccgacgctctgagatgactcaggtcaaagaagtaaaaggtctggagtggagaacaggagccatcagcactgcacgctgggctggggcacggctctgtgatgtgttagcccaggctggccaccaactctgtgaaactgaggcccacgtctgctttgagggactggactcagaccctactgggactgcctatggagcatccatccctctggctcgggccatggaccctgaagctgaggtcctgctggcatatgagatgaatgggcagcctctgccacgtgaccacggcttccctgtgcgtgtggtggttcctggagtggtgggtgcccgccatgtcaaatggctgggcagagtgagtgtgcagccagaggaaagttacagccactggcaacggcgggattacaaaggcttctctccatctgtggactgggagactgtagattttgactctgctccatccattcaggaacttcctgtccagtcggccatcacagagccccgggatggagagactgtagaatcaggggaggtgaccatcaagggctatgcatggagtggtggtggcagggctgtgatccgggtggatgtgtctctggatgggggcctaacctggcaggtggctaagctggatggagaggaacagcgccccaggaaggcctgggcatggcgtctgtggcagttgaaagcccctgtgccagctggacaaaaggaactgaacattgtttgtaaggctgtggatgatggttacaatgtgcagccagacaccgtggccccaatctggaacctgcgaggtgttctcagcaatgcctggcatcgtgtccatgtctatgtctccccatgagcatggaaaggagccacctccacccctttccccacccattagcctcactgcttcagaaaaatctttcccacctttcaacttcttggatcacaactctggccttcctaagccatacccaagtacacatatagcacatttcacccaaggaccttccctctttggacactatgttacatacccctcttggcctttgaacctgtgccaggaagtgtgagctgttacagcaaggggctagaagtgaaaaaagtaattctggagacaagcactattttctcttcctaccccacctccatttctaatgcctactgccatcaaggccttgttttgcttttctttttggattgttcagagaaatgtgtgtggcatgtgtaagaaaagtgtatatactatcttatactacctctccaggttgccagagagttgcgaggagagcaaggggcacaaccgtctccctttatagttctacttttctaataaatagtctgtttaagatcataaaaaaaaaaaaaaaaaaaaaaaaaaaaaaaaaaaaaaaaaaaaaaaaaaaaaaaaaaaaaaaaaaaaaaaaaaaaaaaaaaaaaaaaaaaaaaaaaaaaaaaa

SEQ ID NO: 1663 - DNA, 1092 bp, HOMO SAPIENS
aggtgggaggaaaccgcctggagccgccgggagtggacgccgccgaggcccggagtcgcgcctgcagacacagcatctactcagcgtgggtcacctctgtgaacatcactgactgcaagcctccctcaatttctggtgcagcccatcagggacccacagcgcctgggaggatggtgcggatcttggccaatggggaaatcgtgcaggatgacgacccccgagtgaggaccactacccagccaccaagaggtagcattcctcgacagagcttcttcaacaggggccatggtgctcccccagggggtcctggcccccgccagcagcaggcaggtgccaggctgggtgctgctcagtcccccttcaatgacctcaaccggcagctggtgaacatgggctttccgcagtggcatcttggcaaccatgctgtggagccggtgacctccatcctgctcctcttcctgctcatgatgcttggtgttcgtggcctcctcctggttggccttgtctacctggtgtcccacctgagtcagcggtgacctctgagggctgataggggtgggtttgttgagagggacttgctgggccttggtgtgagagcaggcatatttggaggggatctggtggtgccttgaaggtatgatcagagaggggaccacaggtgtgtgtttcccctttgtgttaagcgtgaggcagagggagacgttagtccagcatttccaaagtgtgggtgggtccgttggttcccaagatacttttaggtggtatggggcctgcattaagtggcacaaaatcagagcaagaaagcgatgcccttcccaattctctcaatccttttatgccgagaagatctcagctggatgccaacatgttccgatgcctgtggaagacatgccgacgtctcctctgcctagggagcaggacttgggcttagggcaggtggaaaaaattccagacttttttagcactgtttttgttttaatggtatatttttattggctactttattgtttaggacaagtggtagtggcattctatttattgtgaccttttcaataaatagatttaagtaaaaatgaaaaaaaaaaaaaaaaa

SEQ ID NO: 1664 - DNA, 2592 bp, HOMO SAPIENS; identical to SEQ ID NO: 559

SEQ ID NO: 1665 - DNA, 3431 bp, HOMO SAPIENS
gggggaggagggcggtcgtccggggttaggttgagggggggcgtcggtccgttctgggcgggggatgactcacagcccatcccatctcccagacgccgcccgcccgcgcagtgctagctccatggcttagcggaggaggcggcagtggcgagctggggggaggggggactcttattttgttagggggaccgggccgaggcccgaccggcctggcagggctcgcccggggccgggcgtcatgtctcatgcggccgaaccagctcgggatggcgtagaggccagcgcggagggccctcgagccgtgttcgtgctgttggaggagcgcaggccggccgactcggctcagctgctcagcctgaactctttgcttccggaatccgggattgttgctgacatagaattagaaaacgtccttgatcctgacagcttctacgagctcaaaagccaacccttaccccttcgctcaagcctcccaatatcactgcaggccacaccagccaccccagctacactctctgcatcgtcttctgcagggggctccaggacccctgccatgtcgtcatcttcttcatcgagggtcttgctgcggcagcagctaatgcgggcccaggcgcaggagcaggagaggcgtgagcgtcgggaacaggccgccgcggctcccttccccagtcctgcacctgcctctcctgccatctctgtggttggcgtctctgctgggggccacacattgagccgtccaccccctgctcaggtgcccagggaggtgctcaaggtgcagacccatctggagaacccaacgcgctaccacctgcagcaggcgcgccggcagcaggtgaaacagtacctgtccaccacactcgggcccaagctggcttcccaggccctcaccccaccgccggggcccgcaagtgcccagccactgcctgcccctgaggctgcccacactaccggccccacaggcagtgcgcccaacagccccatggcgctgctcaccatcgggtccagctcagagaaggagattgatgatgtcattgatgagatcatcagcctggagtccagttacaatgatgaaatgctcagctatctgcccggaggcaccacaggactgcagctccccagcacgctgcctgtgtcagggaatctgcttgatgtgtacagtagtcaaggcgtggccacaccagccatcactgtcagcaactcctgcccagctgagctgcccaacatcaaacgggagatctctgagaccgaggcaaaggcccttttgaaggaacggcagaagaaagacaatcacaacctaattgagcgtcgcaggcgattcaacattaacgacaggatcaaggaactgggcactctcatccctaagtccagtgacccggagatgcgctggaacaagggcaccatcctgaaggcctctgtggattatatccgcaagctgcagaaggagcagcagcgctccaaagacctggagagccggcagcgatccctggagcaggccaaccgcagcctgcagctccgaattcaggaactagaactgcaggcccagatccatggcctgccagtacctcccactccagggctgctttccttggccacgacttcggcttctgacagcctcaagccagagcagctggacattgaggaggagggcaggccaggcgcagcaacgttccatgtaggggggggacctgcccagaatgctccccatcagcagccccctgcaccgccctcagatgcccttctggacctgcactttcccagcgaccacctgggggacctgggagaccccttccacctggggctggaggacattctgatggaggaggaggagggggtggtgggaggactgtcggggggtgccctgtccccactgcgggctgcctccgatcccctgctctcttcagtgtcccctgctgtctccaaggccagcagccgccgcagcagcttcagcatggaagaggagtcctgatcaggcctcacccctcccctgggactttcccacccaggaaaggaggaccagtcaggatgaggccccgccttttcccccaccctcccatgagactgccctgcccaggtatcctgggggaagaggagatgtgatcaggccccacccctgtaatcaggcaaggaggaggagtcagatgaggccctgcaccttccccaaaggaaccgcccagtgcaggtatttcagaaggagaaggctggagaaggacatgagatcagggcctgccccctggggatcacagcctcacccctgcccctgtgggactcatccttgcccaggtgagggaaggagacaggatgaggtctcgaccctgtcccctagggactgtcctagccaggtctcctgggaaagggagatgtcaggatgttgctccatcctttgtcttggaaccaccagtctagtccgtcctggcacagaagaggagtcaagtaatggaggtcccagccctgggggtttaagctctgccccttccccatgaaccctgccctgctctgcccaggcaaggaacagaagtgaggatgagacccagccccttcccctgggaactctcctggccttctaggaatggaggagccaggccccaccccttccctataggaacagcccagcacaggtatttcaggtgtgaaagaatcagtaggaccaggccaccgctagtgcttgtggagatcacagccccacccttgtccctcagcaacatcccatctaagcattccacactgcagggaggagtggtacttaagctcccctgccttaacctgggaccaacctgacctaacctaggagggctctgagccaaccttgctcttggggaaggggacagattatgaaatttcatggatgaattttccagacctatatctggagtgagaggcccccacccttgggcagagtcctgccttcttccttgaggggcagtttgggaaggtgatgggtattagtgggggactgagttcaggttaccagaaccagtacctcagtattctttttcaacatgtagggcaagaggatgaaggaaggggctatcctgggacctccccagcccaggaaaaactggaagccttcccccagcaaggcagaagcttggaggagggttgtaaaagcatattgtaccccctcatttgtttatctgatttttttattgctccgcatactgagaatctaggccaccccaacctctgttccccacccagttcttcatttggaggaatcaccccatttcagagttatcaagagacactcccccctccattcccacccctcatacctacacccaaggttgtcagctttggattgctggggccaggccccatggagggtatactgaggggtctataggtttgtgattaaaataataaaagctaggcgtgtttgatgcgcttttaactttgaaaaaaaaaaaaaaaaaaaaaaaaaaaaaaaaaaaaaa

SEQ ID NO: 1666 - DNA, 1871 bp, HOMO SAPIENS
tttgtgcaaataaggtttctgtggtgagacaccagataaactcaacttcctctttcaacaacaaatgtgtcagttatcagcaggatccatgccgccagagtaaagctttctaccctttactccctgcaaagaaacaagagtgcttatcccagctaagctccagggtaatgttatcatgacagcttcaacttttagaccacaggcaaatgctttgttaaaactctatgctggtcattcccttcaggatttggcactcaccaacatacccttctttcaagtgaaaaggcatctcttttaatggtcctgacctttggaataggaagcatgtaccctggacagagcacttcaaactagaggaaccataaatccatggctaaccttgacaaatacactgaaacattcaagatgggtagcaacagtaccagcactgctgagatttactgtaatgtcactaatgtgaaatttcaatactccctctatgcaaccacctatatcctcatattcattcctggtcttctggctaacagtgcagccttgtgggttctgtgccgcttcatcagcaagaaaaataaagccatcattttcatgatcaacctctctgtggctgaccttgctcatgtattatctttacccctccggatttactattacatcagccaccactggcctttccagagagccctttgcctgctctgcttctacctgaagtatctcaacatgtatgccagcatttgtttcctgacgtgcatcagtcttcaaaggtgcttttttctcctcaagcccttcagggccagagactggaagcgtaggtacgatgtgggcatcagtgctgccatctggatcgttgtggggactgcctgtttgccatttcccatcctgagaagcacagacttaaacaacaacaagtcctgctttgctgatcttggatacaagcaaatgaatgcagttgcgttggtcgggatgattacagttgctgagcttgcaggatttgtgatcccagtgatcatcatcgcatggtgtacctggaaaactactatatccttgagacagccaccaatggctttccaagggatcagtgagaggcagaaagcactgcggatggtgttcatgtgtgctgcagtcttcttcatctgcttcactccctatcatattaactttattttttacaccatggtaaaggaaaccatcattagcagttgtcccgttgtccgaatcgcactgtatttccaccctttttgcctgtgccttgcaagtctctgctgccttttggatccaattctttattactttatggcttcagagtttcgtgaccaactatcccgccatggcagttctgtgacccgctcccgcctcatgagcaaggagagtggttcatcaatgattggctaaaattaagatatctctttaattacgcctttgtttacctacgttccttgtctttttccaaaggccagaattgtcaaccaatttctttaattgaacattgtaaaaaacaggaataagtacttttgtgtaatattcacagtcaacaggggtgtgatggtgaaggcagagtgtgaaaaacgtgagagaggaagagaaaatagatttacctgattcctctttaaaattcaagccactttcttatttaagaaacctagatcaagtttttacagatgtaaataaaagttgaatagtttaccttaaatttttttcaataagtaagttattgttaataatgcacagtaaatatgtgaatttttcctagatgtaaaaaaaaaaatctttcatataaagaccttaaattctgaaaaaaaaaaaaaaaaaaaaaaaaaaaaaaaaaaaaaaaaaaaaaaaaaaaaaaaaaaaaaaaaaaaaaaaaaaaaaaaaaa

SEQ ID NO: 1667 - DNA, 3096 bp, HOMO SAPIENS
aggcgcggctttcaggccaacatggccgtgctgctgctgctgctccgtgccctccgccggggtccaggcccgggtcctcggccgctgtggggcccaggcccggcctggagtccagggttccccgccaggcccgggagggggcggccgtacatggccagcaggcctccgggggacctcgccgaggctggaggccgagctctgcagagcttacaattgagactgctaacccctacctttgaagggatcaacggattgttgttgaaacaacatttagttcagaatccagtcagactctggcaacttttaggtggtactttctattttaacacctcaaggttgaagcagaagaataaggagaaggataagtcgaaggggaaggcgcctgaagaggacgaagaggagaggagacgccgtgagcgggacgaccagatgtaccgagagcggctgcgcaccttgctggtcatcgcggttgtcatgagcctcctgaatgctctcagcaccagcggaggcagcatttcctggaacgactttgtccacgagatgctggccaagggcgaggtgcagcgcgtccaggtggtgcctgagagcgacgtggtggaagtctacctgcaccctggagccgtggtgtttgggcggcctcggctagccttgatgtaccgaatgcaggttgcaaatattgacaagtttgaagagaagcttcgagcagctgaagatgagctgaatatcgaggccaaggacaggatcccagtttcctacaagcgaacaggattctttggaaatgccctgtactctgtggggatgacggcagtgggcctggccatcctgtggtatgttttccgtctggccgggatgactggaagggaaggtggattcagtgcttttaatcagcttaaaatggctcgtttcaccattgtggatgggaagatggggaaaggagtcagcttcaaagacgtggcaggaatgcacgaagccaaactggaagtccgcgagtttgtggattatctgaagagcccagaacgcttcctccagcttggcgccaaggtcccaaagggcgcactgctgctcggcccccccggctgtgggaagacgctgctggccaaggcggtggccacggaggctcaggtgcccttcctggcgatggccggcccagagttcgtggaggtcattggaggcctcggcgctgcccgtgtgcggagcctctttaaggaagcccgagcccgggccccctgcatcgtctacatcgatgagatcgacgcggtgggcaagaagcgctccaccaccatgtccggcttctccaacacggaggaggagcagacgctcaaccagcttctggtagaaatggatggaatgggtaccacagaccatgtcatcgtcctggcgtccacgaaccgagctgacattttggacggtgctctgatgaggccaggccgactggaccggcacgtcttcattgatctccccacgctgcaggagaggcgggagatttttgagcagcacctgaagagcctgaagctgacccagtccagcaccttttactcccagcgtctggcagagctgacaccaggattcagtggggctgacatcgccaacatctgcaatgaggctgcgctgcacgcggcgcgggagggacacacttccgtgcacactctcaacttcgagtacgccgtggagcgcgtcctcgcagggactgccaaaaagagcaagatcctgtccaaggaagaacagaaagtggttgcgtttcatgagtcgggccacgccttggtgggctggatgctggagcacacggaggccgtgatgaaggtctccataacccctcggacaaacgccgccctgggctttgctcagatgctccccagagaccagcacctcttcaccaaggagcagctgtttgagcggatgtgcatggccctgggaggacgggcctcggaagcactgtccttcaacgaggtcacttctggggcacaggacgacctgaggaaggtcacccgcatcgcctactccatggtgaagcagtttgggatggcacctggcatcgggcccatctccttccctgaggcgcaggagggcctcatgggcatcgggcggcgccccttcagccaaggcctgcagcagatgatggaccatgaagcaagactgctggtggccaaggcctacagacacaccgagaaggtgctgcaggacaacctggacaagttgcaggcgctggcaaacgcccttctggaaaaggaagtgataaactatgaggacattgaggctctcattggcccgccgccccatgggccgaagaaaatgatcgcaccgcagaggtggatcgacgcccagagggagaaacaggacttgggcgaggaggagaccgaagagacccagcagcctccacttggaggcgaagagccgacttggcccaagtagttgggaggtgttggctgcacgtgcgggtggtccgggaagtgagggctcactcagccaccctgagttgcttttcagctgaggtttgcacttcctctcgcggccctcagtagtccctgcacagtgacttctgagatctgttgattgatgacccttttcatgattttaagtttctctgcagaaactactgacggagtcctgtgtttgtgagtcgtttcccctatggggaaggttatcagtgcttcccgagtgagcatggaacacttcgagttcccagggttatagacagtcgttcccagtgtggctgaggccacccagaggcagcagagcattcagactccaaacagacccctgttcatgccgacgcttgcacgaccgccccagttcctgtggctccctcggaatgctaaggggatcggacatgaaaggaccctgtgagccgattgtcctatctccagcggccctgtcatccagctcactcatcaatggggccagtcaggcccaggcactgggctccggaggactcaccactgccccctgctgccatgtggactggtgcaagttgaggacttcttgctggtctagtcacgcatgcagtgttggggatgccttggtttttactgctctgagaattgttgagatactttactaataaactgtgtagttggaaaatctaaaaaaaaaaaaaaa

SEQ ID NO: 1668 - DNA, 1278 bp, HOMO SAPIENS
agtagagtgtgtctgggtcagctgagtgactacatcaaagctcccagccttgaaaaacacatgctgttcccaggcctcaagatattgaaacattaattagataatttaaagtagcgttttcttctacaatgtctgaagaagtgacctacgcgacactcacatttcaggattctgctggagcaaggaataaccgagatggaaataacctaagaaaaagagggcatccagctccatctcccatttggcgtcatgctgctctgggtctggtaactctttgcctgatgttgctgattgggctggtgacattggggatgatgtttttgcagatatctaatgacattaactcagattcagagaaattgagtcaacttcagaaaaccatccaacagcagcaggataacttatcccagcaactgggcaactccaacaacttgtccatggaggaggaatttctcaagtcacagatctccagtgtactgaagaggcaggaacaaatggccatcaaactgtgccaagagctaatcattcatacttcagaccacagatgtaatccatgtcctaagatgtggcaatggtaccaaaatagttgctactattttacaacaaatgaggagaaaacctgggctaacagtagaaaggactgcatagacaagaactccaccctagtgaagatagacagtttggaagaaaaggattttcttatgtcacagccattactcatgttttcgttcttttggctgggattatcatgggactcctctggcagaagttggttctgggaagatggctctgttccctctccatccttatttagtactaaagaacttgaccagatcaatggatccaaaggatgtgcttattttcaaaaaggaaatatttatatttctcgctgtagtgctgaaattttttggatttgcgagaagacagctgccccagtgaagactgaggatttggattagtatgcttcttccaaattctccaagaagtaagagacttgtgagtaagctcatatgaggaaagaggaaactacggtaccagagccaaaccagcttttaaaatgactgtgtatttacattatcagacaaatgaacttgtttaacagaacattctccagttccttgtctgacgtcttctgatttgatgttattattcggtcttaaaattatacctggggacaaaggggaatagccatactatggccctatgattgtctcagaatcatttcactgaatttctttgctttctcaaataaagactcctttctttcattattattat

SEQ ID NO: 1669 - DNA, 447 bp, HOMO SAPIENS
  misc_feature (364)..(364): n is a, c, g, or t
ctgcaaagcagtattcctcagcctttggttgggtctttgatatgtggtgatatcctgggtttcaactcttctacaaggttttcttatatataatgtaggatagatacagttgttctgtgatttgggatggttataaaattaaataaccaaatggaaaggcagaaagtgagaaatgttaagtgacattgtagtaccatataatattttagatcttgacttaggcatatacaaagagtatcttacttattttatacaaagtctacaatgttatgatgctacaaagaatgagttaagaatgagtaaacgctaggttttatggagactcataagaaaatataaagattttcgtcttactattcaagtntgaaatgcataaatgaagctttataattggtgtgcaaaaccagacatagaacctgcccttctggactctctggtcaagtgaag

SEQ ID NO: 1670 - DNA, 403 bp, HOMO SAPIENS
  misc_feature (81)..(81): n is a, c, g, or t
  misc_feature (83)..(84): n is a, c, g, or t
  misc_feature (86)..(86): n is a, c, g, or t
  misc_feature (89)..(89): n is a, c, g, or t
acacatcttacctccactaatgtcagtggggcccagtggagaactgagccttcactcccatctggcaagtgatgggtggcngnncnagntggcattctgcttccttctctaccctcccctgttgttagctgggtcctttggggagctgagcttttggctttatagtgcagcaacaaagaagtttgagtcagccctctgctttcctcctccctgtcatcagtggggcccagcagggaggtgagcttacacccctactcagaggcagtgaggtgatacaggttggtgccctactttcattgggactaagagtggagctgaacttccgtcccacccatctgcaacaaaacagtgtgagtcattgctccacttttgcctgggtgatgttggtgcggcccagagggaa

SEQ ID NO: 1671 - DNA, 3449 bp, HOMO SAPIENS
cggacgatgccgtgacgcggcacggcgacactgttggcaatatgagcgcacccctgtagagggagcccttcggtcctggaggcggcgcggcgtgaagacaggttgctatttgagagcgttcccttgaagcccctcagagagtgggggaggggcggcggacggcaagcggttcctgtctgcgcttgcgccggcgcctctgccgacccggcctgcacgcacgcgcatgcccgtagcgcgcggagccgcggtggccggcagcactgcgcgtgcgcggtgaggagcccgctaaggagcggcgctggcggacgtcgggctggctgcccgtgacgtcgtgcggagagctttaaagtgcgggccgggccgggcgtccgagggtctggtcgggagtcgggccgcgtctccgcagcagccctccgcggcatgaggcgctgccggcgcccctgccccgcgggacgtggagaaggtggaggaggaagaagccccgttgtcgccaccgttgcatgacccgccgctcctgaggccctaccccacgcccggaccctcgacgccccccgccgggtcccccactcacgcatgggggttcggcgctaaggacccccctccctccgggggccccggggcgcgtccccttagagccatgcccggctgccccgcccgccccggaggaccctagagcagcgtcgtgggggccatggcggccgccagcggctacacggacctgcgtgagaagctcaagtccatgacgtcccgggacaactataaggcgggcagccgggaggccgccgccgctgccgcagccgccgtagccgccgcagccgcagccgccgctgccgccgaaccttaccctgtgtccggggccaagcgcaagtatcaggaggactcggaccccgagcgcagcgactatgaggagcagcagctgcagaaggaggaggaggcgcgcaaggtgaagagcggcatccgccagatgcgcctcttcagccaggacgagtgcgccaagatcgaggcccgcattgacgaggtggtgtcccgcgctgagaagggcctgtacaacgagcacacggtggaccgggccccactgcgcaacaagtacttcttcggcgaaggctacacttacggcgcccagctgcagaagcgcgggcccggccaggagcgcctctacccgccgggcgacgtggacgagatccccgagtgggtgcaccagctggtgatccaaaagctggtggagcaccgcgtcatccccgagggcttcgtcaacagcgccgtcatcaacgactaccagcccggcggctgcatcgtgtctcacgtggaccccatccacatcttcgagcgccccatcgtgtccgtgtccttctttagcgactctgcgctgtgcttcggctgcaagttccagttcaagcctattcgggtgtcggaaccagtgctttccctgccggtgcgcaggggaagcgtgactgtgctcagtggatatgctgctgatgaaatcactcactgcatacggcctcaggacatcaaggagcgccgagcagtcatcatcctcaggaagacaagattagatgcaccccggttggaaacaaagtccctgagcagctccgtgttaccacccagctatgcttcagatcgcctgtcaggaaacaacagggaccctgctctgaaacccaagcggtcccaccgcaaggcagaccctgatgctgcccacaggccacggatcctggagatggacaaggaagagaaccggcgctcggtgctgctgcccacacaccggcggaggggtagcttcagctctgagaactactggcgcaagtcatacgagtcctcagaggactgctctgaggcagcaggcagccctgcccgaaaggtgaagatgcggcggcactgagtctacccgccgccctcctgggaactctggctcatccttacgtagttgcccctccttttgttttgagggttttgtttttgttcattggggggtttttgttttttgttttttgttttttttgattctatatatttttccttggttttgttgcctgttagggctgaagaatagaattggccaggacctaggttctcatattcttggtattcctcctggatggaaaggctgttggcatcaataggggacagaggctgatgctggagtggccagtagaggtggtggagcagagcagccatcttttaagtggggctgtatcaggctgggtttatttaaaagcaacaaaatgttttggttaagaaaattattttgctttcagtgtaaatcttcgcagtgttctaaacaaagttcagtcttctgctcgcccctttccctcactgatgtctgcacttggttgaggtctcctggagcctcacaggctctgctgttctccacttctcacctgccatccacgccctgcaagctcatgcaaacaccctttcttcctcctgcggcagagttgttcaggttgcctgggcaggggcttaaacagtgccagcccctgccatcccaaagctattgttaagccccccaggcgtcctccacccacgcccactagcctgccatgtccacagttccttgggctgctgaggggctagtgcagtggtcctgacctctcttatcaagagcacacttctttgctggttgctccttttgagcatatgcgtgtgattatttggaacagttagacttgccacgttgggtcagttttagaaattgtttctagctagagggactggtgtccttccaagtctagcatttggggtatggaaaattgttgtggtgtgtggtagggtttttgttttcttttttgagttttttttccccctttagtctcctggctttttcctttcccttcccttctccactggccagcttgggcctcatcctcatgtcatccttctaggaaggcgcctgccccatcttgtctgccggcagcatgcatccaaggccagagctcaggcctgcagactgggctggtgcctcctccgcttcagggtatgggagttggtgaaggggctttcaaaaaataataaggaaaaaaaggtaaagtctttggtagcttctatccactcagatcctggaaggcagcaaggttttgtggatctagattcattaggaatgtcttcttgtcagccaggccaggacccgggcttgccaagagcagaggccctcccagcaaccaggataccaccactttgggggctttgtgtacagaggtccgggtctgagacctcataggctgcagaaatctggggcagccaccatcaagaagcccctctcaggggccagaactcctttgccagcgtggatttctcaagtcgggactgcataattaaagcagttgcagttttattttttttacagcttttttcccaaaaatgatttgtagttgtgtgtgcagcacttcgccctgatatgtgtgctctacaataaaaaccaaatctaatatattttgaaaaaaaaaaaaaaaaaa

SEQ ID NO: 1672 - DNA, 1485 bp, HOMO SAPIENS
tccggggcgggggcggggcctcactctgcgatataactcgggtcgcgcggctcgcgcaggccgccaccgtcgtccgcaaagcctgagtcctgtcctttctctctccccggacagcatgagcttcaccactcgctccaccttctccaccaactaccggtccctgggctctgtccaggcgcccagctacggcgcccggccggtcagcagcgcggccagcgtctatgcaggcgctgggggctctggttcccggatctccgtgtcccgctccaccagcttcaggggcggcatggggtccgggggcctggccaccgggatagccgggggtctggcaggaatgggaggcatccagaacgagaaggagaccatgcaaagcctgaacgaccgcctggcctcttacctggacagagtgaggagcctggagaccgagaaccggaggctggagagcaaaatccgggagcacttggagaagaagggaccccaggtcagagactggagccattacttcaagatcatcgaggacctgagggctcagatcttcgcaaatactgtggacaatgcccgcatcgttctgcagattgacaatgcccgtcttgctgctgatgactttagagtcaagtatgagacagagctggccatgcgccagtctgtggagaacgacatccatgggctccgcaaggtcattgatgacaccaatatcacacgactgcagctggagacagagatcgaggctctcaaggaggagctgctcttcatgaagaagaaccacgaagaggaagtaaaaggcctacaagcccagattgccagctctgggttgaccgtggaggtagatgcccccaaatctcaggacctcgccaagatcatggcagacatccgggcccaatatgacgagctggctcggaagaaccgagaggagctagacaagtactggtctcagcagattgaggagagcaccacagtggtcaccacacagtctgctgaggttggagctgctgagacgacgctcacagagctgagacgtacagtccagtccttggagatcgacctggactccatgagaaatctgaaggccagcttggagaacagcctgagggaggtggaggcccgctacgccctacagatggagcagctcaacgggatcctgctgcaccttgagtcagagctggcacagacccgggcagagggacagcgccaggcccaggagtatgaggccctgctgaacatcaaggtcaagctggaggctgagatcgccacctaccgccgcctgctggaagatggcgaggactttaatcttggtgatgccttggacagcagcaactccatgcaaaccatccaaaagaccaccacccgccggatagtggatggcaaagtggtgtctgagaccaatgacaccaaagttctgaggcattaagccagcagaagcagggtaccctttggggagcaggaggccaataaaaagttcagagttcaaaaaaaaaaaaaaaaaaa

SEQ ID NO: 1673 - DNA, 333 bp, HOMO SAPIENS
aagggcagttctttataatacatgaaaagcctagggtttaataaccacttagtaaggtatgttatggatatcttattttagagtaagaatataaggcatagccatatttatgaaggtagtaatactctactaatcaatacttagaagtttttgttatgactaatctgaatgctttttagtttttccttaatctagttatgttggtaatttataagtcagttttcagattaggaaagaaggtatttgagggtgttccatttccactgaatagtaagatgatgcttacttagatttccacagctgtttgaaagctctgtatttggctataacgga

SEQ ID NO: 1674 - DNA, 1771 bp, HOMO SAPIENS
ggcggccaggccgggcgcggagtgggcgcgcggggccggaggaggggccagcgaccgcggcaccgcctgtgcccgcccgcccctccgcagccgctacttaagaggctccagcgccggccccgccctagtgcgttacttacctcgactcttagcttgtcggggacggtaaccgggacccggtgtctgctcctgtcgccttcgcctcctaatccctagccactatgcgtgagtgcatctccatccacgttggccaggctggtgtccagattggcaatgcctgctgggagctctactgcctggaacacggcatccagcccgatggccagatgccaagtgacaagaccattgggggaggagatgactccttcaacaccttcttcagtgagacgggcgctggcaagcacgtgccccgggctgtgtttgtagacttggaacccacagtcattgatgaagttcgcactggcacctaccgccagctcttccaccctgagcagctcatcacaggcaaggaagatgctgccaataactatgcccgagggcactacaccattggcaaggagatcattgaccttgtgttggaccgaattcgcaagctggctgaccagtgcaccggtcttcagggcttcttggttttccacagctttggtgggggaactggttctgggttcacctccctgctcatggaacgtctctcagttgattatggcaagaagtccaagctggagttctccatttacccagcaccccaggtttccacagctgtagttgagccctacaactccatcctcaccacccacaccaccctggagcactctgattgtgccttcatggtagacaatgaggccatctatgacatctgtcgtagaaacctcgatatcgagcgcccaacctacactaaccttaaccgccttattagccagattgtgtcctccatcactgcttccctgagatttgatggagccctgaatgttgacctgacagaattccagaccaacctggtgccctacccccgcatccacttccctctggccacatatgcccctgtcatctctgctgagaaagcctaccatgaacagctttctgtagcagagatcaccaatgcttgctttgagccagccaaccagatggtgaaatgtgaccctcgccatggtaaatacatggcttgctgcctgttgtaccgtggtgacgtggttcccaaagatgtcaatgctgccattgccaccatcaaaaccaagcgcagcatccagtttgtggattggtgccccactggcttcaaggttggcatcaactaccagcctcccactgtggtgcctggtggagacctggccaaggtacagagagctgtgtgcatgctgagcaacaccacagccattgctgaggcctgggctcgcctggaccacaagtttgacctgatgtatgccaagcgtgcctttgttcactggtacgtgggtgaggggatggaggaaggcgagttttcagaggcccgtgaagatatggctgcccttgagaaggattatgaggaggttggtgtggattctgttgaaggagagggtgaggaagaaggagaggaatactaattatccattccttttggccctgcagcatgtcatgctcccagaatttcagcttcagcttaactgacagacgttaaagctttctggttagattgttttcacttggtgatcatgtcttttccatgtgtacctgtaatatttttccatcatatctcaaagtaaagtcattaacatcaaaaaaaaaaaaaaaaaaaaaa

SEQ ID NO: 1675 - DNA, 4846 bp, HOMO SAPIENS
atcttggattccgcggtagcggaggcggcggtcaggcgccgcttctggggagtggcctttcttttcccctccctcccggttcggtggcggcggctcctcccactgggggggggggtggcgcggcggcggtggcatctgcggccatggcggcgactactgccaaccccgaaatgacatcagatgtaccatcactgggtccagccattgcctctggaaactctggacctggaattcaaggtggaggagccattgtccagagggctattaagcggcgaccagggctggattttgatgatgatggagaagggaacagtaaatttttgaggtgtgatgatgatcagatgtctaacgataaggagcggtttgccaggtcggatgatgagcagagctctgcggataaagagagacttgccagggaaaatcacagtgaaattgaacggcggcgacggaacaagatgacagcctacatcacagaactgtcagatatggtacccacctgtagtgccctggctcgaaaaccagacaagctaaccatcttacgcatggcagtttctcacatgaagtccttgcggggaactggcaacacatccactgatggctcctataagccgtctttcctcactgatcaggaactgaaacatttgatcttggaggcagcagatggctttctgtttattgtctcatgtgagacaggcagggtggtgtatgtgtctgactccgtgactcctgttttgaaccagccacagtctgaatggtttggcagcacactctatgatcaggtgcacccagatgatgtggataaacttcgtgagcagctttccacttcagaaaatgccctgacagggcgtatcctggatctaaagactggaacagtgaaaaaggaaggtcagcagtcttccatgagaatgtgtatgggctcaaggagatcgtttatttgccgaatgaggtgtggcagtagctctgtggacccagtttctgtgaataggctgagctttgtgaggaacagatgcaggaatggacttggctctgtaaaggatggggaacctcacttcgtggtggtccactgcacaggctacatcaaggcctggcccccagcaggtgtttccctcccagatgatgacccagaggctggccagggaagcaagttttgcctagtggccattggcagattgcaggtaactagttctcccaactgtacagacatgagtaatgtttgtcaaccaacagagttcatctcccgacacaacattgagggtatcttcacttttgtggatcaccgctgtgtggctactgttggctaccagccacaggaactcttaggaaagaatattgtagaattctgtcatcctgaagaccagcagcttctaagagacagcttccaacaggtagtgaaattaaaaggccaagtgctgtctgtcatgttccggttccggtctaagaaccaagaatggctctggatgagaaccagctcctttactttccagaacccttactcagatgaaattgagtacatcatctgtaccaacaccaatgtgaagaactctagccaagaaccacggcctacactctccaacacaatccagaggccacaactaggtcccacagctaatttacccctggagatgggctcaggacagctggcacccaggcagcagcaacagcaaacagaattggacatggtaccaggaagagatggactggccagctacaatcattcccaggtggttcagcctgtgacaaccacaggaccagaacacagcaagccccttgagaagtcagatggtttatttgcccaggatagagatccaagattttcagaaatctatcacaacatcaatgcggatcagagtaaaggcatctcctccagcactgtccctgccacccaacagctattctcccagggcaacacattccctcctaccccccggccggcagagaatttcaggaatagtggcctagcccctcctgtaaccattgtccagccatcagcttctgcaggacagatgttggcccagatttcccgccactccaaccccacccaaggagcaaccccaacttggacccctactacccgctcaggcttttctgcccagcaggtggctacccaggctactgctaagactcgtacttcccagtttggtgtgggcagctttcagactccatcctccttcagctccatgtccctccctggtgccccaactgcatcgcctggtgctgctgcctaccctagtctcaccaatcgtggatctaactttgctcctgagactggacagactgcaggacaattccagacacggacagcagagggtgtgggtgtctggccacagtggcagggccagcagcctcatcatcgttcaagttctagtgagcaacatgttcaacaaccgccagcacagcaacctggccagcctgaggtcttccaggagatgctgtccatgctgggagatcagagcaacagctacaacaatgaagaattccctgatctaactatgtttccccccttttcagaatagaactattggggtgaggataaggggtgggggagaaaaaatcactgtttgtttttaaaaagcaaatctttctgtaaacagaataaaagttcctctcccttcccttccctcacccctgacatgtaccccctttcccttctggctgttcccctgctctgttgcctctctaaggtaacatttatagaagaaatggaatgaatctccaaggcttttaggactgtctgaaaatttgaggctgggtgaagttaaaacacctttccttatgtctcctgacctgaaattgtatagtgttgatttgtgctgagatcaagaggcaggttagaagaacctgacatccactgtttgccttggatagtatggcttgtttttggaaagaaattctgaagagagtggaggagaggagaaatgtcctcatatttgaggaccatgaaacattgtaggtatatatggggctttagcaagtttgagcataggctctttttgctgcctgtgagcagtccctctggaaagaaacatgtgagtaagtgagagagagtgtgtgtgtatgtgtgtgtgtgtgtgtgtgcgcacacatgcttctgtatttcactctttctccctattagggagttatgcaaaatttgtccccgattttacctttgtctttctgtgtacttttcaaagagtcctaaggagttaaatcttccaggtattttccacttagtattgcagccaaagaatatttaaataaacgtctttgctgcgcttgcatccatgcccagccaatatacaactgtaaagcaaatatagaaagtcggctgttgatacgattgtctgttatcgaacacattcagtgataaagctgggttactgctgcttttggtgctctcaccttatctggaagatctgcaaacattacctaaataggctggcaagataaacactttctggaacccgagacttggccataaagataatgctgcatttttctgtcagaatcacatatgatgtgtgttctgtagaggttatttctgcatggaaactcaacttcttggattagccgtcccagtgaaaatcctcattgttggagtgtaaaccaaatacgaagccctcttgcaaagtagcctctttcatcccatactcaaaatacccagtttagcaagcaactgagatttaagtctctctggccctaagaggtttttcctctttgctccctccaatcttgagattgggttttgctttagagtgcaagtatcataattccgtatgatagatggggcctggacacccatctcaacagggtcacttggtaattaacaatagccatataaatgcggatacaggttactaccctcaccctttaccttcctcaggtaacagtcgtagataccagcttttttttttttttttttaaattggctttggccagtagctaaagtgcaagactgaattaatgagaagatatattaaatgtagtcataggggactgaggagcaagggtggccttgaagaggccaaaggaatgtccatttgctgagtttcccttccttatgtctccagtctggtgccaggtagtggagtaaaaaaggagacagtttatttttttattctatgtgcacacttacagtatacatatatatttatatcacaatttacgaaaccaaaaagttgagtttccaatggaacccttgttttttaataatcgactttttaaatgtgatcaggactataatattgtacagttattatagggcttttggggaaggggaggatagcgagaagatgctctgggggttttgtttttgcttttccttcagggttttatttttgactgttttgttttcttgttggccatttctgtattgctggcatctgtgctaagctttacagtggcaaaaataatgacatgtagcaaagattttcaaacaaaatattttttccttttgtaaaatttcttgtgttgtgtgatcttgattgcggctttatcattcctttccagttcataaacaacaggcacccacaaccagaggaatctatagtttaagctccagacatacaaacataaggcacattgtgtctttaatttcaggaatcagaaatcatagggttctgatcacattgcacgcctcccccctcacttgtcctcctgatcctgacacattctgagtaacatcagcaggaatgctctgaccatgaggtgggggttttggggtgggcgttgcctgggttcttgggagagaggggaagagtcgggacttgaaaaccactagggcacatctggatgccttcccccagtatgtccttttctggattaaaatgagtgaaatttaaactgaaaaaaaaaaaaaaaaaaaaaa

SEQ ID NO: 1676 - DNA, 7472 bp, HOMO SAPIENS
gagtcattgcagttttcagtagaggtgtacttctgagaagtggcttcttgggtcttcatgcagccatggatctggataaaccatctgtttggggctcattaaaacagcggaccaggccattgttgatcaacttgagcaagaagaaggtgaaaaagaacccaagtaagcccccagatctacgggcaaggcatcacttggaccgccgtctcagcctctctgtgcctgatctcctggaggctgaggccttggccccagagggccggccttactccgggccacagtcttcctacacctcggtgcccagcagtctgtccactgcagggatctttcccaagagcagcagtagctccttgaaacagtctgaagaagaattggattggagccaggaagaagccagtcacctccatgtggtggaaacagactcagaggaggcctatgcctctcctgctgagcggagacgggtgtccagcaacggcatctttgatcttcagaaaacttcccttggaggggatgcaccagaagagccagagaagctatgtggaagcagtgacctgaatgcttctatgacatctcaacattttgaagaacaatctgtaccgggggaagccagtgatggcttgagtaacctccccagcccttttgcgtacctcctcaccatacacctgaaggaaggccggaacctggttgtccgagatcgctgtggcacaagtgatccttatgtgaaatttaagctgaatgggaagacgctgtacaaaagtaaagtcatatataagaacttgaacccagtatgggatgagatagttgtattgccaatccaaagccttgatcaaaagctacgtgtgaaggtatatgatcgagatttaaccacatctgatttcatgggttctgcatttgtcattctcagtgatcttgagcttaacagaacaactgaacatattttaaaactggaagatccaaacagtttagaagatgacatgggagtgatcgtgttaaatttgaacctagtggtaaaacagggtgatttcaagagacaccgttggtcaaatcggaagcgattaagtgccagcaagtcctctttgatacgcaacctacggctctctgagtccttgaaaaagaaccaactctggaacgggattataagtataactttgttggaagggaagaatgtctcaggaggaagcatgacagagatgtttgtccagttaaaactgggagatcagaggtataaaagtaagacactgtgtaagagtgcaaatccgcagtggcaggaacagtttgactttcactacttctctgacaggatgggcattttggacattgaagtgtggggaaaggacaacaaaaagcatgaggaacgtctgggcacgtgtaaagtggatatctcggcactccctctgaagcaagccaactgcctggagctgccactggacagctgtctgggggctctccttatgttggtcacacttacaccctgtgcgggggtctccgtctctgatctgtgtgtctgccccttagcagacctcagcgaaagaaagcagattacccagcgatattgcttacagaactccctgaaagatgtgaaagacgtcggcattctacaagtgaaggttttaaaggcagcagatctcttagcggcagatttctcagggaagagtgacccattttgcttgttggagttaggcaatgaccgacttcagacgcataccgtctacaaaaacctcaaccctgaatggaacaaagtttttacatttcccattaaagatatccatgatgttttggaagtgacagtgtttgatgaagatggagataaacccccagattttcttggaaaagttgccattcccttgctgtccattagagatggacaaccgaattgttatgtactaaagaataaagatttagaacaagcttttaaaggagttatttacttagagatggaccttatatataatccggtgaaagcaagtattaggacttttactccccgggaaaagcgctttgttgaagacagccgcaagctgtccaaaaagatcttatcaagagatgtggaccgtgtgaaaagaatcactatggcaatatggaatacaatgcagttccttaaaagctgcttccagtgggaatccacattaagaagtacaatagcattcgcggaatctgagaaaaaggggttgattgaaagaatctatatggtacaggatattgtttcaactgttcaaaacgtcttggaggaaatagcttcttttggagaaaggattaagaacacatttaactggacggtccccttcctttcatctctggcctgtttgattctggcagcagccaccatcattttgtatttcattccactgcggtacatcattttaatctggggcataaataaatttactaagaagcttcgaaatccctattccatcgacaataatgagctactagacttcctctctagggtaccgtctgatgttcaaaaggtgcagtatgcagaattgaaactctgcagcagccacagccccctgcggaagaagcgcagcgctctctagggcacacaccgactttggacagcagcacccaatattgtgtttggttgagtagaccaatgttatggctgtttcagtggtacccaaggtgtccttctgaaatgcatgccctgtggcaccctctgtatacttcctcctccttcacgtgcacagacatacacacatgtgcacacaccctcatgcatgggtgtcctagttgcgtagagggtcagcccagcgaaaagcaacaaccccaagactgtgaaagactaacatccattctgaaataggagataacaaggctgccatggatctgaacaccaccttccttgagaacagccaggagcccacttggattcaagagtgactttgaacttgttttcacacctccaacagactctcattaagattcagttatttccgctccccagccccacactcctttcagattatcgttcatgggcgtaagtctcttctcagagttaacaagtctttggtagtcatcctctgtccaaatattgtatattattaaaaggcatttttaataattaccagaattagctcaaacctttagggatctttcagccatgattattaaggatatgtatgtgaatttttgggaaacctctcggtgctggatgccagcctacagcagggtccattgctggcaatggatggcccaggaaggtccctagagatcactcacttgaaaaatgagggtcccatgaaagtatttggttgccttctgatgccacttcttctcactttactttttgcttattttcaaaatattataaaatgtcaacatataatttcagaaaggcaggtgggggtaggggagaaatgaatgaataaattctctaggtatttagaaagataagaaactgaagaccgagagactaataaggctgcttacctaattattataatcatttcatttgcctgaatgttttaagcaggaagtagaaatactttggctgcccaaatgtatcttttgttcctcttagaagtaaaataagctacatacaataaaaatttatttcagaaccccatttctagaaaataccaccccagagtcctcatttgatagcatctgtctcctgcagacctcatcattccacagtatttccctgccatgtaaaaatcctgactttgtgcgtatataaaatgtatgcaattaagtctgtttaaatgatatttaagttttaaagactgtattttgttgacacatactttgtgcagtttttatgtatgtatgtattataaaaaaagttaaggttaaaaagatctcatttaatagtgagttcactatttttttttttttgtctctgggttgtaatttaataatcttcaaacaaaatgtttacgaaaaatgccaaagattctaaatcttatcatcccgtgtctgtttttcttcatgttgtatctcactgggttgctttctggctgagccagaattctgcatgatttgatttacttcaagttaatgaagctggctggaaaagagccttgcagaaattataaaagctccagtaaatctcgtagttgtacatacaatagatacccaagaacctcttttgttaaaccagttactcaatcttctgtgtaaacaatgcctcattgtcttgcttctaactatcatctagtttatcatagtctgtcattttgtaacgacctaagtcagacatttttaaacagacatgtgagatctgatcagtcatttgaatgaaaactttcagcagcaaaataaccccttatttatttaaaagtggaaccaatactttattgttgttcttttgctatagaatttcaaaatgaaattatttgcccgacaagaaggcatcattagttagacttgtttcctctgtagcccgattgaaattctcagtgttaagtttaggacccaaacaccagctgggacgtaagagcaggaccgaatcaaccttgaataaactgtatatagaaaacaattgttagttgattaagtagacattggatgtttgttagaaaggaatgttagttgtaagtgacatgttaagatttatacaattgtcaaaaacttttaggaaagattccagaatgcttttgataaaatttatcgattgtggattcacagtgtgataattaagtagggatgttgaagtcttgccaagttttcctggttcccttctcaaactttatcttcccatttctagccctgtctctctatcttacaggcatctacacctcagcaagtcagaaactaaacatcatctgtctctccctgtcttcagaaccccaaccctcataatctccttccagcttccttatttcccttaccaggactggcattttctgggcttggaatttctcggtcatcctctttttttttgttcctcgtgctgttgtcctcgtctcccaacccctaaagcctagtaggtccagtgtcaatgcattaaccacttctgttctgatttccaccacccaagtggaggccttcataacctctcagacgtcacggccatgatgccagttacattatgcctagttaatcttcattcagactggaaggacctgcccccagttgtttctttctgaatagattctactctccttcaacacttccaaagtctcctgccccaaagaggcttagttagtcctgtggctggatgtgactccaacttccttttttgtaccatcacatctttcatatctttctggcatctgccatacatcataagaggctttgaccactgtcctccactgaatagcccattacagctagcacctaatagttactcaggaaataaatacatgtttaacaggccaggtcgtagagattatttttctttctctgccttttcatgtgctgctttcagaacagagggctggattggatagattagtatgatctatcctggagattcatttcttgcattaagagcttattttgtgtgatattatttataatccctgactatgtcaattataaacttttaaattatgtcttatatttgaagttcttacctacatatcagaggaaaatataatgtttatttctaggtggtaaaacaatcttctggattcttttttctttacttgtaaattatcatttaacaagtctatattgaatgccgataattttctggaacaaaacagactacattcccttggtaaagccagacattaaacagatactttcaagcaacagcatgccatgctcagatttaagtttgaaaaatattctagctgcaatggatagcctagcaattttcaaagtttagagaagttattaatattagccctttgtagtactcctgataaatgaataacaccctggactttcaaatagtggcactgggaaaaaagtaagtagaattgagagatggtgaagagataaagtgagcaggacttaacaattgctggactatgggatgagggagcgtagagtcaaggatggctctcagtccctaggtctccaggtctaggaagatggtgttacctttcactaagggagagaactgtaagaactgctgtgagaggaccacaggagtccagttttagcgctgaatctcaggtgactgaaaagcatccaaataggaatgtcagcaaggtaatggaatatatagttctcagagaagtaacacactgtacttgagatgtacacaagttaaaggcaaacattgtatatgaaaagtgatcaaaactacatgcttcaagaaattaaaccttgaagaactcaacagttaatgtcatatatagaaaggcaagtcagttaagagtgtaaatagaaacgggtaaatacagaggagaaaaacagtaagcatggactgtcctagaattcagtggcagagcatactgcaagaaagctgatgtggtcaataatatcaaatgccgctgagatcacataagtacagaatcatgaccttaatggtttgacagtttggaagcaccctggcaacaagccatttcagtggaatggtagaaatggaaaccacgctgggttgagaagtgagtggatgtgaaaatatggggcctctgaatggaggtaacccttgaaaaattccactgtggagaagaaaggagagagagagggctggaatttggaatgaaaggagatatttgggattattttagtaagaaaacagaggtgtcatgacctcagtgtaaccctattagctgcaaaaaattcttcatgggcttgagatggagttagccatattcattattgaaaactatgttctgcacttatacattgttggttggagtgtaaattagttcaaccgctgtggaagacagggtgggtgtttcctcaaaaacctaaagacagaaataccatttgacccagcaatcccataactgggtatgtacccaaaggaatataaattgttctactataaaaacacatgcacacacatgttcactgcaacactatttacaatagcaaagacactggatcagtctaaatgcccatcattgatagaatggataaagaaaatgtggtagaggtacaccatggaatactatgcagccataaaaaagaatgagatcatgtccttttgcaggaacttggatacagctggaggccattatccttagcaaactaatgcagcaacagaaaaccaaataccacatgttctcatttataggtaggagttaaatgatgagaacacatggacatgtagaagggaacaaaatacactgggggctattggagggtgaagggtgaaaggaggaagaggatcaggaaaaataatgagtaccaggcttaatacatgggcgatgaaataatctgtatgacaagcctctctgacacagtttacctatgtaacaaacctgcacagttacccctgaactttaaaaaaaactatgttctatcaaaacctgcctctcatttatgtattaggaatcttgtgacaacggaacagttgaaaaattaaaataaaaattgcctgaaaatgcaaaaaaaaaaaaaaaaaa

SEQ ID NO: 1677 - DNA, 10802 bp, HOMO SAPIENS
ggaggaggccaacatggcggcgcgcagggctgggccgggccgcagccgcgcctgagcgcctcaccgcactagctcggctcgcaggacccaagcccgcacccagcctggcccggctgctgcggagcacccggggcaggaacgcaggggccaacctgggcgcggaggcggcgcggagggtgcgccgcgcggcccgccaggcccgggacccgtagcttcgccgtgcgctggccggggcggccaggaggcccaagccatggaatcggaggaggagcagcacatgaccacgctgctgtgcatgggcttctcagaccccgccaccatccgcaaggccctgcgcctggccaagaacgacattaacgaggccgtggcactgctcaccaacgagcggccgggcctcgactacggcggctacgagcccatggacagcggcggtggccccagccccgggcccggcgggggcccgcggggcgacggcggaggtgacggcggcggcggcggcccctcccgcggcgggagcaccggaggcgggggcggcttcgaccccccgcccgcctaccacgaggtggtggacgcggagaagaatgatgagaatggaaactgctcaggggaaggaattgaattccctacaacaaatttatatgaactggaaagccgtgttttgactgatcattggtccatcccttacaagcgagaagaatcactaggcaaatgcctgttggcatctacctacctagcaagacttggtctttccgagtctgatgagaattgtagaaggtttatggacaggtgtatgcctgaagcatttaaaaagctcctgacatcaagtgctgttcacaagtggggtactgaaattcatgaaggaatttacaacatgttgatgctattaatagaactggtcgcagagagaataaaacaagatccaattcccactggtctcctgggtgtgcttacaatggctttcaatcctgataatgaataccattttaaaaacagaatgaaagtgtctcaaaggaattgggcagaagtgtttggagagggaaatatgtttgctgtttcacctgtatcgactttccaaaaggagcctcatggatgggttgtggatttggtaaataagtttggagaattaggtggatttgcagcaatccaagccaagctccattcagaagatatagaacttggggctgtctcagcactgattcagcccttaggagtgtgtgcagagtacctcaattcctccgtggtacagcccatgctagacccagtcattcttactacaatccaggatgtacggagtgtagaagagaaagacctcaaagacaagagattggttagcatccctgagctcttgtctgccgttaagttactttgcatgcgcttccaaccggatctggtgacaattgtggatgaccttcgactagatattctattgcgcatgctgaaatcaccacatttcagtgctaagatgaattctctcaaagaagtaaccaaactaatagaagatagcactttatccaaatctgtgaagaatgctatagatacagacagattattagattggctagttgaaaactcagttctgtcgattgcactggaaggcaacatagaccaagcacaatactgtgaccgtataaagggaattattgaactcttgggtagtaaattgtcgttagatgaactcactaaaatttggaagatacagtcaggacaatcatctactgtgattgagaacattcatactattattgctgcagcggctgtgaaatttaattcagatcagcttaatcatttgtttgttctcattcagaagagctgggagactgagagtgatagagtaagacagaagcttttgagcctgattggacgaataggccgggaagctcgctttgagaccacttctggaaaggttttagacgtactctgggaactggctcaccttccaaccctgcccagtagccttattcagcaggccttggaggagcacctgacaatccttagtgatgcatatgcagtgaaagaagcaatcaagaggagctacatcatcaagtgcatagaagatattaagaggcctggagaatggtcaggtttggaaaaaaacaagaaggatggattcaagtcatctcagcttaataatccccagtttgtatgggtggtaccagctttgcgtcagctccatgaaattactcgctcattcataaaacaaacctatcaaaagcaagacaagagcattattcaagacttgaagaagaattttgaaatagtgaaattggtaacgggaagtttgatcgcttgtcatcggcttgcagctgctgtggccgggcctggaggcttaagtggctcgacactagtggatggccggtacacttaccgggagtatttagaggcacatctaaaatttctagcgtttttcttgcaagaagctactctgtatctgggctggaatcgtgccaaggagatctgggagtgtcttgtaactggccaggatgtttgtgaattagatagagagatgtgttttgaatggtttacaaaaggacagcatgatcttgagagtgatgttcagcagcagctcttcaaggagaaaattcttaaattggagtcatatgaaatcactatgaatggttttaacttatttaaaactttttttgaaaatgtgaatctttgtgatcatcgattgaaaagacaaggagctcagttgtatgtagaaaagctggaattgataggaatggatttcatttggaaaatagccatggaatcacctgatgaagaaattgctaatgaagctattcagctaatcataaactatagttacattaatctaaatcctagattaaagaaggattcagtatctttacataagaaattcattgctgattgctacacaagattagaagcagccagttcagcacttggtggccccactctaacacatgctgtgaccagagcaacaaaaatgcttacagcaactgccatgccaactgtagcaacctcagttcagtctccttatagatctactaaacttgtaataattgagagattgctgcttctggcagagcgctatgtgatcactatagaggatttttactctgttccacgaactattctacctcatggtgcctcatttcatggacatcttttaacccttaatgttacctatgagtctaccaaagataccttcactgtcgaggctcacagtaatgaaaccatagggagtgtccggtggaaaatagccaagcagttgtgctctcctgtggataatatacagatatttacaaatgatagcctgctgacagtgaataaagatcaaaagctactccaccaactgggcttttctgatgaacaaatccttacagtgaagacttctggcagtgggaccccatctgggagttcagcagattcttcaaccagctccagcagcagcagcagtggggtttttagttcttcatatgccatggagcaggagaaatccctccctggtgtagtgatggctctcgtatgtaacgtatttgacatgctttatcagctcgccaatctggaagagccaaggataactctacgagtacggaagcttctgctcttgatacccactgatccagccattcaggaagcccttgatcaacttgattctttaggaagaaagaaaacattgctgtctgaatcaagttctcagtcctcaaaatctccatccctgtcatcaaagcaacagcaccagccaagtgccagttcaattttagaaagtctgtttcgatcttttgccccgggaatgtctaccttcagagtgctctacaacttagaagttctaagctccaaactcatgccaacagctgatgatgacatggccagaagctgtgccaaatccttctgtgaaaacttcctcaaagctggcggtttgagtttggttgtaaatgtcatgcagagagactccatcccatcagaagtagactatgaaacaaggcagggtgtttattccatctgtctacagcttgcaagatttttacttgtcggacaaacaatgcccacgttattagatgaagacctcaccaaagatggtatagaagcactttcttcccgcccattccgaaatgtcagccggcagacaagcagacagatgtccttatgtggtaccccagaaaagtcatcctaccgacagttgtccgtgtctgataggtcttctattagggttgaggaaatcatccctgctgctcgagttgcaatacaaacaatggaagtaagtgatttcacttctactgtggcttgcttcatgagattgtcatgggctgcggctgcaggacggcttgatcttgttgggagtagccagccaattaaagaaagtaattccctgtgtcctgctggaattcgaaacagactcagcagttcaggaagcaattgcagctctggaagtgaaggagaaccagtagccctgcatgcgggaatctgtgttcgacaacagtctgtatccaccaaagactcgctgattgcgggagaggctttgtctcttcttgttacgtgcctacagcttcggagccagcaactggcatctttctataacttgccctgtgttgctgatttcatcattgatattctgctcggatcaccaagtgctgagattcgccgggttgcctgtgatcagctgtacactcttagtcagacagacacatcagcgcatccagatgtgcagaagccaaatcagtttcttctaggcgtaatcctcacggctcagctgcctctctggtctccaactagtattatgagaggagtcaatcagagactgttatctcagtgtatggagtattttgatttgagatgccagttattagatgatctgacaacttcagaaatggagcagttaaggatcagcccagctacgatgcttgaagatgagattacttggctggataactttgaacctaatcgtacagctgaatgtgagaccagtgaagcggacaacatcttactggcagggcacttacgcctcatcaagacccttctttcactctgtggggcagaaaaggaaatgcttggttcatcactcattaaaccattgttagatgacttccttttccgagcttctagaattattttaaatagtcattctccagctggcagtgccgccatcagtcaacaggactttcatccaaagtgtagtacagcgaatagccgattggcagcctatgaagtccttgtgatgttggctgatagttcaccttcaaatcttcaaattattataaaagaactgctttctatgcatcaccagcctgaccctgctcttaccaaggagtttgattaccttcccccagtggatagcaggtccagttcagggtttgtggggctgagaaatggtggtgcaacttgttatatgaatgcagtcttccagcagctgtatatgcaacctgggctccctgagtcattactttcagtggatgatgacacagacaatccagatgatagcgtgttttaccaagtgcagtctctctttggacatttaatggaaagcaagctgcagtactatgtacctgagaatttttggaagattttcaagatgtggaataaagaactttatgtgagagaacagcaggatgcatatgaattctttactagtctcattgatcagatggatgaatacctcaagaaaatggggagagaccaaatttttaagaatacatttcagggcatctactctgatcagaagatctgtaaagactgtcctcacagatatgagcgtgaagaagctttcatggctctcaatctaggagtgacttcttgtcagagtttggaaatttctttggaccaatttgttagaggagaagttctagaaggaagtaatgcgtactactgtgaaaagtgtaaagaaaagagaataacagtgaaaaggacctgtattaaatctttacctagcgtcttggtaattcacctaatgagatttgggtttgactgggaaagcggacgctccattaaatatgatgaacaaataaggtttccctggatgctaaacatggagccttacacagtttcaggaatggctcgccaagattcttcttctgaagttggggaaaatgggcgaagtgtggatcagggcggtggaggatccccacgaaaaaaggttgccctcacagaaaactatgaacttgtcggtgtcatcgtacacagtgggcaggcacacgcaggccactactattccttcattaaggacaggcgagggtgtggaaaaggaaagtggtataaatttaatgacacagttatagaagaatttgacctaaatgacgagaccctggagtatgaatgctttggaggagaatatagaccaaaagtttatgatcaaacaaacccatacactgatgtgcgccgaagatactggaatgcctatatgcttttctaccaaagggtgtctgatcagaactccccagtattaccaaagaaaagtcgagtcagcgttgtacggcaggaagctgaggatctctctctgtcagctccatcttcaccagaaatttcacctcagtcatcccctcggccccataggccgaacaatgaccggctgtctattcttaccaagctggttaaaaaaggcgagaagaaaggactgtttgtggagaaaatgcctgctcgaatataccagatggtgagagatgagaacctcaagtttatgaagaatagagatgtatacagtagtgattatttcagttttgttttgtctttagcttcattgaatgctactaaattaaagcatccatattatccttgcatggcaaaggtgagcttacagcttgctattcaattcctttttcaaacttatctacggacaaagaagaaactcagggttgatactgaagaatggattgctaccattgaagcattgctttcaaaaagttttgatgcttgtcagtggttagttgaatattttattagttctgaaggacgagaattgataaagattttcttactggagtgcaatgtgagagaagtacgagttgctgtggccaccattctggagaaaaccctagacagtgccttgttttatcaggataagttaaaaagccttcatcagttactggaggtactacttgctctgttggacaaagacgtcccagaaaattgtaaaaactgtgctcagtactttttcctgttcaacacttttgtacaaaagcaaggaattagggctggagatcttcttctgaggcattcagctctgcggcacatgatcagcttcctcctaggggccagtcggcaaaacaatcagatacgtcgatggagttcagcacaagcacgagaatttgggaatcttcacaatacagtggcgttacttgttttgcattcagatgtctcatcccaaaggaatgttgctcctggcatatttaagcaacgaccacccattagcattgctccctcaagccctctgttgcccctccatgaggaggtagaagccttgttgttcatgtctgaagggaaaccttacctgttagaggtaatgtttgctttgcgggagctgacaggctcgctcttggcactcattgagatggtagtgtactgctgtttctgtaatgagcatttttccttcacaatgctgcatttcattaagaaccaactagaaacggctccacctcatgagttaaagaatacgttccaactacttcatgaaatattggttattgaagatcctatacaagtagagcgagtcaaatttgtgtttgagacagaaaatggattactagctttgatgcaccacagtaatcatgtggacagtagtcgctgctaccagtgtgtcaaatttcttgtcactcttgctcaaaagtgtcctgcagctaaggagtacttcaaggagaattcccaccactggagctgggctgtgcagtggctacagaagaagatgtcagaacattactggacaccacagagtaatgtctctaatgaaacatcaactggaaaaacctttcagcgaaccatttcagctcaggacacgttagcgtatgccacagctttgttgaatgaaaaagagcaatcaggaagcagtaatgggtcggagagtagtcctgccaatgagaacggagacaggcatctacagcagggttcagaatctcccatgatgattggtgagttgagaagtgaccttgatgatgttgatccctagaggaacatgcccagcctgagaggagtcaagacacaatactggatgctcagcaccttcttggaatcagaatctcgaaccctttggaagagcctggagattggactgggaaagctgctgtgacttgggcggatcgtgtatttctcaaggaaagcatttttaagccactagaaggtttgggagctgtttggcagtgggagaactccggcatgtggatcagctgtcccgggagcgtggtctatatgtggattcacatttctgtggagattttcggaaatagagccagtggcagacttttttgttacacgaacatacaagagtgagcataaagctgttgctttctctacgatgctacaaaagaaattcctttggtttttatattttaagaaaaagcaagctgcttttagatatgtgggggcaaatttttaatcttgcagtaatattaaacaggaatatccaatttaaaatgatgtaaagatgtaataaaattccttttcattgtaaaatagtaattaagtcaatttacacagacctttgtatttaatatgtctccctatttgtatagaatttcagatgggtctagatgagaaccctatgcataagcttggatcttgatgaaaggttaccaggatcaggatcaaaaattgggaaatactaagctcttgaagatatttttctgatataattagattgaaaagagcaattttgaaaatgctgtgttctccagaagtacagggtgcattatttgacatcaattacttaaagaagttatgagttgttccccaaacagattttaaaaacagcaaaataaaagcactttaagatataattttactgagtttaacttcacagaattatctttttaatgcttggagacatattgaataaactgtagtcttaaatcatgtgatctgcaatcgtttgcttttgcttaaaacataattactgaaacccttggtattggttgtatatgaagttaactatttgagttggtacacactgcttgtgagtttcatagttattgtaatgcagagaaggaatttgagaatttgtttctcctcaacatgactaattaacactgaaaagtcagtcaaggtttaagatttattttcccagaaataaatataaagcaattgaataaccatccatttagtcgtatttccaaagtatagcaccattcactcatttataccagctcccttttatggtgtgggggagaggtttacacccacatatttcatatatattttgtacattttgtattttgaattgctcacattttcggccctgttttgcctttagttacaggtcctgccttattttcatctcaccatgcacagaactagggagccttaggaagtgccaggttttcactgtcagatttgccaagtcacagaggcgcagccagccctgaagtgcctgtctggctgctgtggcattgtgtgggcatgtggccaggcagatggcatctcattactgtgctctcgccatggcccagtcttttcattctctggcagtgagggtttctgtgctgtcagacttcattgttattctgtgacttgctggaggttggcagtggcctttgtcaaacacactgagaagatggaagggccagcacttaagagcagaactgtacccttagagaaacggacagaggcgagtggcaaacttcagacggttccaatggtcttgcagtttgaaatgtgatgttctaccattggttttgagtacgtgaatacttcctgtcctactgtttcccctaccctattctcaccttctctccgcccacatcctcaccaagagattgtgtgggacatgaccttgaaatgctggcgatgatccacactgggatatcatcgctggcgactgcactctcaggagcccaaaatcaggagtgaaattgccacttctagtccccttatttcctatggaaacaacgccttccgcacccctagcacctgccgtcctcactgtaaagcttcatcaggatcgtccaccgtgtatattatacgcttcagatcatgttgcttatattgttgctgcaatgaccatcgttttcactttgctggtaaccacttgattgctgacagctacagtcaatgaacctgctgatgactttttttaatgtagtacaacagtgacagttatgacaggcttaccttggaagagttgtcatttttactgccaattttttggatgaagatgtttttataaacctttcaaaatggtctgcaaacagagcaggaattgcacaattaactcaataatgctgtgtgttctcaagaagctcccttagtgaggccgatcttaagatggccgattctgcccgttgaaggcatcctgggaaagaaaacaagcatcccagcgggcatctcaccacgacttctcctggagtcctcacacggtcactgacaactacagtcagttttaggaactagagtgccgtatcatcagacttaccctgtcctgccccaccttccctgctaacatcgaggtgtgtgcagttaccttctgagcttggaacaagcagactggaattttcctctgctacctcttgtgtataaaatcttgtttataaaatttcaaaaggaagtagatacactagggaagaaccttaattctaaatttggttcatgtgtggcaaagttcttagcttctaagagtataaaataaatttttcaaaaacaga

SEQ ID NO: 1678 - DNA, 491 bp, HOMO SAPIENS
gtgttttctacttttctcatctttctgtgttcaactatcctcttttgccttcttttggatttttctccccattatacatttttttctttttactctaaacttaattacataacttatcaaagcctaatgtccccacactctacccacgcaatcccaggaccttaaaactctttaattccattcccttcctgctgacatgaccttggagtcaattattttagttctaccatttgtggtttagcccaggagacatctgcctcaagcctgttcaatttactcacatgcatacaactttgtttataatgccttcttagagctcggactttccatagaagacaaccttctctcctcctgaaataggtcctttagaaatgcttttagtagccaggcatagtggtgcatgcctgtattccaggtgctcaggaggctgaggcaggagagtggactgagcccaggagttcgaggctgtggtgcactgtgatcatgcctat

SEQ ID NO: 1679 - DNA, 3481 bp, HOMO SAPIENS
tgcagagacacccttctcctttctgctgtctctgcacgggtggccagagccacacagccctttctttaagtcaggagttgccctgtcagagcacaaggcaagaaggaagtggtaaagggacggaggggaagccctgagaggactgagaggatgggaaattctctgctgagagaaaacaggcggcagcagaacactcaagagatgccttggaatgtgagaatgcaaagccccaaacagagaacatccaggaagacaaaggcattctaccatgagagatgtgtccaagttatctagaatgaaacacgcttgcggggagaaaaaaagttttccacagaaatggcaaaaggaaaggagtcaccttaacaaagctgcagaaatcaaccttatgatttgccatctctcttgggtattttagatgctgggatcaccatatcgctgaagggtgtttctgccttccatggaaaaaaatactcatttttgaaaagaggcaagattcccaaaacgaaaatgaaagaatgtcatctactcccatccaggacaatgttgaccagacctactcagaggagctgtgctataccctcatcaatcatcgggttctctgtacaaggccatcagggaactctgctgaagagtactatgagaatgttccctgcaaagctgagagacccagagagtccttgggaggaactgagactgagtattcacttctacatatgccttctacagaccccaggcatgcccgatccccagaagatgaatatgaacttctcatgcctcacagaatctcctctcactttctgcaacagccacgtccacttatggccccttctgagactcagttttcccatttatagtgaagtggctggactagcatttgtttagcaccaacaaataaaaggtgggatgggggatctgcctgaagcagggatgggacacaaagtccctccagcttatctcccacaacaaccctttccctgcagagcatggtttgtataccacaagccctcttagcacgcaaaagccaaaatctaaagatcaaccatttatcctgaacaacaccatttgagaaagaggtaaccatctttggttctacatggtttggagagtatagtggtaggaggggctccctgattcccctaaagctatgcacaccacaaggggctctgctcttctgtctgggatcttcttataaagtgttcccatgatcattctctaaagtcacaaggaagctttactcatcatactaagtgtgcccaagggggagttcactcattactgtgaccttccagctcagtccccacccatgggagcctgtgttgctcctctcactccatgtgtctaagtcatgtcttttacatagtgtcctttgacctgttggcccccatggtctggttagttatgtgagttgaatcaagaggctctaggccagatgtttacataattttaacctatatgattttatttttaactttgtatttctccctagaaatcttaataagacaattatgccatcagacaatgttaagaagaacgatccttggagatcccgtaatcccactacccttctttggctcagagaggataatttgcctaatgatacattaaagttagtggcaaaacttaatttggagcctgatttcctactgacttccaatttagtgctcccccagtatgctaaatagaaagccctctgcaatatattaaatgtatactaaatgtatatatttaataatgtcatgtataaaatatgaataaaatgtccacataggaaattaacacatatataccttctctgataagcactcctctatgtgtcctgattatttactttctcttatcttttccttagtgttcctcaaattatatctatcctctaaaccagggatcagcaaactataacccccaggccaaatctagcccactccctgtttttatagataaagatttgttggaacacagccacactcatttgtttacctactatctatgattgttcaaccatgggagagttgagtaattgtgacatggaccataggccctaaagagccaaaataaatatactttggcactttttggaaaaaaagtttgcagacacctgccctaaatgattatagtttgagagaaacttaacagaaatgtgtttggttactgatgcataagagcaagcaccaataaaatggcataaaaatattaaatcacaaatggataagtgagaccaaggcaatttagcaaattctactatttctgtattcacacctgtgtcttccacttgctgttttatttaactcacggctactgtcctaattttagggatgctaaaatagtttgttttaaaagaggtttgtttaagaaagcagtaggtacattatgtttactagacaggcccttggaccagctaagcgacagggaacctggtacattatgtttagttactgttttcttctcaaagttaaccaaagctaaataactttcctatgtaaaatgtgctgactcccaaaagaggagaaatgcaatggcttgagcttgcatgtgtcacaggtttgtggagccttcagccaggtgatggtcttcagctaaagagccagctgcatcttggtatctcttcctctgctaacttcctacttttagcaaaattctttcacttggaactctagctgatccttggccaggatcagatcctcaaaaggaaatattcagttagcagtggatattgtacaagatgtaacatggcttagaggaaagagtgtagacccagcgacagatcatcagtcactcaaatcctggttctctctcttcctccatctgtgactttgaacatgctacttggaggctcagcttcttcaccatcaacaggaggattacatctaatgcaggcaatcatctattacagatgccgaataaatgatatcaaagagcatagagaaacaaaaatcttttatgatgtacggaaaaaaaccatgctgatacagctggctattcagggtcacccagcagtcctccagcaaggtagaaacaccaaatcaatgagtttatgctagaatttttcacatggccactggaccattgtggaagtagactggttgaaatattcttagtatgacatagtaagttatatttgtttgaaccttatcctgtgaaagcattatctgtcccaaacagtatatgccttttatcagggacacattaaatataaatgtttaaccaaagaaagttgttcttataatgtaattataacagggatttataagagggaattataagagggattatgaaagggaattacttttgagcaaggggagccatttgggagtgcttcaagatacccaatatgatatacacaattatgatttgtcagtcaaaaataatattaagaacaaaaaaagagttaaaaaattctgatatgagtgtaatatacttaatatgtaggatgtctcaaatttccagtaaataaattttaatgtcccaaaaaaaaaaaaaaaaa

SEQ ID NO: 1680 - DNA, 3937 bp, HOMO SAPIENS
ataagttagcgccgctctccgcctcggcagtgccagccgccagtggtcgcacttggagggtctcgccgccagtggaaggagccaccgcccccgcccgaccatggccgaggagctggtcttagagaggtgtgatctggagctggagaccaatggccgagaccaccacacggccgacctgtgccgggagaagctggtggtgcgacggggccagcccttctggctgaccctgcactttgagggccgcaactacgaggccagtgtagacagtctcaccttcagtgtcgtgaccggcccagcccctagccaggaggccgggaccaaggcccgttttccactaagagatgctgtggaggagggtgactggacagccaccgtggtggaccagcaagactgcaccctctcgctgcagctcaccaccccggccaacgcccccatcggcctgtatcgcctcagcctggaggcctccactggctaccagggatccagctttgtgctgggccacttcattttgctcttcaacgcctggtgcccagcggatgctgtgtacctggactcggaagaggagcggcaggagtatgtcctcacccagcagggctttatctaccagggctcggccaagttcatcaagaacataccttggaattttgggcagtttgaagatgggatcctagacatctgcctgatccttctagatgtcaaccccaagttcctgaagaacgccggccgtgactgctcccgccgcagcagccccgtctacgtgggccgggtggtgagtggcatggtcaactgcaacgatgaccagggtgtgctgctgggacgctgggacaacaactacggggacggcgtcagccccatgtcctggatcggcagcgtggacatcctgcggcgctggaagaaccacggctgccagcgcgtcaagtatggccagtgctgggtcttcgccgccgtggcctgcacagtgctgaggtgcctgggcatccctacccgcgtcgtgaccaactacaactcggcccatgaccagaacagcaaccttctcatcgagtacttccgcaatgagtttggggagatccagggtgacaagagcgagatgatctggaacttccactgctgggtggagtcgtggatgaccaggccggacctgcagccggggtacgagggctggcaggccctggacccaacgccccaggagaagagcgaagggacgtactgctgtggcccagttccagttcgtgccatcaaggagggcgacctgagcaccaagtacgatgcgccctttgtctttgcggaggtcaatgccgacgtggtagactggatccagcaggacgatgggtctgtgcacaaatccatcaaccgttccctgatcgttgggctgaagatcagcactaagagcgtgggccgagacgagcgggaggatatcacccacacctacaaatacccagaggggtcctcagaggagagggaggccttcacaagggcgaaccacctgaacaaactggccgagaaggaggagacagggatggccatgcggatccgtgtgggccagagcatgaacatgggcagtgactttgacgtctttgcccacatcaccaacaacaccgctgaggagtacgtctgccgcctcctgctctgtgcccgcaccgtcagctacaatgggatcttggggcccgagtgtggcaccaagtacctgctcaacctcaacctggagcctttctctgagaagagcgttcctctttgcatcctctatgagaaataccgtgactgccttacggagtccaacctcatcaaggtgcgggccctcctcgtggagccagttatcaacagctacctgctggctgagagggacctctacctggagaatccagaaatcaagatccggatccttggggagcccaagcagaaacgcaagctggtggctgaggtgtccctgcagaacccgctccctgtggccctggaaggctgcaccttcactgtggagggggccggcctgactgaggagcagaagacggtggagatcccagaccccgtggaggcaggggaggaagttaaggtgagaatggacctgctgccgctccacatgggcctccacaagctggtggtgaacttcgagagcgacaagctgaaggctgtgaagggcttccggaatgtcatcattggccccgcctaagggacccctgctcccagcctgctgagagcccccaccttgatcccaatccttatcccaagctagtgagcaaaatatgccccttcttgggccccagaccccagggcagggtgggcagcctatgggggctctcggaaatggaatgtgcccctggcccatctcagcctcctgagcctgtgggtccccactcaccccctttgctgtgaggaatgctctgtgccagaaacagtgggagccctgaccttggctgactggggctggggtgagagaggaaagacctacattccctctcctgcccagatgccctttggaaagccattgaccacccaccatattgtttgatctacttcatagctccttggagcaggcaaaaaagggacagcatgccccttggctggatcagggaatccagctccctagactgcatcccgtacctcttcccatgactgcacccagctccaggggcccttgggacagccagagctgggtggggacagtgataggcccaaggtcccctccacatcccagcagcccaagcttaatagccctccccctcaacctcaccattgtgaagcacctactatgtgctgggtgcctcccacacttgctggggctcacggggcctccaacccatttaatcaccatgggaaactgttgtgggcgctgcttccaggataaggagactgaggcttagagagaggaggcagccccctccacaccagtggcctcgtggttattagcaaggctgggtaatgtgaaggcccaagagcagagtctgggcctctgactctgagtccactgctccatttataaccccagcctgacctgagactgtcggagaggctgtctggggcctttatcaaaaaaagactcagccaagacaaggaggtagagaggggactgggggactgggagtcagagccctggctgggttcaggtcccacgtctggccaggcactgccttctcctctctgggcctttgtttccttgttggtcagaggagtgattgaaccagctcatctccaaggatcctctccactccatgtttgcaatgcttttatatggcccagccttgtaaataaccacaaggtccactccctgctccacgaagccttaagccataggcccaggatatttctgagagtgaaaccatgactgtgaccaccttctgtccccagccctgtcctggttccttcctatgcccaggtaccacccttcagaccccagttctaggggagaagagccctggacacccctgctctacccatgagcctgcccgctgcaatgcctagacttcccaacagccttagctgccagtgctggtcactaaccaacaaggttggcaccccagctaccccttctttgcagggctaaggcccccaaacatagcccctgccccggaggaagcttggggaacccatgagttgtcagctttgactttatctcctgctctttctacatgactgggcctcccttgggctggaagaattggggattctctattggaggtgagatcacagcctccagggccccccaaatcccagggaaggacttggagagaatcatgctgttgcatttagaactttctgctttgcacaggaaagagtcacacaattaatcaacatgtatattttctctatacatagagctctatttctctacggttttataaaagccttgggttccaaccaggcagtagatgtgcttctgaaccgcaaggagcaaacactgaaataaaatagtttatttttcacactcaaaaaaaaaaaaaaaaaa

SEQ ID NO: 1681 - DNA, 7133 bp, HOMO SAPIENS
aaagtcagagtactgggagaacagaagacttcacaatttaatgcctcagtttttaaaaaaggatccttacacttcatgtctcctagccatcagaagaggaatgagacagcaaaagttcaaatggcctgtttcaagtttctgatataaaacgatgacattttcaggaaaatcctgcatttccagagagagactggctggttaaatttctgaaagaggacaccagctaaaagaaggtattgcatctcacccgagcagactgtgtctgtggaaagtgtaagccccttgccagaagagcagcttcccagcaaaggcagagggtgaaaacagcaaaggtcttaagacactggggacctagagtcaaaagggacctcctccagggaaaacgctgtgtgagaaatggcctcattcggtgactgtgagtgacacagcagaaagttgggtcattccggctgcttttttgagaagtccctgaagagatcaataacagcaagagggaacctggcaaggaagctattcctataatccaggaaagagatgaggaaggcttggaccaggtggtagtggtgtcaggtagtcaaatgctgggtatattttgaagatacaccccataggatttgctccacattgaatgtggaatgctggaagagagataaagtgtacctgtcacatactttttgagttttatttattttcttagaagtaagtacacaaagagatgctacctaggagaagggtattcttttcactattctttcaaattttctgtatgttcgaacattttcatagtagaaagttggggggaaaatctgtttcataaacatttcctcagcagcagtccagtctattgcattttaattggttgtgatatcattgttttatgcaatacgttctcaacaagtatatcctccggcaaactgaacaaggaccaagtctgttctgcctacagctctgcttcctcatagctgctttccagaacgtgactcttgcaaattatcaagaaaggggaactaatctaagggatccagatcaaacagcctcatgaagacttattttatgtttctaatataaagatagaagttttcagaaaagccctgctacacagaggatcagagcaggggtgggcctgctgggctgcagctgggattctgagcatcctttcccggaggcacggaaagtgagtgagtgagcccagtgaggaagaagttgaagctttgatatgagtaaacaagtatctctacctgaaatgattaaagactggaccaaagagcatgtgaaaaaatgggtaaatgaagaccttaagattaatgagcaatacgggcaaattctgctcagtgaagaagtaacaggattagtcctgcaggaattaactgagaaggaccttgtagaaatggggctaccatggggtccagcacttttgataaaacgttcatacaacaaattgaatagtaagtcccctgaaagtgacaatcatgatccgggacaattagataattcaaaaccgtccaaaacagaacaccagaaaaatccaaaacacaccaaaaaggaagaagaaaattcaatgtcatctaatattgattatgatcccagagagatcagagatatcaaacaagaagaatcaattcttatgaaagaaaatgtgttagatgaagtagcaaatgctaaacacaagaaaaagggtaagctaaaacctgaacaattgacttgtatgccatatccttttgatcagttccatgacagccatcgctacatagaacattatactctacaacctgaaacaggagcactcaatctcattgatccaatacatgagttcaaagctctcacaaacacagaaacagccacggaagtggacattaagatgaaattcagcaatgaagtcttccgatttgcatcagcttgtatgaattcacgcaccaatggcaccatccattttggagtcaaggacaaaccccatggagaaattgttggtgtgaaaatcaccagtaaggctgccttcattgaccacttcaatgtaatgatcaaaaagtattttgaagaaagtgagatcaatgaagccaagaagtgtattcgggagccaaggtttgtggaagtccttctgcagaacaatacaccatctgacagatttgtcattgaagttgatactattccaaaacactctatatgtaatgataagtatttctacattcagatgcaaatttgtaaagataaaatatggaaacaaaaccaaaatctttcactgtttgtaagagaaggggctagctctagggatatcctggccaattccaagcaacgggatgtagatttcaaggcatttttacaaaatttaaagtcactggtagcatctagaaaagaggctgaagaagagtatggaatgaaggcaatgaagaaggagagtgaaggactaaagctggttaaacttctcataggaaaccgagactcactggataattcatactatgactggtacattcttgtaacaaataaatgccatccaaaccaaataaagcacttagattttttaaaagaaattaaatggtttgctgtgttggagtttgatcctgaatctatgatcaatggagtggtcaaagcttacaaagaaagtcgggtggcaaaccttcactttccaaatcaatatgaagacaagacaactaacatgtgggagaagatttctactcttaatctttaccaacagcccagctggattttctgcaacggcagatcagacctgaaaagcgagacatataaacctctagaaccacatttatggcagagagaaagagcttcagaagtcaggaaactaattttatttctcacagatgaaaatataatgacaagaggaaaatttttggtagtgtttctattactctcttcagtggaaagcccaggagatccactcattgaaactttctgggctttctatcaagctctcaaaggaatggaaaatatgttgtgtatctctgtaaactcacatatttatcaacgatggaaagatctactacaaacaagaatgaagatggaagatgaactaacaaaccacagtatttccactttaaatatagaactggtaaacagcactatccttaaactaaaatcggtgactcggtcatcaagaaggtttttgcccgcccgtggatcttcttcagttatcctagagaaaaagaaagaggatgtcttgactgcactggaaatcctctgtgaaaatgagtgtacagagacagacatcgagaaagacaaatctaaattcctggagtttaagaaatcaaaagaagaacacttttatcgaggtggcaaagtatcctggtggaacttctatttttcttctgaaaactattcttcagattttgttaaaagggacagttatgaaaagcttaaagatttaatacactgctgggcagagtctcctaaaccaatatttgcaaaaatcatcaatctttatcatcatccaggctgtggaggtaccacactggctatgcatgttctctgggacttaaagaaaaacttcagatgtgctgtgttaaaaaacaagacaactgattttgcagaaattgcagagcaagtgatcaatctggtcacctatagggcaaagagccatcaggattacattcctgtgcttctccttgtggatgattttgaagaacaagaaaatgtctactttctacaaaatgccatccattccgttttagcagaaaaggatttgcgatatgaaaaaacattggtaattatcttaaactgcatgagatcccggaatccagatgaaagtgcaaaattggcagacagtattgcactaaattaccaactttcttccaaggaacaaagagcttttggtgccaaactgaaggaaattgaaaagcagcacaagaactgtgaaaacttttattccttcatgatcatgaaaagcaattttgatgaaacatatatagaaaatgtagtcaggaatatcctaaaaggacaggatgttgacagcaaggaagcacaactcatttccttcctggctttactcagctcttatgttactgactctacaatttcagtttcacagtgtgaaatatttttgggaatcatatacactagtacaccctgggaacctgaaagcttagaagacaagatgggaacttattctacacttctaataaaaacagaagttgcagaatatgggagatacacaggtgtgcgtatcattcaccctctgattgccctgtactgtctaaaagaactggaaagaagctatcacttggataaatgtcaaattgcattgaatatattagaagagaatttattctatgattctggaataggaagagacaaatttcaacatgatgttcaaactcttctgcttacaagacagcgcaaggtgtatggagatgaaacagacactctgttttccccattaatggaagctttacagaataaagacattgaaaaggtcttgagtgcaggaagtagacgattcccacaaaatgcattcatttgtcaagccttagcaagacatttctacattaaagagaaggactttaacacagctctggactgggcacgtcaggccaaaatgaaagcacctaaaaattcctatatttcagatacactaggtcaagtctacaaaagtgaaatcaaatggtggttggatgggaacaaaaactgtaggagcattactgttaatgacctaacacatctcctagaagctgcggaaaaagcctcaagagctttcaaagaatcccaaaggcaaactgatagtaaaaactatgaaaccgagaactggtcaccacagaagtcccagagacgatatgacatgtataacacagcttgtttcttgggtgaaatagaagttggtctttacactatccagattcttcagctcactccctttttccacaaagaaaatgaattatccaaaaaacatatggtgcaatttttatcaggaaagtggaccattcctcctgatcccagaaatgaatgttatttggctcttagcaagttcacatcccacctaaaaaatttacaatcagatctgaaaaggtgctttgacttttttattgattatatggttcttctgaaaatgaggtatacccaaaaagaaattgcagaaatcatgttaagcaagaaagtcagtcgttgtttcaggaaatacacagaacttttctgtcatttggatccatgtctattacaaagtaaagagagtcaattactccaggaggagaattgcaggaaaaagctagaagctctgagagcagataggtttgctggactcttggaatatcttaatccaaactacaaagatgctaccaccatggaaagtatagtgaatgaatatgccttcctactgcagcaaaactcaaaaaagcccatgacaaatgagaaacaaaattccattttggccaacattattctgagttgtctaaagcccaactccaagttaattcaaccacttaccacgctaaaaaaacaactccgagaggtcttgcaatttgtaggactaagtcatcaatatccaggtccttatttcttggcctgcctcctgttctggccagaaaatcaagagctagatcaagattccaaactaatagaaaagtatgtttcatccttaaatagatccttcaggggacagtacaagcgcatgtgcaggtccaagcaggcaagcacacttttctatctgggcaaaaggaagggtctaaacagtattgttcacaaggccaaaatagagcagtactttgataaagcacaaaatacaaattccctctggcacagtggggatgtgtggaaaaaaaatgaagtcaaagacctcctgcgtcgtctaactggtcaggctgaaggcaagctaatctctgtagaatatggaacagaggaaaaaataaaaataccagtaatatctgtttattcaggtccactcagaagtggtaggaacatagaaagagtgtctttctacctaggattttccattgaaggccctctggcatatgatatagaagtaatttaagacaatacatcacctgtagttcaaatacgtttatttatatctttatgattttattctctctctctattctcatggcactttcataacattatggctaacctctaattacagattttgcttttgcctccctgaatgaattacaagcctttttaagatatgaaatatgcctacccgcagagcttggcacaaagtggagtcaatcttttaatgttttaaatatgcattttcagactcaaataattaagaagtttcattgatatccactggtcacatcataactgtctatagggcaataaaatctgtgttaaactcaattgcttttataagttttctaaattatttcttcactgtgacagcaaagatttaaataagatgaatgtaaaagagaaagcttattggactcaaacccacagatccacaccagagttctatttacctcatcttggtatcaataaaaacttatgtggaaggtaaatatattgttccccatccaccacataacactctccccaacacacacacacacacacacacacacacacacacacacacacactccttgtaccccttgcccttctcccagctcattgctccaggagagagaagagttcaaaaaataaagtaatcataaacttgaactctctccattctcttgttcccatttacaggtgaatctcttcctttaagccatttttgtctcctgtgaatacagccttatctccacctgtttcttagatcccatctcccctggcttattttttccattcattaccctctttgttccctttacttctcaacctgtgctatatacatgctgttctctctgttgagattgccttatttccatctaacattctctctcctgctattctgatttgtcattcacaactgatttcaagagtcaccttcaccaggaagtcttccttgaccaccatcattcctgcctgattagagggcttcctcatggtaatatgtgttctcaagttttcagtgtcaaggaatgccatcccagaagctcattctcagatgcacaacagccagaacagtctcaagcagcattctagagcttggaatttaagaactacgcattgcctataaagtgaaacataggctaatatagattaaattgaatattgaataaaaaatatatttatttatccac

SEQ ID NO: 1682 - DNA, 4398 bp, HOMO SAPIENS; identical to SEQ ID NO: 1580

SEQ ID NO: 1683 - DNA, 2779 bp, HOMO SAPIENS; identical to SEQ ID NO: 47

SEQ ID NO: 1684 - DNA, 1374 bp, HOMO SAPIENS
ggacagcttggagatagggcccggaattgcgggcgtcactctgctcctgcgacctagccaggcgtgagggagtgacagcagcgcattcgcgggacgagagcgatgagtgagaacgccgcaccaggtctgatctcagagctgaagctggctgtgccctggggccacatcgcagccaaagcctggggctccctgcagggccctccagttctctgcctgcacggctggctggacaatgccagctccttcgacagactcatccctcttctcccgcaagacttttattacgttgccatggatttcggaggtcatgggctctcgtcccattacagcccaggtgtcccatattacctccagacttttgtgagtgagatccgaagagttgtggcagccttgaaatggaatcgattctccattctgggccacagcttcggtggcgtcgtgggcggaatgtttttctgtaccttccccgagatggtggataaacttatcttgctggacacgccgctctttctcctggaatcagatgaaatggagaacttgctgacctacaagcggagagccatagagcacgtgctgcaggtagaggcctcccaggagccctcgcacgtgttcagcctgaagcagctgctgcagaggttactgaagagcaatagccacttgagtgaggagtgcggggagcttctcctgcaaagaggaaccacgaaggtggccacaggtctggttctgaacagagaccagaggctcgcctgggcagagaacagcattgacttcatcagcagggagctgtgtgcgcattccatcaggaagctgcaggcccatgtcctgttgatcaaagcagtccacggatattttgattcaagacagaattactctgagaaggagtccctgtcgttcatgatagacacgatgaaatccaccctcaaagagcagttccagtttgtggaagtcccaggcaatcactgtgtccacatgagcgaaccccagcacgtggccagtatcatcagctccttcttacagtgcacacacatgctcccagcccagctgtagctctgggcctggaactatgaagacctagtgctcccagactcaacactgggactctgagttcctgagccccacaacaaggccagggatggtggggacaggcctcactagtcttgaggcccagcctaggatggtagtcaggggaaggagcgagattccaacttcaacatctgtgacctcaagggggagacagagtctgggttccagggctgctttctcctggctaataataaatatccagccagctggaggaaggaagggcaggctgggcccacctagcctttccctgctgcccaactggatggaaaataaaaggttcttgtattctca

SEQ ID NO: 1685 - DNA, 2018 bp, HOMO SAPIENS
cctttccgtctggcggcagccatcaggtaagccaagatgggtgcatacaagtacatccaggagctatggagaaagaagcagtctgatgtcatgcgctttcttctgagggtccgctgctggcagtaccgccagctctctgctctccacagggctccccgccccacccggcctgataaagcgcgccgactgggctacaaggccaagcaaggttacgttatatataggattcgtgttcgccgtggtggccgaaaacgcccagttcctaagggtgcaacttacggcaagcctgtccatcatggtgttaaccagctaaagtttgctcgaagccttcagtccgttgcagaggagcgagctggacgccactgtggggctctgagagtcctgaattcttactgggttggtgaagattccacatacaaattttttgaggttatcctcattgatccattccataaagctatcagaagaaatcctgacacccagtggatcaccaaaccagtccacaagcacagggagatgcgtgggctgacatctgcaggccgaaagagccgtggccttggaaagggccacaagttccaccacactattggtggctctcgccgggcagcttggagaaggcgcaatactctccagctccaccgttaccgctaatataagtaaagtttgtaaaattcatacttaataaacaatttaggacagtcatgtctgcttacaggtgttatttgtctgttaaaactagtctgcagatgtttcttgaatgctttgtcaaattaagaaagttaaagtgcaataatgtttgaagacaataagtggtggtgtatcttgtttctaataagataaacttttttgtctttgctttatcttattagggagttgtatgtcagtgtataaaacatactgtgtggtataacaggcttaataaattctttaaaaggagagaactgaaactagccctgtagatttgtctggtgcatgtgatgaaacctgcagctttatcggagtgatggcaatgctctgctggtttattttcaagtggctgcgttttttttagtttggcaggtgtagactttttaagttgggctttagaaaatctgggttagcctgaagaaaattgcctcagcctccacagtaccattttaaattcacataaaaggtgaaagctcctggttcagtgccatggcttcatggcattcagtgattagtggtaatggtaaacactggtgtgttttgaagttgaatgtgcgataaaattattagccttaagattggtaagctagcaatgaatgctagggtgggaagctggtgagccagtggccattagataaatacctttcaagtgtgagcttagacgtcaaccctaaaatacttaaccgtaatgctaattgtgatcattatgaatcccttcagtcacattagggggaaagtagttggctataagtacgtcattcttagtccagtcagtcttaaaaacatcttgggttacccactctgtccactcccataggctacagaaaaagtcacaagcgcatggtttccaaccatatgtgttttctgcagttatttctcttgttctggccaaacaaccctaaaaatccttaccattccacaaagttggaccatcacttgtgcacccactttgactatgagtataccaccacattgcatttctgtttgcaccatgtcttccaggagactagactactgttgtccagggtcaatttgagtgtaaagaaaatgtagacaaggaattgcccaattttaaattctgactttgctgacttaatttaaatgctcgttctgaaccaattttctcctatcttctctaggggtttcaaaagactcagttaattgatttccaggaagtactcatagcaagttcataaaagttcttgagacctaaatttcttcacaaaaaaagaaaagatcttaagtcatacattttaattgtgtagaggttgttcaactgaaggaataaatgtctattaaactaaaaaaaaaaaaaaaaaaaaaaaaaaaaa

SEQ ID NO: 1686 - DNA, 1696 bp, HOMO SAPIENS
ctatgccctagggctagtggaagacttaagatggcggcgtttgcacggagtgcaatcactgcgtccttacgggggttgcaaggcgtccgaagtatgagtccactaacaaaagtccagaaactcgccagttaatagtattgtgtctcttcaaaatatcggagaataatttctttctcgctgatcgcctaacttctactgacgaagcttggaagttgcagaagatggagttcgctcttgttgcccaggctggaatgcaatggcatgaccttggctcactgcaacctctgcctccccagttcaagtggttctcctgcctcagcctcccgagtagctgagattacagaaaccacaataaaggctctcgcccacattcttccctcaccctctgcctcctgactgacactggtgctttcctgggtgaaccctgacggtgtggcatgcctcttcttgtgatctattgttcactgttggcatatagaaacactactgatgcctcagagatgaccatgatggtgttctggtgtcaggagaatagcaatgcctgggagtccaccaccaccataatctcctgtgatcccacggagctgcagtcagaagggagcaatgacaagaaataagtgctgagcagttgtcatatggtgctggaagacatgctacttttccctgagggcggaagacagcctgatgacggtggtacaatcaatgacatctctgtgctgggagtgacctgcttgggggcccaggctgatcatttcacacagacacccctggatcctggaagccaagtcctggtctgggtagactgggagtggaggtttgaccacatgcagcagcattaaaggcagcatctcatcacagcagttgctgattatctgtttgagttaaagacaacatcatgggagttagggaaatttcggagtgtgatgctggaaagcccctctgtgaatgcagagaaaataaccgccactgaaaagagtgtcaataaaaatatcagagatcagctgctcaacaaagtatgagaactgagcctgaatgatcctgaggcggagcaggtgagaggctggggcctgccagatgatcatgctgggcccattggaattgttaccatcaagggtgttgattccaacatgtgctgtgggatccccatgagcaatctccgtgactttccagtcattaagattaggcaccgagaagaggaaaaggaataaaatcaaactgatatttctggctgggaaccagatgctgaaatggatgaagagaagtcatgaaactgaaagagcactgaatcactctgcttaagtgtggagcagaggatcacatggaagcagtgaaaaagctccagaatgtagccaggcatggtggctactgcctgtaatcccagcactttgggaggccgaggcgggcagatcacgaggtcaggagatcgagaccatcctggctaacacggtgaaaccccgtctctactaaaaatataaaaaattagctgggcgtgtggcgggcgcctgtagtcctagctacttgggaggctgaggcaggagaatggcgtgaacccaggaggtggaacttgcagtgagctgagatcacgccactgcactccagcctgggcgacagagcgagactctgtctctaaataaataaataaataaataaataaataaataaataaataaaaaaaaaaaaaaaaaaaaaaaaaaaa

SEQ ID NO: 1687 - DNA, 265 bp, HOMO SAPIENS
  misc_feature (40)..(40): n is a, c, g, or t
  misc_feature (42)..(42): n is a, c, g, or t
  misc_feature (54)..(54): n is a, c, g, or t
  misc_feature (57)..(57): n is a, c, g, or t
  misc_feature (63)..(63): n is a, c, g, or t
  misc_feature (83)..(83): n is a, c, g, or t
  misc_feature (206)..(206): n is a, c, g, or t
aaatgttttattgctggcttgtcttttctaagttggcttnancccttagtctcnttncttgcnttcacaggaatgagctaatncctaacagtgatactgcctgtcccaggattacaagaaatatcacaaaatataagagagtgtagcataagacatgaaggccaccagaagtgctactatgatttaagattggccgggcagtggtngctcatgcctacaatcccagcactttgggaggccgaggtgggggaaatcaattgaagct

SEQ ID NO: 1688 - DNA, 2149 bp, HOMO SAPIENS
ccgcgggaacccggaaacgcctgggctgcaccgagctggcggtggctacggcgacgggagccggcggcgctgcgggtcagcggtcgcgtaggacccagcggactcggcagcctggggcgcccggcggagctgaaccgcggcccccggtggtgggctcagccggtcgagctgcgcgggaggcaaatgaagataaaacaatgttcgccaacctaaaatacgtttccctgggaattttggtctttcagactaccagtttggttctaacaatgcgttattccagaactttaaaagaagaaggacctcgttatctatcttctacagcagtggttgttgctgaacttttgaagataatggcctgcattttattggtctacaaagacagcaaatgtagtctaagagcactgaatcgagtactacatgatgaaattcttaataaacctatggaaacacttaaacttgctattccatcagggatctatactcttcagaataatttactgtatgtggcactatcaaatctagatgcagctacttatcaggtcacgtatcagttaaaaattcttacaacagcattattttctgtgtctatgcttagtaaaaaattgggtgtataccagtggctgtccctagtaattttgatgacaggagttgcttttgtacagtggccctcagattctcagcttgattctaaggaactttcagctggttctcaatttgtaggactcatggcagttctcacagcatgtttttcaagtggctttgctggggtttactttgagaaaatcttaaaagaaacaaaacaatcagtgtggataagaaatattcagcttggtttctttggaagtatatttggattaatgggtgtatacatttatgatggagaactggtatcaaagaatggattttttcagggatataaccgactgacctggatagtagttgttcttcaggcacttggaggccttgtaatagctgctgttattaagtatgcagataatattttaaaaggatttgcaacctctttatcgataatattatcaacattgatctcctatttttggcttcaagattttgtgccaaccagtgtctttttccttggagccatccttgtaataacagctacttttttgtatggttatgatcccaaacctgcaggaaatcccactaaagcatagttgtatactatctttaactggtttttcacgatggggcactaggaatctcgacattaatcttgcacagaggacttctacagagtctgagaagatatcatcatgctgaatctgatcatactgttttttaaaagtttaaggataagacatgtgtatatgtaacaaaacacattgcatctagaaatcaaaacttgaaagtatttccagggattaggattagaaggaatattagaggaaacttgaaatctgagtttaaaaagattttacctttttgattgctgcagaaatgtcctatgcactctttgcaagagcacacaacaaatgtcagataccaatttttgcaaattagatttaatcttattaaatgtttttatcttactctttctgtacagatatatcaaatcacatgaaatatttaaagtttgaaaattataattacctataaagctgtgaaaaatagaagtataatttgaaaaaacatttcacttatcagagatttttatatttatacaaaagattactaaatgaaggattgctaaatgtttttggttcaattacataaaaattaatattctgggtctgatctgtcagagaataaatatcaaatctaaatttaatgtagagatacatactatttctccatatgaattttaagatattttagtgcttcaagactgctgaaagcaatccagttgctcctgtgctagatggtagccagagaattttatagtaatggaggttagcccttaatctcttcattgcatttcatttctgtaaatcagattaagtccttaatattattttaaattaaaatttgtgtgtaattgccattaaattttcaaaatgtaatttaaaaggattaaatactcatttaataatttaaaataattattgtataatatctacatttggagaattttgaactatcaagcatatactgtatacagttagaaagttattaaatgaacattttactc

SEQ ID NO: 1689 - DNA, 6303 bp, HOMO SAPIENS
ctcccggctccgtagtaagcatggcggcggcggcgttcgtggtccctcgggtgaaacagaaagcgggagctacgcggagagggagcgaagagcggggctgaggcggcggcgtcactgccaggaaacaaccccaacagtcagcgcgccggcggccgcggcggccctgagagctgactctgcagctgaggtagagagacaacgatcaggaaccctaagaagaggcgccagaggagccgccttctgcctcagaacggcgtgactcggagaattggagcgttattcagtatattaatgtcttattgataatggcagaacatccaccactactggatacaactcagatcttaagtagtgatatttctcttttgtctgcccctattgtaagtgcagatggaacacaacaggttattctggtacaagttaacccaggagaagcatttacaataagaagagaagatggacagtttcagtgcattacaggtcctgctcaggttccaatgatgtccccaaatggttctgtgcctcctatctatgtgcctcctggatatgccccacaggttattgaagacaatggtgttcgaagagttgtcgtggtccctcaggcaccagagtttcaccctggtagtcacacagttctccaccgttctccacatcctcctctacctggtttcattcctgtcccaactatgatgccgcctccaccacgtcatatgtactcacccgtgactggagctggagacatgacaacacagtatatgccacagtatcagtcttcacaagtctatggagatgtagatgctcactctacacatggaaggtccaactttagagatgaacgatctagtaaaacatatgaacgtttgcagaaaaaattgaaggatcgccaaggaacacagaaagataaaatgagcagtccaccatcatcaccccagaaatgcccttctcccattaatgaacataatggacttataaaaggacaaattgctggtggtataaacacaggatcagcaaaaatcaagtctgggaaggggaaaggtggtacacaagttgatacagaaattgaagaaaaagatgaagaaactaaagcatttgaagcacttctttccaacattgtcaaaccagtggcctccgacatccaggcaaggacagtagtacttacctggtcaccaccttccagcctcattaatggtgaaacagatgaaagtagtgtaccagagctctatggttatgaagttctgatctcaagtactggaaaagatgggaaatacaaaagtgtatatgtaggagaagaaacaaatatcactttaaatgatctcaagccagccatggattaccatgcaaaagtccaggcagaatataattctataaagggaactccttcagaggctgaaatctttaccaccttgagctgtgaacctgatatacctaatccaccaaggatagccaatcggaccaaaaattcactcactttgcaatggaaggcacctagtgacaatggttctaaaatccaaaactttgtattagaatgggatgaaggaaaaggaaatggagaattttgtcagtgttacatgggctcacagaaacaatttaaaattactaaactttcaccagcaatgggctgtaaattcagactatcggccagaaatgactatggtacaagtggttttagtgaagaagtcttatattacacctcaggctgtgctccttctatgccagcaagtcctgtattaaccaaggctggaattacttggttatccttacaatggagtaagccctcaggaacaccatcagatgaaggaatttcttacattttagagatggaggaagaaacttcaggatatggttttaagcctaaatatgatggagaagatcttgcttacacagtgaaaaatctcagacgtagtactaagtataaatttaaggttattgcttacaactcagaaggtaaaagtaatccaagtgaagtagtagaatttactacttgccctgataaaccaggcatacctgtaaagccttcagtgaaaggaaagatacattcacacagttttaaaataacctgggatccaccaaaagacaatggcggagcaaccatcaataaatatgtagtggagatggcagaaggttctaacggaaacaaatgggaaatgatatacagtggtgctaccagggaacatctttgtgatcgactgaatccaggctgtttctatcgtttacgagtttactgcatcagtgatggaggacagagtgcggtctctgaatctttacttgtgcagactccagctgtgcctcctggcccatgcctccctcccagattacagggtagacccaaagcaaaagaaatacagttacgatggggaccccctctggttgatggtggatcacccatttcctgttacagtgtggaaatgtctcctatagaaaaagatgaacctagagaagtttaccaaggttctgaagtagaatgtacagtgagcagccttcttcctggaaagacatacagcttcagactacgtgcagctaacaaaatggggtttggaccattttcagaaaaatgtgatattactacagcccctgggccaccagatcagtgcaagccccctcaagtgacatgtagatctgcaacttgtgcacaagtgaattgggaggttcctttgagtaatggaacagatgtcactgaatatcgactggagtggggaggagttgaaggaagtatgcagatatgttactgtgggcctggtctcagttatgaaataaaaggactttcaccagcaactacctattattgcagggtccaggctctgagtgttgtgggtgcaggccctttcagtgaagtagtagcctgtgtgactccaccatcagttcctggcattgtgacctgtcttcaagaaataagcgatgatgagatagaaaatccccattattcaccttctacatgccttgcaataagctgggaaaagccttgtgatcatggttcggaaatccttgcctacagcatagactttggagataaacaatccctaacagtgggaaaggttacaagctatattatcaacaatttgcaaccagatacaacatacagaatacgaattcaagccttgaatagccttggagctggtcctttcagccatatgataaaattaaaaactaagcctctccctcctgatccacctcgtctggaatgtgttgcctttagccaccagaaccttaagctgaaatggggagaaggaactccaaagacattgtcaaccgattctattcagtaccaccttcagatggaggataagaatggacggtttgtatccctatacagaggaccatgtcatacatacaaagtacaaagacttaatgagtcaacatcctataaattctgtattcaagcttgtaatgaagctggggaaggtcccctctcccaagaatatattttcactactccaaaatctgtcccagctgccttgaaagcccccaaaatagagaaagtaaatgatcacatttgtgaaattacatgggagtgtttacagccaatgaaaggtgatccagttatttacagtcttcaagttatgttgggaaaagattcagaattcaaacagatttacaagggtcccgactcttccttccggtattccagccttcagctgaactgtgaatatcgcttccgtgtatgtgccattcgccagtgccaagactctctgggacaccaggacctcgtaggtccctacagcaccacagtgctcttcatctctcagaggactgaaccaccagccagcaccaacagagacactgtggaaagcacaaggacccgacgggcactgagtgacgagcagtgtgctgccgtcatccttgtgctgtttgctttcttttccattttgattgcctttatcattcagtactttgtaatcaagtgaaaatataactttattttttaactctattacattttattttgtcatgtactaaaattatttctgtattgcttttataaaaaacagtggcatttagcactggcattgagactatagcacatcatttttgccattttcagtgcttatattgttaggtagaggctggcactttattagaatgcaagccacaaaaatatcaattttgttttttttgttagggtgggtcttctttttttctttccctctctctttttttaacaaatgccttcttatagaaaaactttctaagaggcaacaatttagaatggatattttgacgaatcggcatgagtgtaacagtgataacctgatctgtttgttttaaagattattaccaagtgaaaaattcagaatgaatagaatttacactaacatgctatataaaatgttaaagtctgatgctgtgaaagcaatctagtgctatatttctacctcctcatttgtcttaattatttggtaagtgggattatgatgagtaactggaggggcttagaaacaaaaactggatgaaagagtatgcatgaagaaaagcttctttgataaatgtggagttcttcattataaatatatattcatgaattcacagataagtacttaaagaacagacagtttacttggcctaaaaatattttgatgtttactcaaaaagtacctcttcaggtcttgagaacatggaaaagaattgagtgcttttaaatactttttagaaagtaatcataaaagtaaattgaatttcaaacctatttggcttctgttttgtgaacctttgaactatatgtatgtgtataagggtatacacatacatatatggcatataacaagtgtacacatatacacataacaagtgtagaagtatatattacatacatacactcactctgtctggtataggctaattttgaagaactcccataagtttctgctgcttctcccataactgctgccaccaccatcagaattcataatcaaacctaacctttttgtttggggcaccaaatctgaagacaaaattaatttgcaccagtaaacttcaagctgctttctttcttgaaaactaaacgtttaacgtataatgtctgtttggatactgttccaaattgttgattgcatgtggttaatgttgcattagagcactttgcaattgcataattcattaatgttttgtgagcttgcatttgtgagttattggatgatcagactgaattttgtcaagtatcacattgtacatcttgcctagatgtcgatgactgcaagtaataatacagtttataatgaaactatctacaattcttgttttagcacatctgttatccgtaaaacacctgtaactagcttttttaatttattatttgaattttaggatagcgaatcactaatttttagttgctgaggttggcattttagtgattattaagcacttctgtcagtctttgaaaaaagaacgtattttttgtgctttgaagatctctgaagaatttcttttataatagaatgggcatgtattgtaacagttttatgtcaaatgatctgtgctgtagaaaaacattaacccttgttcaaaaaagaaatggataaacttggcctttctaagtggtaagaatgacctgtcactataatatactgtatgtttacattttatttaaatttaatctcttatgtatagggtgataaccttccccagaaacaacagtgattgcgattgttttctagaaacttctttaaagtgccacatttggcagtacaaatgagtctgagtgtaatagcccagagatttatatatagttgaatgtctaaaatggtaaaatgtgccactgtgtcaagttacagtggcttatgtttttcatagtaattcaaatgaacttcctatttttgatagtaaatgtcatttaatagtatacttgccatttgagcctcactgcaaaattagtgcagaggagaaaacaatttttaatgtaatcttgattttacctcatatactgtacattccaaaaactctaaactttttaaagattatagatacactaccaaacatatcaccttaaaattgtataaggctgaatgaacttcatacaaatgaaaaaaatctcataaaaatacataaactatgtagcaaaagtatctgtaaaatccatggaaaataaaagttgtatcattctttttgagatacgtttattgtattcatatatattcattatttgctacctgtttaagaaagtgaaatgttatggtctcccctcttccaatgagcttaaaacatttttcccaacagtatataaatcttcaacatgagaggatgtatatttattatataaagcccagtaaagaataaaattagaagttttatcctaaaaaaaaaaaaaaaaaa

SEQ ID NO: 1690 - DNA, 4126 bp, HOMO SAPIENS
aaagggagaaagaaagcgtgcgacagggagtgggagccccaagtcaagaggagccccacagaggcagccctggacttcgggaccacagaggtgctgagtgctgcccgattctggatcccactctgcttagctcagaactttgtcagcgagcaagaacaatgccaggaggtctggagaaaacgtgtcatcagtgcatttctaaaatcgccagcaatgcctgcttcgttgttgtgctctgtgctttcctggctctgccgctgtccatgaccttcataggaatgaaatttttggaggactgccctatacagcccctcattcctttatatttgctagtgggtggcatcgtcggtaccttaaaggtgtctctcctgttgtacgactccaccaggatgaggcggctgctgtccaaggccgtggtgattgatgacgatgacgatgacgaatacccctggaggcagaatgcgcacagatactacatccacctcctgctgagcctcttcctcttcctctggttcatcctgggaaactactgggtcttttctgtgtacctgcctgattttcttccccctttccagcagcctcaggactactgtgacaaaaccctgtacctctttgcagtcggagtcctggcgctcagtcacactgtgctggtcttgctcctgctgtgcagcggctgtgtctacctgtgctccaggtggagacttgctgccgatgaagactgacagctgccttgtccagcataccatgtatgcatatgcgtgtgcatgcacgcgcgtgcacacagacacacagacgcacacacacacacacacacacacaggttcagagaagggcataaaggtaataaaaccttccctgaaggcatttaaaaagccacccaaaggcactgaatataatagcagactaaagaaactcttgccttcctagacatggggaaatcacttctgctcttttcagagtgggaattttgttctcacaagagttttcaaagggataattgtttttgagggtatgaagtgtgggaggcaaagaatgggagaccttttcaaatcatagtgcaatttcaatgactggtgcaagagcaaggttggttgttgctactgctgctgtcattcagccatggtcaccttgaagttatagaaagtgcacagactttcacacaagatatatcttaacttcactcgctatgatggcttttgttattaaaaggaaaaagatattcttttagtgactctagctgccttttgggaaagtgaaggagcagtctcttccagccctatatcagataggtttgacgtgatgggtggaacatcccaaggtcagctataaaatctaacaacgtcaaagcagtagcttccacatagggggcgggctggcctgctacaggcattgcggagtgcagcgccgtgtgcaccgtgtgccgctgctgcaggttctttgcttggccttgagtctgtctctgcctctggctattcaagtacctctctatgatctgcggctggctgggtggcataaaccagttttgtatgtttctggacaggttgcatgagttggggtgccgtcagtgtagctgtttttggtttctgagcttaaatatcgaataatagctcctcaacctaatgaccagttaggctttggaagccttttgtaaattgagatgtctggaagtccaggatgacaccgaacagtgaccactaaccttccctctggctgccgctgttgagagatgaagtccaggtctgttgtcagtgctcgctggggagcctctttatgagcaaaaagtcccatgttttagaattttgtatgaagatactgtcatgagtgtttctagggcagtgcccaggggtgcgtggcacctgcttaaccgtgcttctctcagccacgtgcatagcatttctgtatatttacacactgctgagctgtgtttattttttaactttgttatgttttcgtgctttctcatcaaaccaatccctgagtggccatgaatggaggcacctcccttcatcagaagtgtcagctcaaaccaagaggctcattcttctccgtagctttaagagaaaggccccgtgagtcccatggggtcttcccatttcagtttagaagcactccccgggcagtcaccgttagtccccctttcctcccaggtgagaagaaagtgcttggtgtgccatctgctggacaaaggaagaacagccctttttttgcccctgtccctaagggcagtttctgttttcattttcacttgagccatggcagaagaccagcgggtgtgcagtttgcagatcctacctcacctatgatgcccaattccatcctcactgtgtcccacgttgccctctctgtgttggggactggggagagtctgtgggctatgatactggggtggacaggagttccatgggctcctctcccaccctcctttccccagtccatgactcgtcagccattcccagtcacttagccaatgcttggacatctgtgagcagcaaagacctgggcccagggacacctgcatgactcccacatgaaagcctctgaggcttctgttgcgagggccttggcaaaggcggaaagagctgtgaacaaccatgggcatgaagatttctgttagcagatggcaggtactggttagtgctttggatacatcagtagctaggtctcaaacgttggacattcccagtttctggtaggcatgagtatcaccagagtgttgcagaaatctttcccagagggagtggtggatgaagtgtgctcattctcatatgcaccccaccagcccacccccagttgcaatggagaatactggtcataggtcctaaataattgctaaaatctggactatatttttagctttgagttttcttgtcaccaaagcagtaaggaagaggtgatgatctctttgtataggtcatacatcttccctggtttgaggttacagtgagctatgattgcaccactgcactctactctgggtgacagaatgagaccccatctctaaaaaacaaaattacccccttctggggaaacaggttagatcctaaagaaaatgttcatgtgcatccattcatagaggggacactgaatggttcagtgggtgacatcttcaagcgcagcaggctttgaatgataactgattaaggcctccctcaggagatggtgagatggttatgataaggcacatttcaagaaagaggctctggggctaagtaaggcaaatggtctataactgtggttctttgaagtctggcttaatccagggatgacacccagactgtctaggaagggctgagctgcgtgccctttaagtgatcacctcttagtataatttcactgagctggaggtgagtgtaagaagttcctggttatagaagaagttataatccttggcatggcctgaagtaggcagtccacactgatatgaaatgtgctgtgtatacctggagaatgaaaatgcccatctaagactggcccaagagctgggcagccttcctccatgggaacctggcaaggcaatgggaagtggacatgggaacacctgaactttctggatgctatgaaacctcaagggaacaaattatgtggcagagagggataatctgttcttcccatctgagaaaagactgcagcaaagataaactatatgttgagatcattttatttgctacatcgggcatcattctaaaaaccattctttgcctgaatctatataaatgacagttgaaagcagtaaaagtgggactgtttcactggagtcagccacactagtggttctcaaatcttggtgaaccctgagagctacccaaggacttgtttgcaatgcagaatcacagcccccagagactgacttgtggggcccagctggttctgattcggtggccagagaaaccgcatgtgtgcactcgggccacacatacagcctggactggcttatgtcaggcccatcctggttgtcaccatgaggacaatataatgtcacttccagtacttcgtgttatttccttctcttttagtatgagaagtggccaagtggtcaatagctttcatctttgtgtaactgaatcttgtgcttcatttccttctgggcatttttcattgttgatgaaataaactttgttcaatttgt

SEQ ID NO: 1691 - DNA, 563 bp, HOMO SAPIENS
tagatctagctagtttggaaacaccagaataagaaatgaaatgaataaatataggaaaagaaataagaaaattataatttgcagattacatttttaaaaaatgtacacattgtgatttcaatttattggtgacaaaaattaaaaattaaaataaaaatttaaaagaatcagctgaaaaatttaacatccaataagatcatttagtaaggcttgagatataaaataaatatgaaatcagttgccttccaatgtatcaccaacaaccagttaaaacgaggaaaataaatgctattaataataaccacaaaaattacataaaatctaattaaagaattaacaagtaatgtgccaggtttttaaaatactgtattttactttgctacaaacatgtactagaggacatagaagatcagaacaaatataggagacttgtcacatttctgatggaacatctcgctgttataattaggtagttctctctaattacgttcagtataattcctgtaaaatcccagtgaagctctttctagaatttttagagtaggtcctaaagtttggctaat

SEQ ID NO: 1692 - DNA, 2361 bp, HOMO SAPIENS; identical to SEQ ID NO: 1329

SEQ ID NO: 1693 - DNA, 3435 bp, HOMO SAPIENS
cgtcacccaggccttgtctcccgagtcattggcgtcgtggttcaaaagaaatggaagaaaaggagcgatgtgaccgattgtgttcggtcctcctgctttgaggcctggcatttgcagagggaaacagcaagaaaatcgtggggattttggaggggggtgggagggaagggtggggaaacggaaacaaggtcttacattttatgtgtttttttaaattctgcactttgacagtggtagcaaaataaaagtaatccaaaagttatttttctattgagaagagagaagaggtgggttttatttttttccttttgattccaatcttttctcccagtgacaaagcataaatcatggacaccagagaataaggtggacctcaggaatccggaaaagactgagaagcttacattcttcctctagagggaagagtggggtgtttatagccatctctggaacctaaaacaaaaaacatgagttgtgtgccatggaaaggagacaaggccaaatctgaatcattggagctgccccaggcagcacccccacaaatctaccatgagaaacagcgcagggagctttgtgccctccacgccctcaataacgtcttccaggacagcaatgccttcacccgggatacgctgcaagagattttccagaggttgtctccaaacaccatggtgacacctcacaagaagagcatgctgggaaatggcaactacgatgtgaatgtcattatggcagcacttcagaccaaaggctatgaagctgtttggtgggacaagcgcagggatgtcggtgtcattgccctcactaacgtcatgggcttcatcatgaatctgccctccagcctatgctggggtccactgaaactgcccctcaaaaggcagcactggatctgtgttcgagaggtgggaggggcctactacaacctcgactccaaactcaagatgcccgagtggattggaggcgagagcgagctcaggaagtttctaaaacatcatttgcgaggaaagaactgtgaactcctgctggtggtaccagaagaggtagaggctcatcagagttggaggaccgatgtgtaacagttctgcccaacctccctctcgcctcagccccttcagtcctctgtgacgtgctgtggcctctacagtgggtctgcccttgccacttccccaaacatctcatcaagtttttccccttcagatctgacagtgcaataggacagacgtgtggactgttataagaactactcagtgttttgttcctgggcaaggaaggtaggagttctgtgcacttaaggccagtggtcacaaacccttgttttatttaagagacagaggagaaagtggagcggggagggaatcctagcttattttcccttttctatgaggacttgacacaggttctgctgagttgtcactgctgctccagactcacctagagatgctgcctccactttccatcctgtctgggtctgaaaacagtgggtctgcagatagtgcccacaaaccccatgtgactggtttgaaggacccagagcataaaggtctctcaggaaaccatgtccaaaaccctagcagcggtacagcatgctgtctccaacccttatccccaggtttaagggtggtttatggccatacgtggaggttttttgttgttgtttttgagactgagtttcactcttgttgcccaggctggagtgcaatggcaccatctcggctcactgcaacctccacctcctggttcaagcgattctcaggcctcagcttcccaagtagttgggattacaggcgcctgccaccacacctggctaattttgtatttttagtagagatggggtttctccatgttggtcaggctggtctcaaactcccgacctcaagtgatctgcccgccttggcctcccaaagtgctgggattacaggcgtgagccaccgcacccggcagagttttataatgaaaaattaactaatattctagtatgaagtgaggaggatactgaacaggatgtggctaaagccaacctgggacagccatggggtggcttggtttcttcactccagtgttgtccctaccatttcgcagcattgatttaggaggctctgggacaaaagagaagccaaagagcagttttcccagttcactcactctggcaaaatcaggaaaaaaaagtctgcttttgacatcaaattccactaatttggggcagcgttgggtgaggaaagtattgtgaagacaggcttcttggagtaggggcagccacaattcagtagacactctaggctcggaggctgccactgtagttgccaagctcaggttgggtggttctgtgctgtatggatggaataggacctgggctggtcatcttcatgtcgtttcctctctgtatcaatggaagttcaacccgcccctacctcttcagatagttgtaggccacttttctcttgtaactttggaaaacaaaagaggagaaataagtatcataccatatgcgtgtctccaaagtggatgtggttgcctcaaggcaggtggcaggcaggggtgacctgctggccctcagatcaatggtcgtggcaggtctgagagctgtcccactggccagacttctctccagcagcaaagccagcctggggcttgcatgttgatcctgagcaagcttaacggggtgaagctgggctttctcccccctgtgactggagtgcatgttgacaccagcactttttctgcacatgtatcttcaatccaacaaggccgtttttttaatgctgagtaacaggccaccaagcggctactgcgttatatcttctcagcaactggccgcagtctcttctgcaccattttctacaccagacctgcttggcaccacagggagctcttttcctgccctgcacaatgacattccaaccaccaccagccagacattacagccaaccttgctgattgtcacaagcaggaccttggggccactggcactgtcagatagtaagccatttcttgggtagaggaggaaactcctctccacaaatccacttgggcctgtgcaaatggcacttgaaagagtccccatgcacttggagtccatgagccaatgggatatgcaaagacgcttaaacatttcagggctggtttctctgttcatatccaattctggtgcttaggaacagggacccatgctgatgcccaagggcaaaaagccccacttcctttaaggaagtgaacaggcctgaccctgatgcccaataacgggcaaccctaggctttttgtttttcttgcttttattcctttttgttgttggccttgtgctgcgtttgtttacaaaagatgtattttgtttaaccaaatattaaaaatggaaaactccatatatgtctccttgtctgcctgaattctataattgtgtaaagaaaaataaactttagtatgacgctgttttaaaagga

SEQ ID NO: 1694 - DNA, 869 bp, HOMO SAPIENS
ccggattccgaagcccggagccgtttacagtttgaggcgccgtgtgccgccccctggtggccggaggccgttactgtcgcggctgagggggcgtcccggtgtatccgcagcgcgccctggccgccctctggtggccggaggccgttactgtcgcggctgagggggcgtcccggtgtatccgcagcgcgccctggccgccccctggtggccggaggccgttactgtcgcggctgagggggcgtcccggtgtatccgcagcgcgccctggccgacccctggtggccggaggccgttactgtcgcggctgaaggggcgtgtcccggtgtatccgcagcgcgccctggctgccccctggtggccggaggccgttactgtcgcggctgagggggcgtcccggtgtatccgcagcgcgccctgtcccgccatatacattccgtgcttttcaaacacccgccgtgggctaagcatgggacccacgtggggcggggacacacggcgataaagagccaggccctcgctgccaaggagctttcccgtaacaccgatgcatcaaacaaaaggcagcagtgaggatgccagagttcatgggtttctagaagacaagttttcaactgcagatacaaacatcaggacgtcaatgtatctgctaggagacacccggacagtgttgagaacacagaacctggaggctaaacccccagctttctatgccagctgagagtctgtgggcacattactcagcgtctctgaacctcatgctcctcccctgtgacatgtagattgctaaacccatctcacagggctatcttctgcatttaaagaataaaataacacatgaggggtctatcaatgaaaaaaaaaaaaaaaaa

SEQ ID NO: 1695 - DNA, 14982 bp, HOMO SAPIENS
ctgcttcacttcacggggcgaacatggcgcacagctgtcggtggcgcttccccgcccgacccgggaccaccgggggcggcggcggcggggggcgccggggcctagggggcgccccgcggcaacgcgtcccggccctgctgcttccccccgggcccccggtcggcggtggcggccccggggcgcccccctcccccccggctgtggcggccgcggcggcggcggcgggaagcagcggggctggggttccagggggagcggccgccgcctcagcagcctcctcgtcgtccgcctcgtcttcgtcttcgtcatcgtcctcagcctcttcagggccggccctgctccgggtgggcccgggcttcgacgcggcgctgcaggtctcggccgccatcggcaccaacctgcgccggttccgggccgtgtttggggagagcggcgggggaggcggcagcggagaggatgagcaattcttaggttttggctcagatgaagaagtcagagtgcgaagtcccacaaggtctccttcagttaaaactagtcctcgaaaacctcgtgggagacctagaagtggctctgaccgaaattcagctatcctctcagatccatctgtgttttcccctctaaataaatcagagaccaaatctggagataagatcaagaagaaagattctaaaagtatagaaaagaagagaggaagacctcccaccttccctggagtaaaaatcaaaataacacatggaaaggacatttcagagttaccaaagggaaacaaagaagatagcctgaaaaaaattaaaaggacaccttctgctacgtttcagcaagccacaaagattaaaaaattaagagcaggtaaactctctcctctcaagtctaagtttaagacagggaagcttcaaataggaaggaagggggtacaaattgtacgacggagaggaaggcctccatcaacagaaaggataaagaccccttcgggtctcctcattaattctgaactggaaaagccccagaaagtccggaaagacaaggaaggaacacctccacttacaaaagaagataagacagttgtcagacaaagccctcgaaggattaagccagttaggattattccttcttcaaaaaggacagatgcaaccattgctaagcaactcttacagagggcaaaaaagggggctcaaaagaaaattgaaaaagaagcagctcagctgcagggaagaaaggtgaagacacaggtcaaaaatattcgacagttcatcatgcctgttgtcagtgctatctcctcgcggatcattaagacccctcggcggtttatagaggatgaggattatgaccctccaattaaaattgcccgattagagtctacaccgaatagtagattcagtgccccgtcctgtggatcttctgaaaaatcaagtgcagcttctcagcactcctctcaaatgtcttcagactcctctcgatctagtagccccagtgttgatacctccacagactctcaggcttctgaggagattcaggtacttcctgaggagcggagcgatacccctgaagttcatcctccactgcccatttcccagtccccagaaaatgagagtaatgataggagaagcagaaggtattcagtgtcggagagaagttttggatctagaacgacgaaaaaattatcaactctacaaagtgccccccagcagcagacctcctcgtctccacctccacctctgctgactccaccgccaccactgcagccagcctccagtatctctgaccacacaccttggcttatgcctccaacaatccccttagcatcaccatttttgcctgcttccactgctcctatgcaagggaagcgaaaatctattttgcgagaaccgacatttaggtggacttctttaaagcattctaggtcagagccacaatacttttcctcagcaaagtatgccaaagaaggtcttattcgcaaaccaatatttgataatttccgaccccctccactaactcccgaggacgttggctttgcatctggtttttctgcatctggtaccgctgcttcagcccgattgttttcgccactccattctggaacaaggtttgatatgcacaaaaggagccctcttctgagagctccaagatttactccaagtgaggctcactctagaatatttgagtctgtaaccttgcctagtaatcgaacttctgctggaacatcttcttcaggagtatccaatagaaaaaggaaaagaaaagtgtttagtcctattcgatctgaaccaagatctccttctcactccatgaggacaagaagtggaaggcttagtagttctgagctctcacctctcacccccccgtcttctgtctcttcctcgttaagcatttctgttagtcctcttgccactagtgccttaaacccaacttttacttttccttctcattccctgactcagtctggggaatctgcagagaaaaatcagagaccaaggaagcagactagtgctccggcagagccattttcatcaagtagtcctactcctctcttcccttggtttaccccaggctctcagactgaaagagggagaaataaagacaaggcccccgaggagctgtccaaagatcgagatgctgacaagagcgtggagaaggacaagagtagagagagagaccgggagagagaaaaggagaataagcgggagtcaaggaaagagaaaaggaaaaagggatcagaaattcagagtagttctgctttgtatcctgtgggtagggtttccaaagagaaggttgttggtgaagatgttgccacttcatcttctgccaaaaaagcaacagggcggaagaagtcttcatcacatgattctgggactgatattacttctgtgactcttggggatacaacagctgtcaaaaccaaaatacttataaagaaagggagaggaaatctggaaaaaaccaacttggacctcggcccaactgccccatccctggagaaggagaaaaccctctgcctttccactccttcatctagcactgttaaacattccacttcctccataggctccatgttggctcaggcagacaagcttccaatgactgacaagagggttgccagcctcctaaaaaaggccaaagctcagctctgcaagattgagaagagtaagagtcttaaacaaaccgaccagcccaaagcacagggtcaagaaagtgactcatcagagacctctgtgcgaggaccccggattaaacatgtctgcagaagagcagctgttgcccttggccgaaaacgagctgtgtttcctgatgacatgcccaccctgagtgccttaccatgggaagaacgagaaaagattttgtcttccatggggaatgatgacaagtcatcaattgctggctcagaagatgctgaacctcttgctccacccatcaaaccaattaaacctgtcactagaaacaaggcaccccaggaacctccagtaaagaaaggacgtcgatcgaggcggtgtgggcagtgtcccggctgccaggtgcctgaggactgtggtgtttgtactaattgcttagataagcccaagtttggtggtcgcaatataaagaagcagtgctgcaagatgagaaaatgtcagaatctacaatggatgccttccaaagcctacctgcagaagcaagctaaagctgtgaaaaagaaagagaaaaagtctaagaccagtgaaaagaaagacagcaaagagagcagtgttgtgaagaacgtggtggactctagtcagaaacctaccccatcagcaagagaggatcctgccccaaagaaaagcagtagtgagcctcctccacgaaagcccgtcgaggaaaagagtgaagaagggaatgtctcggcccctgggcctgaatccaaacaggccaccactccagcttccaggaagtcaagcaagcaggtctcccagccagcactggtcatcccgcctcagccacctactacaggaccgccaagaaaagaagttcccaaaaccactcctagtgagcccaagaaaaagcagcctccaccaccagaatcaggtccagagcagagcaaacagaaaaaagtggctccccgcccaagtatccctgtaaaacaaaaaccaaaagaaaaggaaaaaccacctccggtcaataagcaggagaatgcaggcactttgaacatcctcagcactctctccaatggcaatagttctaagcaaaaaattccagcagatggagtccacaggatcagagtggactttaaggaggattgtgaagcagaaaatgtgtgggagatgggaggcttaggaatcttgacttctgttcctataacacccagggtggtttgctttctctgtgccagtagtgggcatgtagagtttgtgtattgccaagtctgttgtgagcccttccacaagttttgtttagaggagaacgagcgccctctggaggaccagctggaaaattggtgttgtcgtcgttgcaaattctgtcacgtttgtggaaggcaacatcaggctacaaagcagctgctggagtgtaataagtgccgaaacagctatcaccctgagtgcctgggaccaaactaccccaccaaacccacaaagaagaagaaagtctggatctgtaccaagtgtgttcgctgtaagagctgtggatccacaactccaggcaaagggtgggatgcacagtggtctcatgatttctcactgtgtcatgattgcgccaagctctttgctaaaggaaacttctgccctctctgtgacaaatgttatgatgatgatgactatgagagtaagatgatgcaatgtggaaagtgtgatcgctgggtccattccaaatgtgagaatctttcagatgagatgtatgagattctatctaatctgccagaaagtgtggcctacacttgtgtgaactgtactgagcggcaccctgcagagtggcgactggcccttgaaaaagagctgcagatttctctgaagcaagttctgacagctttgttgaattctcggactaccagccatttgctacgctaccggcaggctgccaagcctccagacttaaatcccgagacagaggagagtataccttcccgcagctcccccgaaggacctgatccaccagttcttactgaggtcagcaaacaggatgatcagcagcctttagatctagaaggagtcaagaggaagatggaccaagggaattacacatctgtgttggagttcagtgatgatattgtgaagatcattcaagcagccattaattcagatggaggacagccagaaattaaaaaagccaacagcatggtcaagtccttcttcattcggcaaatggaacgtgtttttccatggttcagtgtcaaaaagtccaggttttgggagccaaataaagtatcaagcaacagtgggatgttaccaaacgcagtgcttccaccttcacttgaccataattatgctcagtggcaggagcgagaggaaaacagccacactgagcagcctcctttaatgaagaaaatcattccagctcccaaacccaaaggtcctggagaaccagactcaccaactcctctgcatcctcctacaccaccaattttgagtactgataggagtcgagaagacagtccagagctgaacccacccccaggcatagaagacaatagacagtgtgcgttatgtttgacttatggtgatgacagtgctaatgatgctggtcgtttactatatattggccaaaatgagtggacacatgtaaattgtgctttgtggtcagcggaagtgtttgaagatgatgacggatcactaaagaatgtgcatatggctgtgatcaggggcaagcagctgagatgtgaattctgccaaaagccaggagccaccgtgggttgctgtctcacatcctgcaccagcaactatcacttcatgtgttcccgagccaagaactgtgtctttctggatgataaaaaagtatattgccaacgacatcgggatttgatcaaaggcgaagtggttcctgagaatggatttgaagttttcagaagagtgtttgtggactttgaaggaatcagcttgagaaggaagtttctcaatggcttggaaccagaaaatatccacatgatgattgggtctatgacaatcgactgcttaggaattctaaatgatctctccgactgtgaagataagctctttcctattggatatcagtgttccagggtatactggagcaccacagatgctcgcaagcgctgtgtatatacatgcaagatagtggagtgccgtcctccagtcgtagagccggatatcaacagcactgttgaacatgatgaaaacaggaccattgcccatagtccaacatcttttacagaaagttcatcaaaagagagtcaaaacacagctgaaattataagtcctccatcaccagaccgacctcctcattcacaaacctctggctcctgttattatcatgtcatctcaaaggtccccaggattcgaacacccagttattctccaacacagagatcccctggctgtcgaccgttgccttctgcaggaagtcctaccccaaccactcatgaaatagtcacagtaggtgatcctttactctcctctggacttcgaagcattggctccaggcgtcacagtacctcttccttatcaccccagcggtccaaactccggataatgtctccaatgagaactgggaatacttactctaggaataatgtttcctcagtctccaccaccgggaccgctactgatcttgaatcaagtgccaaagtagttgatcatgtcttagggccactgaattcaagtactagtttagggcaaaacacttccacctcttcaaatttgcaaaggacagtggttactgtaggcaataaaaacagtcacttggatggatcttcatcttcagaaatgaagcagtccagtgcttcagacttggtgtccaagagctcctctttaaagggagagaagaccaaagtgctgagttccaagagctcagagggatctgcacataatgtggcttaccctggaattcctaaactggccccacaggttcataacacaacatctagagaactgaatgttagtaaaatcggctcctttgctgaaccctcttcagtgtcgttttcttctaaagaggccctctccttcccacacctccatttgagagggcaaaggaatgatcgagaccaacacacagattctacccaatcagcaaactcctctccagatgaagatactgaagtcaaaaccttgaagctatctggaatgagcaacagatcatccattatcaacgaacatatgggatctagttccagagataggagacagaaagggaaaaaatcctgtaaagaaactttcaaagaaaagcattccagtaaatcttttttggaacctggtcaggtgacaactggtgaggaaggaaacttgaagccagagtttatggatgaggttttgactcctgagtatatgggccaacgaccatgtaacaatgtttcttctgataagattggtgataaaggcctttctatgccaggagtccccaaagctccacccatgcaagtagaaggatctgccaaggaattacaggcaccacggaaacgcacagtcaaagtgacactgacacctctaaaaatggaaaatgagagtcaatccaaaaatgccctgaaagaaagtagtcctgcttcccctttgcaaatagagtcaacatctcccacagaaccaatttcagcctctgaaaatccaggagatggtccagtggcccaaccaagccccaataatacctcatgccaggattctcaaagtaacaactatcagaatcttccagtacaggacagaaacctaatgcttccagatggccccaaacctcaggaggatggctcttttaaaaggaggtatccccgtcgcagtgcccgtgcacgttctaacatgttttttgggcttaccccactctatggagtaagatcctatggtgaagaagacattccattctacagcagctcaactgggaagaagcgaggcaagagatcagctgaaggacaggtggatggggccgatgacttaagcacttcagatgaagacgacttatactattacaacttcactagaacagtgatttcttcaggtggagaggaacgactggcatcccataatttatttcgggaggaggaacagtgtgatcttccaaaaatctcacagttggatggtgttgatgatgggacagagagtgatactagtgtcacagccacaacaaggaaaagcagccagattccaaaaagaaatggtaaagaaaatggaacagagaacttaaagattgatagacctgaagatgctggggagaaagaacatgtcactaagagttctgttggccacaaaaatgagccaaagatggataactgccattctgtaagcagagttaaaacacagggacaagattccttggaagctcagctcagctcattggagtcaagccgcagagtccacacaagtaccccctccgacaaaaatttactggacacctataatactgagctcctgaaatcagattcagacaataacaacagtgatgactgtgggaatatcctgccttcagacattatggactttgtactaaagaatactccatccatgcaggctttgggtgagagcccagagtcatcttcatcagaactcctgaatcttggtgaaggattgggtcttgacagtaatcgtgaaaaagacatgggtctttttgaagtattttctcagcagctgcctacaacagaacctgtggatagtagtgtctcttcctctatctcagcagaggaacagtttgagttgcctctagagctaccatctgatctgtctgtcttgaccacccggagtcccactgtccccagccagaatcccagtagactagctgttatctcagactcaggggagaagagagtaaccatcacagaaaaatctgtagcctcctctgaaagtgacccagcactgctgagcccaggagtagatccaactcctgaaggccacatgactcctgatcattttatccaaggacacatggatgcagaccacatctctagccctccttgtggttcagtagagcaaggtcatggcaacaatcaggatttaactaggaacagtagcacccctggccttcaggtacctgtttccccaactgttcccatccagaaccagaagtatgtgcccaattctactgatagtcctggcccgtctcagatttccaatgcagctgtccagaccactccaccccacctgaagccagccactgagaaactcatagttgttaaccagaacatgcagccactttatgttctccaaactcttccaaatggagtgacccaaaaaatccaattgacctcttctgttagttctacacccagtgtgatggagacaaatacttcagtattgggacccatgggaggtggtctcacccttaccacaggactaaatccaagcttgccaacttctcaatctttgttcccttctgctagcaaaggattgctacccatgtctcatcaccagcacttacattccttccctgcagctactcaaagtagtttcccaccaaacatcagcaatcctccttcaggcctgcttattggggttcagcctcctccggatccccaacttttggtttcagaatccagccagaggacagacctcagtaccacagtagccactccatcctctggactcaagaaaagacccatatctcgtctacagacccgaaagaataaaaaacttgctccctctagtaccccttcaaacattgccccttctgatgtggtttctaatatgacattgattaacttcacaccctcccagcttcctaatcatccaagtctgttagatttggggtcacttaatacttcatctcaccgaactgtccccaacatcataaaaagatctaaatctagcatcatgtattttgaaccggcacccctgttaccacagagtgtgggaggaactgctgccacagcggcaggcacatcaacaataagccaggatactagccacctcacatcagggtctgtgtctggcttggcatccagttcctctgtcttgaatgttgtatccatgcaaactaccacaacccctacaagtagtgcgtcagttccaggacacgtcaccttaaccaacccaaggttgcttggtaccccagatattggctcaataagcaatcttttaatcaaagctagccagcagagcctggggattcaggaccagcctgtggctttaccgccaagttcaggaatgtttccacaactggggacatcacagaccccctctactgctgcaataacagcggcatctagcatctgtgtgctcccctccactcagactacgggcataacagccgcttcaccttctggggaagcagacgaacactatcagcttcagcatgtgaaccagctccttgccagcaaaactgggattcattcttcccagcgtgatcttgattctgcttcagggccccaggtatccaactttacccagacggtagacgctcctaatagcatgggactggagcagaacaaggctttatcctcagctgtgcaagccagccccacctctcctgggggttctccatcctctccatcttctggacagcggtcagcaagcccttcagtgccgggtcccactaaacccaaaccaaaaaccaaacggtttcagctgcctctagacaaagggaatggcaagaagcacaaagtttcccatttgcggaccagttcttctgaagcacacattccagaccaagaaacgacatccctgacctcaggcacagggactccaggagcagaggctgagcagcaggatacagctagcgtggagcagtcctcccagaaggagtgtgggcaacctgcagggcaagtcgctgttcttccggaagttcaggtgacccaaaatccagcaaatgaacaagaaagtgcagaacctaaaacagtggaagaagaggaaagtaatttcagctccccactgatgctttggcttcagcaagaacaaaagcggaaggaaagcattactgagaaaaaacccaagaaaggacttgtttttgaaatttccagtgatgatggctttcagatctgtgcagaaagtattgaagatgcctggaagtcattgacagataaagtccaggaagctcgatcaaatgcccgcctaaagcagctctcatttgcaggtgttaacggtttgaggatgctggggattctccatgatgcagttgtgttcctcattgagcagctgtctggtgccaagcactgtcgaaattacaaattccgtttccacaagccagaggaggccaatgaaccccccttgaaccctcacggctcagccagggctgaagtccacctcaggaagtcagcatttgacatgtttaacttcctggcttctaaacatcgtcagcctcctgaatacaaccccaatgatgaagaagaggaggaggtacagctgaagtcagctcggagggcaactagcatggatctgccaatgcccatgcgcttccggcacttaaaaaagacttctaaggaggcagttggtgtctacaggtctcccatccatggccggggtcttttctgtaagagaaacattgatgcaggtgagatggtgattgagtatgccggcaacgtcatccgctccatccagactgacaagcgggaaaagtattacgacagcaagggcattggttgctatatgttccgaattgatgactcagaggtagtggatgccaccatgcatggaaatgctgcacgcttcatcaatcactcgtgtgagcctaactgctattctcgggtcatcaatattgatgggcagaagcacattgtcatctttgccatgcgtaagatctaccgaggagaggaactcacttacgactataagttccccattgaggatgccagcaacaagctgccctgcaactgtggcgccaagaaatgccggaagttcctaaactaaagctgctcttctcccccagtgttggagtgcaaggaggcggggccatccaaagcaacgctgaaggccttttccagcagctgggagctcccggattgcgtggcacagctgaggggcctctgtgatggctgagctctcttatgtcctatactcacatcagacatgtgatcatagtcccagagacagagttgaggtctcgaagaaaagatccatgatcggctttctcctggggcccctccaattgtttactgttagaaagtgggaatggggtccctagcagacttgcctggaaggagcctattatagagggttggttatgttgggagattgggcctgaatttctccacagaaataagttgccatcctcaggttggccctttcccaagcactgtaagtgagtgggtcaggcaaagccccaaatggagggttggttagattcctgacagtttgccagccaggccccacctacagcgtctgtcgaacaaacagaggtctggtggttttccctactatcctcccactcgagagttcacttctggttgggagacaggattcctagcacctccggtgtcaaaaggctgtcatggggttgtgccaattaattaccaaacattgagcctgcaggctttgagtgggagtgttgcccccaggagccttatctcagccaattacctttcttgacagtaggagcggcttccctctcccattccctcttcactcccttttcttcctttcccctgtcttcatgccactgctttcccatgcttctttcgggttgtaggggagactgactgcctgctcaaggacactccctgctgggcataggatgtgcctgcaaaaagttccctgagcctgtaagcactccaggtggggaagtggacaggagccattggtcataaccagacagaatttggaaacattttcataaagctccatggagagttttaaagaaacatatgtagcatgattttgtaggagaggaaaaagattatttaaataggatttaaatcatgcaacaacgagagtatcacagccaggatgacccttgggtcccattcctaagacatggttactttattttccccttgttaagacataggaagacttaatttttaaacggtcagtgtccagttgaaggcagaacactaatcagatttcaaggcccacaacttggggactagaccaccttatgttgagggaactctgccacctgcgtgcaacccacagctaaagtaaattcaatgacactactgccctgattactccttaggatgtggtcaaaacagcatcaaatgtttcttctcttcctttccccaagacagagtcctgaacctgttaaattaagtcattggattttactctgttctgtttacagtttactatttaaggttttataaatgtaaatatattttgtatatttttctatgagaagcacttcatagggagaagcacttatgacaaggctattttttaaaccgcggtattatcctaatttaaaagaagatcggtttttaataattttttattttcataggatgaagttagagaaaatattcagctgtacacacaaagtctggtttttcctgcccaacttccccctggaaggtgtactttttgttgtttaatgtgtagcttgtttgtgccctgttgacataaatgtttcctgggtttgctctttgacaataaatggagaaggaaggtcacccaactccattgggccactcccctccttcccctattgaagctcctcaaaaggctacagtaatatcttgatacaacagattctcttctttcccgcctctctcctttccggcgcaacttccagagtggtgggagacggcaatctttacatttccctcatctttcttacttcagagttagcaaacaacaagttgaatggcaacttgacatttttgcatcaccatctgcctcataggccactctttcctttccctctgcccaccaagtcctcatatctgcagagaacccattgatcaccttgtgccctcttttggggcagcctgttgaaactgaagcacagtctgaccactcacgataaagcagatttttctctgcctctgccacaaggtttcagagtagtgtagtccaagtagagggtggggcacccttttctcgccgcaagaagcccattcctatggaagtctagcaaagcaatacgactcagcccagcactctctgccccaggactcatggctctgctgtgccttccatcctgggctcccttctctcctgtgaccttaagaactttgtctggtggctttgctggaacattgtcactgttttcactgtcatgcagggagcccagcactgtggccaggatggcagagacttccttgtcatcatggagaagtgccagcaggggactgggaaaagcactctacccagacctcacctcccttcctccttttgcccatgaacaagatgcagtggccctaggggttccactagtgtctgctttcctttattattgcactgtgtgaggtttttttgtaaatccttgtattcctattttttttaaagaaaaaaaaaaaaccttaagctgcatttgttactgaaatgattaatgcactgatgggtcctgaattcaccttgagaaagacccaaaggccagtcagggggtggggggaactcagctaaatagacctagttactgccctgctaggccatgctgtactgtgagcccctcctcactctctaccaaccctaaaccctgaggacaggggaggaacccacagcttccttctcctgccagctgcagatggtttgccttgcctttccaccccctaattgtcaaccacaaaaatgagaaattcctcttctagctcagccttgagtccattgccaaattttcagcacacctgccagcaacttgggggaataagcgaaggtttccctacaagagggaaagaaggcaaaaacggcacagctatctccaaacacatctgagttcatttcaaaagtgaccaagggaatctccgcacaaaagtgcagattgaggaattgtgatgggtcattcccaagaatcccccaa

SEQ ID NO: 1696 - DNA, 2981 bp, HOMO SAPIENS
gcattactcatactcagcggacaaaggatcactcagcattcaatctcaccacttcaaaacattacagagggaaaacgacacctagaagtaggagtgagattcgctgaagttcccttctgaggaagacccacccctccgcctggagagccggggctggcggtgcctgaggaccccttcggcctggacagcccacgcgggcttggggggcctcgctctgccctcatggggcggccatcggttcccgaagcggcgagtgaaaattcaaatggccagtagggggcgcactcggaagtggccgccccgcatgaggcagttcagcggccccgagagtccggggagggaggtttattctccgcctgcacgagactgtgaaatccgcaaccatgagcaggagaggcggccctggtggggaagaggccaccaacatctggacggcagccctgctcaggcattcggcaggtccagcagaggtacacctcctgcagcgggttccaagtgcacctccagcctgatgggcctgaccaaggaggcttccaggagcacagaaggggctgcaacccaggtacccagagagtgagcagctccacgcgggactgtgcacggtggccgacacccgcagggacgcccgccggacgagcacgcggagggccctcgcctccacggatgcaccatgccggtgtgaggagcatctgttcttcccactctctgcagttaacaaacccaacccaaaccaccacaggtgctcctcctggggagtttcctgtctgacaaatgccaggctcacttcaaggagaatcacgcttctttctaaagatggattcaccatttaaaacagagctctgggagcctttcggcaaatcttgaaagctgcacggtgcagagacatggatgtgacttcccaagcccggggcgtgggcctggagatgtacccaggcaccgcgcagcctgcggcccccaacaccacctcccccgagctcaacctgtcccacccgctcctgggcaccgccctggccaatgggacaggtgagctctcggagcaccagcagtacgtgatcggcctgttcctctcgtgcctctacaccatcttcctcttccccatcggctttgtgggcaacatcctgatcctggtggtgaacatcagcttccgcgagaagatgaccatccccgacctgtacttcatcaacctggcggtggcggacctcatcctggtggccgactccctcattgaggtgttcaacctgcacgagcggtactacgacatcgccgtcctgtgcaccttcatgtcgctcttcctgcaggtcaacatgtacagcagcgtcttcttcctcacctggatgagcttcgaccgctacatcgccctggccagggccatgcgctgcagcctgttccgcaccaagcaccacgcccggctgagctgtggcctcatctggatggcatccgtgtcagccacgctggtgcccttcaccgccgtgcacctgcagcacaccgacgaggcctgcttctgtttcgcggatgtccgggaggtgcagtggctcgaggtcacgctgggcttcatcgtgcccttcgccatcatcggcctgtgctactccctcattgtccgggtgctggtcagggcgcaccggcaccgtgggctgcggccccggcggcagaaggcgctccgcatgatcctcgcggtggtgctggtcttcttcgtctgctggctgccggagaacgtcttcatcagcgtgcacctcctgcagcggacgcagcctggggccgctccctgcaagcagtctttccgccatgcccaccccctcacgggccacattgtcaacctcgccgccttctccaacagctgcctaaaccccctcatctacagctttctcggggagaccttcagggacaagctgaggctgtacattgagcagaaaacaaatttgccggccctgaaccgcttctgtcacgctgccctgaaggccgtcattccagacagcaccgagcagtcggatgtgaggttcagcagtgccgtgtagacagccttggccgcataggcccagccagggtgtgactcgggagctgcacacacctgggtggacacaaggcacggccacgtcatgtctctaaactgcggtcagatgtggcttctggctcctcggggcctcgcgagggtcacgcttgcctggtcaccctggggctgcttaggaaacctcacgactggtcaccttgcactcctcacacagaattgctacaatcccaaagcgctcgccccgcagggtccaaaggccagcggtgaccagcctgtcacccagctcctccccgccaaccctgcctgccgctgcacctgcctgccgctgcaggaaacatttctgacaccgtcgaccaggaaagccacacggagaggccactgtgggtgaagcgcctcagttacacaggaaccctaaagcaaatctgccaccgtgggggaactgacgctggagatgcaaggtgctggtgggtctgagctggacgtcgcggtgtgtcctctgtgcccacggtctgagctagctagcgcaccgccgagttaaagaggagaaggaaaacatgctgctctggtgcacgcctgagcgtcctccatcttccaggatggcagcaatggcgctgtgcggcctcaccaggcccacgaggagcagcagcgctcggcccggagcagcaggaaggcccctctgtggagcgcccgccgtctgctccggggtggttcagtcactgcttgttgacatcaacatggcaattgcactcatgtggactgggaccgtgcgagctgccgtgtgggttagtcgggtgccaggacaatgaaatactccagcacctgtggctgacgaatttgtttctacagaaataacagctggggacaactgcggtgatgatgtaaaaaccttcccataaaatgtaagaaaagctgatgaggctggtgacgttcagcctttgtcaataaacctgtcatgtgcggatccttaaaaaaaaaa

SEQ ID NO: 1697 - DNA, 418 bp, HOMO SAPIENS
  misc_feature (205)..(205): n is a, c, g, or t
tatccactgcttgccgacttcagtagcaagagcctccagaatgctcatggataaacatcatctttgtggccacacattgttttatgagctgagtcatcagactggctggctccttaaatgctgctgtgtgattctctaggcagcagaaaacaaggagagaagatatgaagtgtatctcatcgagctttgtagagggccagtatcnattcaccaaaggtgatgggggatttaccattatggagtttgcttgtgataaaaaattattgatcaacttaaactctaagagaaaaagatgatgctgtctgcatttcttgtaaattatttataaaatttgtttgggtatcggctatttttaacagccaccagtcttaacgaatttcctgcagaaaacttgattccttccttgctcatcgagttg

SEQ ID NO: 1698 - DNA, 8059 bp, HOMO SAPIENS
aaaagggcggtggggcggggggcggggcagggagagggagagaaatccagcagacatctagctctgcctttctttcccagccacagccagggtagggctgataaggcgctgatgcgttgatggcagccttgcagagctagacctgcacttaacttgcagctgcctcccgagcctccaagatgtccacgccctgggtgacaggcggcagggcgctgccccgtgctcccccggctctgctcgacagcagcacgcagtgagagcctcgccgccgccgaggagcaactcatgtaacggcacagccaacaagatgaacggagctttggatcactcagaccaaccagacccagatgccattaagatgtttgtcggacagatcccccggtcatggtcggaaaaggagctgaaagaactttttgagccttacggagccgtctaccagatcaacgtcctccgggaccggagtcagaaccctccgcagagtaaaggttgttgtttcgtaacattttatacaagaaaagctgcacttgaggcccagaatgcactgcacaatattaaaactttacctgggatgcatcatcccattcagatgaaacctgcagatagtgaaaagtccaacgctgtggaagacagaaaattgttcataggaatggtatcgaagaaatgtaatgagaacgacatcagggtgatgttctctccatttggccagatagaagaatgccggatcctccggggacctgatgggctgagtcgaggctgtgcgtttgtcacattttctacaagggcaatggcacagaatgcaatcaaagccatgcatcagtctcagaccatggagggctgctcttcacctatcgtggtgaagtttgctgacactcagaaggacaaagagcaaaggcgcctccagcagcagctcgctcagcagatgcagcagctcaacactgccacctgggggaacctgacagggctgggcggactgaccccacagtatctggcgctcctgcagcaggccacctcctccagcaacctgggtgcgttcagcggcattcaacaaatggcaggcatgaatgctttacagttgcagaacctggcgacgctggctgctgctgcagctgcggcccagacctcagccaccagcaccaatgcaaaccctctctctaccacgagcagcgccctgggagccctcacgagtcccgtggctgcttcaacccccaactccactgctggtgcagccatgaactccttgacctctctcgggactctgcaaggactggctggagccactgttggactgaataatattaatgcactagcagttgctcaaatgctctcaggtatggcggctctgaatggaggacttggcgccacaggcttgacgaatggcacggctggcaccatggacgccctcacccaggcctactcaggaattcaacagtacgcagccgccgcgctgcccactctgtacagccagagcctgctgcagcagcagagcgctgcaggcagccagaaggaaggtccagagggggcaaacctctttatttaccaccttccacaggaatttggagaccaggacattctgcagatgttcatgccttttggaaatgttatctctgctaaagtcttcattgacaaacagaccaatctgagcaagtgctttggttttgttagctacgacaatccagtctctgcacaagctgctatccaagctatgaatggctttcagatcggcatgaaacgcttgaaggtgcagctgaagcgttccaaaaacgacagcaaaccttactgatcctaaccccagaggctccctgctctcattttagctttcttaggacatcttcatgcccgttagttcatcgtttgcctagcatgtccctgtggcgtctcaaaaaaaagtttcatcgtcccgtcattgtttctgatgtctttctgacctcacatcatatttggttctcctactgacctttgatctagtttgacctttgaaatttgcatgtgacctcatctagctatgaattctgggaagtcaatgtgaaaaacattgctgcattcatgcaagactgaaatttattattagacaaattcattatagaaaaaacctgtggcaaaaacgtttctttcttattttttttcttttcctaaaacagacttgaaagtattatacagggattggcattcttcccggtcactggtaacaatagcaatatgtgtccagggacacagaatgttggtttctaacagactacttccaaaaacagtttgagaaaaaaactgtctgattttaagtctctagaggtctgtaatagtttttacatttttcaggcagtgtaaagttttttgataaggccattttaggtggctcactttctcattaagatatatatatagaaccactttttgtagattagtataagaaaaatatttaccctgttttggggcaaatgctacctatttgtgtcaccttttgctgaactcacagttagacaatccatggtttaatgcacatgaaattacctatattttatactgtttcaatgtacaggagaaaggttactgtaaactgtgttatgttggtgcttctgtgaattaagttgtggtttcatcatgagtcttaatgttctttgttgataagacaagtttagaattggtttacttaatacaaaaaaaaaaaaaagaatttcaaaaaaaaaagttgtttgcttaaaaaaaatttcatgtgagggaaaaaaaaaaaacctattccagaataagttttgtgttggcttgtgaagcattgatgtcattttttttaattgtggactatttagatgtgtttgtgttcagcaaaatgtgatctgtttttttcttttaaagaaaaaaagtgaaaatatatagtgccaaattccaaaggtacttccttcctagagcttcagtgtgtttcttgtgagaagtaatttgataacatgggtattttattatgtgttttgtataaatccctaatatttaaaaaaaaaaacaaaacaaaaaaaggttacaaagtttgttaacttgctatcctgtggtcttgttgcctgaaattgttattgtttgttatttctctctgatgttttttgtaagacattgtataagtgcccatgtcccacttttttaaccactccgcacatcagtgctgtgaaggcaacctcaccatgtattttcttcataatctatggaaacctctaaggtgagaaagttttgaacttttaaccctttctacccagagctatctggaatgttgatgactttttatactgtcatgatttgagtttgttttggggtgtttccaatttggatttttttccctgcatctatcctctaagttgtttcggtttgactactttgttctttggttaagatccaaaagaaaacagaaaacaattccacgaggccaatctaaagggaaaaaatcctacactacttttactacttttgattatttctcatttttgggaaaagaattcctaatgtgctactagaattccttcttcagttttaacgagtaattggataaaccctgagggaaaacggaggtagattcagcacctaacaatcctgtatgcttttgagatcacgtttagtgctatgtcctagtctagaatattttcatataccttgcagtaaaacgactttgtggcaggacagtctcttgaggggttttgtttctgtttcctaaatactcctaaataatatttctaatcagccattatgctggggcatctctgatcccagtaggtacctctgaatataccaggtgtctggagttagaagcccatagccctttcccagcctttttggtttttttaattgaacacatttcatctaagtaaagctcagttctttatcacaatttactgaccaaatacctagcaccagttcctgctgccactttttaaagtgccatatgactttctacgaacaggtaccttgctgtcttgacaaatcctaatgtcacgcctacagccccaacacaagctccagtcttcctcttcggcatgccctggaagcttcttggcctcagctccccttccccgctcagcaccctgttaggatcagtgtgtgtggatgggatagccctgggatggaaaggactagcctctactgatgcaaaaaaacaaaaagcaacacaaacgtttccttcttatagcacatgcacttccttacaatgacatgatttgtattatcctcacatgtgtttactactgctggggccttccttcatcctctgagggctattttgtactttctgcagcaatcagcttaataacaacacttattgcacctgtctctctctgagaacacggtgtgtctcgacacgtaccacgtacgtggaaacacaagagcccaccacttgaatttctaagaccatttcattctgaaacttcttatcaattacctaaatctcaacgaaaaacaatttactgaagccgactcccctccccatctccctctcaacctcaacccacctgcatgcatctcccccagaggaaacactgagggtaggggacaggaggctcaggacgcgccctctgaatcgagtgtttcttcttcacaagtcaccaagagaggacatgagggggaaagtccttttttgcccttctccaaaaaataaccttccacagagacaaactgtccttctatccacttttatcttttaataaatatcaaaaggaaaaagctgcaagggtgcaaagggcctgtgccagaagaaaacacacacagggaaaccgctttttttaatcaattgtagagaatagtcatttttaatctaaattagagaattgtgatacaatggcagtcctcaaaggcgtaacgagttcatctttctttcaccataggggttatagttggcttgtgctactctggaatcattttactgtttgtttttattatcttaagtgctaattaaaaaaaaaataaaattttaaaaaaacctgtagtttcattacctttttgaataatgtcatacaaaaaatgtatttgtttttttgtgctgtgagaattgatgtttgtagattaataatcattttgtttagaattacaaaatagtttttaaatattgtctgagaaaagccaaagttaatgcaacctagtggaaactgtaagaccatttgagtattgtttgttttattgatgcatttggattttgttgtttgatggaatttgagccaaaaaaaaaatacgcaggctttcctatttctacaactgattgtacttatgcattttgtaccagtggaactttttatactggagattaaaaaaaaaatggaaatttttgtggcttgctctggtgggcccctgacaatgactgatttcaagtttgatttcgggttgattgattgattgattgatagaaagaaagttgcttttcttttgagaattaaaaactttggcttgatttcttttttccctttgcttatatctagcattagaattttgtcttaaaataacagcggtaagtttcactttttattctgtattgtgcagttacacaataaggtaattagatttagaagtactcagtcactttaagtggataaatgtattagttaaaactttagggtttgcttttttgctgtttagatcaaagttttttctgattcttctgtcctcattgtgaacataaccgtgtagttgaaacagtcaaacttatttttgtaatgtatgttattgtgtgatgcagttttttgcttctgtctccaatattaaaccattttcctaatacttgtttctctctctgcgtgttgtattgttggtagtcattatatgttggtgatacatctgcacacctcactgtttcacgtatctgtttttttctctatgttgtgtaaaaagatacagtcgattccacttaagtgaatatctgatttggggaagaggaaactgcacagcagccacctttgatttatgtacaaccgcccacttgaactcctgcttccaagatttatacacttttttcctacagttcacctcagtaactgcctttggggttggatttgccaaggtgttttacggtcttttgaccacacaggttaatttccccttctctcccctccctcatgagtctatccacgcagttcttaacatacattccaaactgctgcggggtttcctctccacacccacgaggccaaacccgcatcattacagtccaactcttcttagacactaatcactttctaaaagaagtgagttctccagggaagaaaaatcaacttagccagtgaaaagggttaaacttaagtctattatttgttgccctcaatcaaaagatatgtatagaaaagtcatttaaattatttatttctacaagctaattgaatccaggagcagctttaattattaacactaacggaagagaaaagaagtatttccaagggctcaaatggaagctgtactcagtccggtggaggcagggggaggtaaagtttctcacactcaagtcgtcttcatagtttactgtccttttccaaacaaaagctaataacgccatacgcatccacacactccctcctggatgaacctaagtctcgtccccactgtcaccccaaggccagttatcaaaaactgttccttctctgccctcaaagactgaagccgcaggccctgttctgcctctgctcaggaatctgattgctcttaaagtgctcttacaagattccgtcgatgtttgctccctctgtcttatctctccttccagtattttcagacgcacaagctctgactcaggccacccagcacctggcagccttcctctgcgtgccagtgaaatctctcccagtaggtgctcaggctcttcaccctctcgttgcagcagcccctctggcccgagattgtattttctagtctgctcaagaacagaggggcctggcgaggtggaggaagggaggctccctccccggggctggccgcctcagtgatggtgatgccaccagctccagcctgcacggatggagctcacttcctaccatcacttctgctttcagtctcctcatagccttcggcagtctcctctgaaaacacactgcctacgttagtgggaaaggatggctaagggtgtgatttctttttattagggaggtgggagggggatgttgggaggcatggggggtgattaaattatcatttccaaggtgcaagtgtttatttttcaaatctataagtacatagttccaccattttggcacaagacaaaatactcatgctaagcaaaggaagagaaagacaaagccagtttttgttgcttttctaaagcaacaaataattctccaaagaaggggatgaaaatgctagttcctttaagcacttactgactgtaaagttggtccctgcttaaattcatacccatagttttgagtcggtatgacaccactgcagtgtgagcaaggtgaatccgtgtgccatgcatggaccaccttgggataccgcagcaccatcaacatccgccttgctgatggaagccacacacgctgcccagcccacagcagtcgcacgcagccgatgggctcggactcttagctggcaggctaggacacacagtgaacattaatgtactgtgaatcgttcctgataagtgaataaaacattgtgaccaaacaatcagcttattcacttatcaggaatcgactgttctgctaatttgctgttgttgtttttcatctctgttgtagttcactatttttgctgtgttctgttttctcctctcatgcttgggcaaatcactgggaatattatcttcatgtgaccatgaaacgtttctattgagtgaaaatgatatcttaacaaaatctatgcacttgctatcaggaacacaatactggatgtgtcttatatatattgaactatatagtactcgatttcttaaataaagcttaagaaaggactctgttgtgtgtaaagttaatgtgattatttttcaaagcagtgtttctaaggggtatttttgttcttttaagtcttgagtgatacaggatatttttcattaaaattatatcactggctttatgacttaatattcaataaattgactttggaaacaaaaaaaaaaaaaaaa

SEQ ID NO: 1699 - DNA, 6520 bp, HOMO SAPIENS
ggcatcttttcaggatttcattcctacgtccaactgccgttcacaactgccctttccaactgctccagaactcttggccctggcattccgtgatgtaaattattccacacatggctcaaaagggtgtgaagctgtgtgccaggtgtcggatcactagtttgtcatggatgatgatgatgactcgtgtctccttgatcttattggagacccacaagcattgaactattttctacatggacctagtaataaatctagcaatgatgacttgactaatgcaggatattctgcagccaattcaaattcaattttcgccaactctagtaatgctgatcctaagtcatccctcaaaggtgtaagcaaccagcttggagaagggcccagtgatggactgccactttcaagtagcctccagtttcttgaagatgaactcgagtcttctcctcttcctgatctcactgaggaccaacctttcgacattcttcagaaatccttgcaagaggccaatatcactgaacagacattggcagaagaggcatatttggatgccagtataggttcaagccaacagtttgcacaagctcagcttcatccttcttcatcagcatcctttactcaggcttctaatgtttctaattactcaggtcagacgctgcagcctataggggtgacgcatgtgcctgttggagcatcgtttgcaagcaatacagtgggtgtacaacatggctttatgcaacatgtggggatcagtgttcccagccagcatttgtctaatagcagtcagattagtggttctggtcaaatacagttaattgggtcatttggtaatcatccttccatgatgactattaataacctagatggatctcaaatcatattaaagggcagcgggcagcaagccccatcaaatgtgagtggagggctcctggttcatagacagactcctaatggcaactccttgtttgggaactctagttccagtccagtagcacagcctgttaccgttccatttaacagcacaaattttcaaacatctttacctgtgcataacatcatcatacaaaggggtcttgcaccaaattcaaataaagtcccaattaatatacagccaaagcctatccagatgggtcagcaaaatacatacaatgtgaacaatttgggaattcagcagcaccacgtacaacaagggatctcttttgcttctgcaagctcaccccagggctcagtagttggtccacacatgtctgtgaacattgtaaaccaacagaacacaagaaagccagtcacctcacaggcagtgagcagcactgggggcagtattgttattcattcccccatgggccaacctcacgcaccccaaagtcagttccttatacctacaagcctttctgtcagttccaactcggtacaccacgtccagactataaatgggcaacttcttcaaactcaaccctctcagctcatttctggccaagtggcctcagagcatgtcatgttgaacagaaactcttccaacatgctcaggaccaaccaaccatatactggaccgatgcttaacaaccagaatactgctgtccacttagtgtctgggcagacatttgctgcctctggaagtccagtgatagccaatcatgcctctcctcagcttgtgggtggacagatgcccttgcagcaggcatccccaactgtattacacctgtcacctgggcagagcagcgtttcccaaggaagacctggcttcgccaccatgccatcggtgacaagcatgtcaggacctagtcggttccctgctgtcagctcagccagcactgcccatcctagtcttgggtctgcagttcagtctggttcatcaggatcaaactttacaggagatcagctgacccagccaaacaggactccagtaccagtcagtgtgtctcatcgtcttccagtttcttcttccaagtctaccagcaccttcagtaacacacctggaacaggaacccagcaacaattcttctgccaggctcagaaaaaatgtctgaatcagacttcccccatttctgctcccaagaccacagacggcctgaggcaagcacagatccctgggctcttgagcaccacactgccagggcaggattctggaagcaaagttatatccgcatccttaggaaccgcacaaccacagcaggaaaaagtagttggatcatctcctggccatccagctgtgcaggtggagagtcattcgggaggacaaaaaaggcctgctgcgaaacagctaacgaaaggagctttcattctccagcagttgcagagggaccaagcccacactgtgacaccagacaaaagtcacttccgatcactaagtgatgcggtacagagactgctctcctaccacgtgtgccagggctccatgcccactgaagaagacttgagaaaagtggacaatgaatttgagacagttgccactcagctcctaaaaaggacccaagctatgcttaacaaatacagatgcctgctcctagaagatgccatgcgaatcaatccctctgctgagatggtgatgatcgataggatgttcaaccaggaggaaagagcttccctgtcccgagacaagcgtttggcacttgtagaccctgagggttttcaggctgatttctgttgttccttcaaacttgataaagctgctcatgagacacagtttggccggagtgaccagcatggcagtaaagcaagcagctctctgcaaccgccagccaaggcccaaggcagagaccgagccaaaaccggtgtgacggaacccatgaatcatgaccagtttcatctagtgcctaatcacatcgtggtctctgcagaaggaaacatttctaaaaaaacagaatgccttggcagagcactgaaatttgacaaagtgggcttagtgcagtaccagagcacgtctgaagagaaggccagccggagagagcctctgaaggccagtcagtgctctcccggccctgaggggcaccggaaaacctcatccagatcggatcatggtactgagagcaaactgtcaagcatcctagcagattcgcacttggagatgacgtgtaacaattccttccaggacaaaagtctgaggaattctccaaagaatgaagttttacacacagacatcatgaaagggtcaggcgaaccccagccagatctccagctgacaaagagcttggaaaccacatttaagaacatcttggaactcaaaaaggcgggacggcagccccagagtgaccccacggttagcggctctgttgagttagatttccccaacttttctcctatggcttcacaggaaaactgcctggaaaagttcatcccggaccacagtgaaggtgttgtagaaactgactccattttagaagcagctgtaaatagtatcctagagtgttaatagcagcagtcctccccctaccccgccccgagaccccaccccgagaccccaccccggaccagttacattcgttcctggcaaaagcaaatggaaatggtctcctgtctccagcctgcttgatctttcatcacaggttattctttctaatctcaatcctgttctttgtttaagagcaatacttgtcgtgattacagggagatcctttagtaaaattaatccttggcagaaagcagtctgataggccccactcatttcaagtgttatgaaagtgcttataggcattttgtttatttgttttgttttttaaaaacactgtaactcaatgagaccacagtatacttggcccttggtaaaattttgacaatcataagtcatttgaaaagaacagacttactaaaatcaaacgagacggatagaagctactttttaaagaatatcccactgcatctgcaaatttagttttgggtttttttattattattattttgagtttttttgtgtgtgttttgttgttattgttgaggggaagaccacatggttcttccccctcagccatctttgagcagtaaattgctggctgtgctgccagggacccgcagccctggtggaaaagccagtagcacatacgcagggcattgcagggcttccctattgatggttcaagtgcttttctgatgcttccggagcaaaacctcatgcttttaggcatatctatgttgaatttcacctagggaatgttctgttcttagttacagcagcaaaatttgaaataatttcaccaggctaaataaaggaaaatggaaaccagttaagaggcacagtgtacagaggaggccgggatagagccatgagggttataatattaatatgtatatatgtaaaagcatatatatgttaactattgagaaaaaacaagttttgcattttataattggatatagtcaacatataatgtatgtttttgtttgttgctggattttgtttcatttaacctctctttgcaccctctcccacaacaaataccaagcatcaaaagcactttcatttgaaaattattatgttgtaatttttcagtttaaactttaaggagactctggccttgtttatgcttcttgtctgagaacagtagtgacccctggcagcaattcattaccaaaacacagacaaaccaaaggtaaccagctagcccaccactgaaaggaaagatctgagacatgggattcccatttgagagccaaaggatatgccctgtcatggtttctgtttggcctgtgttcatattagtgagcatggcttactgctttatttatttttatttcttgtcagggagtattctccgttttcctttctcgtatacctgccccaggttatcccatttctgttgttacctttattcttaatgtcattgtaaccatcacttatctcctctcattgggaaagctacatgatagtatttttatgcactcttctcccacacatacacacacgtgcatgtatctgagctgctcggatccagaggtcatttttgttacagtgtgtgcacactcactctccttcttagtgtgcatactctctcatttattctgtttatctccctggctctggaggtgcagccactggtcttcactttaatgtgttgccagaatctgcttctggctgtcgccaacatggggatgacccccattgtcatcatgttgggcatttcttttccagattggcctgtgatggaaaggaaggcttctaattagaaaacacagcaacagaagacctataccccggtgcccctgtgtcccactacacacagaaaaccctgtgagatggccagtcttcataatagcaacgtaccttcaccccagccacatgccccagccaatacaaattggaaaatctggcccattttagggttaccattttttccttatttgtgccaatgtccaagttgcagatttcccctttttcctgtattgtaacatattagataagttggtgtcgccagttggtactttctgtttgggtagtcctagggtaacaccctgccctaaactccatgatttcataggcttttcttcccttggggctcatgctcccctaattcctagcaagatgatccttcctaatcaaattcttctcattgcagaactttatccctggaagccttcatgtgggctgctagtgagttacattaattactgcaaatcagtggaattctcaagagacaagataagcttcatgtacatttgtcacctctctttcttccctatcctgccctgctgtcccaatcctagcttttctatataccatcctaaagggtttttaagccctaacacttgtctagcaaatggagagcctaatttaccaaaatgaaacttgtaaatttttgtgtcattgtatgtaagtttactttttatggaggaaggattctagataatgacaaatgaagattatgacatgtatttcactcctgtgattaggttctacgcacatgggtcataactcgcatgtcgagccccctctagtgaagggtaggagagctcagcctcggatggccaacattcagttgttcaggttcattcgtcaaagttaagttttagaactatttgtactcagtaacaaaaatcattttctttttttttttttttttctgttgtggaaaagcgtgaatttgttattaagcatttgattttctgtgtccttaagtacttcctgaagatgaagcaaaattttaatctggcaattatgaaaaagaaatattttagctctgaaggatttagtagattctgttagattagggaggccttacagactgactttacttaaagaggacgcgtcactcgctgtcagtgtggtgtgggctttatttgcttaaataccttcatttgtatagtacgtctcacttgaaattgctttgtatacattttgtaaaaatatttataaaatgttttgtaaaaaaaaaaaaactataacaaattgcagtttattttgttatgttggataaatactgttaaaagaaaccagtcagtaactatattgttaatccatggttaggaaatgtttagttggagattacaaattgaaacaaccattgcaatacagccaaagatttgggaaaatgaaaaa

SEQ ID NO: 1700 - DNA, 4165 bp, HOMO SAPIENS
ggaggttccgcatgcgcggtggagtgagcgaagcgcacgctgaggaggatcggcggccggtgagggggaagcaagtctggtctctgtgattgaagaagtcggctctgggctccagtgcgggaatcacacacatacctcagaatgccgggtctaagttgtagattttatcaacacaaatttcctgaggtggaagatgtagtgatggtgaatgtcagatccattgctgaaatgggggcttatgtcagcttgctggaatacaacaacattgaaggcatgattcttcttagtgaattatccagaaggcgtatccgttctatcaacaaactcatccgaattggcaggaatgagtgtgtggttgtcattagggtggacaaagaaaaaggatatattgatttgtcaaaaagaagagtttctccagaggaagcaatcaaatgtgaagacaaattcacaaaatccaaaactgtttatagcattcttcgtcatgttgctgaggtgttagaatacaccaaggatgagcagctggaaagcctattccagaggactgcctgggtctttgatgacaagtacaagagacctggatatggtgcctatgatgcatttaagcatgcagtctcagacccatctattttggatagtttagatttgaatgaagatgaacgggaagtactcattaataatattaataggcgcttgaccccacaggctgtcaaaattcgagcagatattgaagtggcttgttatggttatgaaggcattgatgctgtaaaagaagccctaagagcaggtttgaattgttctacagaaaacatgcccattaagattaatctaatagctcctcctcggtatgtaatgactacgacaaccctggagagaacagaaggcctttctgtcctcagtcaagctatggctgttatcaaagagaagattgaggaaaagaggggtgtgttcaatgttcaaatggagcccaaagtggtcacagatacagatgagactgaacttgcgaggcagatggagaggcttgaaagagaaaatgccgaagtggatggagatgatgatgcagaagaaatggaagccaaagctgaagattaactttgtgggaaacagagtccaatttaaggaacacagagcagcgcttcctggctgtaaatcctagacttgaaagttttccagtattgaaaacttcaaagctgaatattttttatttctaagtatttaaatgttctaacagatcagaacatgaaatgccctcctaaatgtcagctgttgtcacacagtagctccaacactttgagcatttttaagggagtggcctcatttcactagagacaaatctttaagaatagttctaaaattgggcttgtgatttccatttctgatgtctccagattggcacccctttctagttcaatgcctcacgagatttgccaggggcatccaaggcaaacaatcccaatctttctatataaaatgtattcaagcaaacatcaaataaatttctgggatatttaactataggcttcttccttcttgtcaccagttaaaagcattttaatactaagaccctaattcttttatctttattttagtcttgatgtggaactgtaggagcaggtgaataaaggatctctataacagatcctttcaaaagaagagttttagagaaaataaatttaactttaaccacagtgaaagttgacccttagcgggacaaagccttaaaatgcattgaaagaattagatcggttctgtgccttttatctatttgagattgatgacaacctgtgtgagagaatttatcacaccacgtccttattggaataataagctacttgccttgagtttataattcagggtggtaaagtatgtttttaaattttaaaaagcagctgcattttttatttagttggaatatcacccaattttttatttttattgctattaaaatatccactagatgccacctagagctccagttctttataacaaaacagggatctgtttgaacacttactgttgtttttttttttttacatgtttccatcatttctgtctttaagaactaattcgtacataataagtttcataggtaacacattatttgaagttacagctacagtagtcaggtgtagaaaatcttgagttgctttggtctgcttgtcttcataaatttattctcttatgatacttgaggtaccagttgtatttaattttattcattatccctagatagctattaagatacttagattagacctaacccaccatagtcaatccaagactagactactcaatattaaagggtctggaaaatagaagagtgtgttgggcaggtagtttgtaccatttatgaaggtttgttcctttgttaaatttagcagcctgtactagcttttgaaatccagaagttttaacttccagtggctggtttctgagagagtgccatgattgctagccagcattccatattgggaatatgtagaggagaacctggatgtacttaagagtggcatataattttcacttctgtctgttgaggcatcaaaaaaacaagtttagaaagctggcaacatgaagaatgcattcaaaatataacaggtgcttctttgttgtacgcagaggaattttttcttttgattttgtttactgaaatttgttatacttcaaaagccataacttgaaaaatactggtggcgtcgatggtgagtgatttttatcccacgtgggccttttgctcagttccatggcaattttgtaaattgaccctagccagagaatagatcagtatttcactgataccacgaggaaaagaacaaacaaaacttaaaagtattcatacaccttgctaacctaaaagacagcagggacaagatacatatgaggacaaggtatacacccagttctgaataacttgaagaacaggcttggcaaagaagtaagtttatccaaatcttgaatttctgccaggcatggtagctcatgcctgtaaccctggcacttaaggggccaaggcaggaggatcacttgaggccagtgagctgtgatcactccagtgcactcgagcctgggtgacagggcaagaccctgtctcaaaaaaaaaaaaaaaaaccaaaaatcttgaatctcccatcaaagccttttcattaaaaatacaatttcatctactccctactgtacctttcactgatgtcaagtggctatcaattcatatagctgaaaattagtgatagtttgggtctcatttatgcataaattaattgaaaatcagtaatggccaggaagaaatatgaatattcaaaccacttttttctttttttttttttttttttggcaaatggtgttatattgcctgggcaggtctcgaaatcctgggctcaagctatcctcctgcctctgcctctgtaagagtgtgagccaccatgccccacccaaaccatttttcatatcagttatagcaaaacaagacaaaccagttcttaataatgttcaaagttggacccatagagacatgctaagcactacatcatgctaagaagaacagttattactcagctgccatacttcagccattctacttttacaccaagaacaaaatggctagagatttttttaaaaatacaaatgccagtaccttgccgagacttgttcactgatttgccccaaccccaaggtaatggtcatctactttgcaacctatggagatcctgatagctcccatacaaagtgaggtacactgttgccaatttggaggcaggaagccatcaaactaaacgtagtttaattcagatgaacacctatcgatattcaaaaggcaaaacaaaaaaactaattccagggacattagaccttggtgaaatgccaaatggaaaatggtgctttaaaaggtagtctcttaccatataaggaataagtaaaacattagcttgtgatttctcattattcaggtcaatgttttagacacgactaacaagggacagttcaaactattaaagagaacaaatttttacttaagcactttgaggtatccactccccttaaatgtaagttatgtattttatctgttgattaaggggaggtccaagcatttgtacttggcaggaatgctggcaatagcttgtgccagattactgtataaacttgaaagtaataaaaatgttctttaaaagta

SEQ ID NO: 1701 - DNA, 1730 bp, HOMO SAPIENS
ggcggtgccggccgaacccagacccgaggttttagaagcagagtcaggcgaagctgggccagaaccgcgacctccgcaaccttgagcggcatccgtggagtgcgcctgcgcagctacgaccgcagcaggaaagcgccgccggccaggcccagctgtggccggacagggactggaagagaggacgcggtcgagtaggtgtgcaccagccctggcaacgagagcgtctaccccgaactctgctggccttgaggtggggaagccggggagggcagttgaggaccccgcggaggcgcgtgactggttgagcgggcaggccagcctccgagccgggtggacacaggttttaaaacatgaatcctacactcatccttgctgccttttgcctgggaattgcctcagctactctaacatttgatcacagtttagaggcacagtggaccaagtggaaggcgatgcacaacagattatacggcatgaatgaagaaggatggaggagagcagtgtgggagaagaacatgaagatgattgaactgcacaatcaggaatacagggaagggaaacacagcttcacaatggccatgaacgcctttggagacatgaccagtgaagaattcaggcaggtgatgaatggctttcaaaaccgtaagcccaggaaggggaaagtgttccaggaacctctgttttatgaggcccccagatctgtggattggagagagaaaggctacgtgactcctgtgaagaatcagggtcagtgtggttcttgttgggcttttagtgctactggtgctcttgaaggacagatgttccggaaaactgggaggcttatctcactgagtgagcagaatctggtagactgctctgggcctcaaggcaatgaaggctgcaatggtggcctaatggattatgctttccagtatgttcaggataatggaggcctggactctgaggaatcctatccatatgaggcaacagaagaatcctgtaagtacaatcccaagtattctgttgctaatgacaccggctttgtggacatccctaagcaggagaaggccctgatgaaggcagttgcaactgtggggcccatttctgttgctattgatgcaggtcatgagtccttcctgttctataaagaaggcatttattttgagccagactgtagcagtgaagacatggatcatggtgtgctggtggttggctacggatttgaaagcacagaatcagataacaataaatattggctggtgaagaacagctggggtgaagaatggggcatgggtggctacgtaaagatggccaaagaccggagaaaccattgtggaattgcctcagcagccagctaccccactgtgtgagctggtggacggtgatgaggaaggacttgactggggatggcgcatgcatgggaggaattcatcttcagtctaccagcccccgctgtgtcggatacacactcgaatcattgaagatccgagtgtgatttgaattctgtgatattttcacactggtaaatgttacctctattttaattactgctataaataggtttatattattgattcacttactgactttgcattttcgtttttaaaaggatgtataaatttttacctgtttaaataaaatttaatttcaaatgtagtggtggggcttctttctatttttgatgcactgaatttttgtgtaataaagaacataattgggctctaagccataaaaaaaaaaaaaaaaaa

SEQ ID NO: 1702 - DNA, 5198 bp, HOMO SAPIENS
tcttcccctccgccgcggcccgccccggcccgcaaacccaaacactccaggcgcccgcccgccgcgcgtgattctcgcctcgccgcagcccagccctgcgcgccttgcccggcggcccccgcccggccgctccgggcccctggccccgcggagcgatgctgctgctggctgccgccttcctcgtggccttcgtgctgctgctgtacatggtgtctccgctcatcagccccaagcccctcgccctgcccggggcgcatgtggtggttacaggaggttccagtggcatcgggaagtgcattgctatcgagtgctataaacaaggagcttttataactctggttgcacgaaatgaggataagctgctgcaggcaaagaaagaaattgaaatgcactctattaatgacaaacaggtggtgctttgcatatcagttgatgtatctcaagactataaccaagtagagaatgtcataaaacaagcacaggagaaactgggtccagtggacatgctggtaaattgtgcaggaatggcagtgtcaggaaaatttgaagatcttgaagttagtacctttgaaaggttaatgagcatcaattacctgggcagcgtgtaccccagccgggccgtgatcaccaccatgaaggagcgccgggtgggcaggatcgtgtttgtgtcctcccaggcaggacagttgggattattcggtttcacagcctactctgcatccaagtttgccataaggggattggcagaagctttgcagatggaggtgaagccatataatgtctacatcacagttgcttacccaccagacacagacacacctggctttgccgaagaaaacagaacaaagcctttggagactcgacttatttcagagaccacatctgtgtgcaaaccagaacaggtggccaaacaaattgttaaagatgccatacaaggaaatttcaacagttcccttggctcagatgggtacatgctctcggccctgacctgtgggatggctccagtaacttctattactgaggggctccagcaggtggtcaccatgggccttttccgcactattgctttgttttaccttggaagttttgacagcatagttcgtcgctgcatgatgcagagagaaaaatctgaaaatgcagacaaaactgcctaatcttcttaccccttggaagaagactgtttccaaataatttgaacagcttgctgctaaatgggacccaatttttggcctatagacacttatgtattgttttcgaatacgtcagattggaccagtgctcttcaggaatgtggctgcaagcaaggggctagaagttcacctcctgacagtattattaatactatgcaaatatggaataggagaccatttgattttctaggctttgtggtagagaggtgaaggtatgagaattaatagcgtgtgaacaaagtaaagaacaggattccagaatgatcattaaatttgtttctatttattcttttttgcccccctagagattaagtccagaaatgtactttctggcacataaagaaatcttgaggactttgtttaaaccttccataaaaaaacaattttcggtttctcgggttctctctctctctctctctgtctctctgtctctctgtctctctgtctctctgtctctctgtctctctctctctctctctttctttctttgtgtattttattcaagatgagttggacccattgccagtgagtctgaatgtcactgacagccctgtgttgtgctcaggactcactctgctgctggtggaaactcatggcttctctctctctttgatcccataaagctacgagggggacgggagagggcagtgcaatgggaagtaaagagatattttccagtaggaaaagcaatgctttcttgtctttagactcaaatgcttagggaacgtttcatttctcattcatggggaaaggcagcctccttaaatgttttctgaagagcggtaaaatctagaagcttaagaatttacagttccttcaataaccatgatgacctgaagttcacctatcccattttagcatctacttgtttttcccatctcttcctttccaattttgcttatactgctgtaatatttttgtaaaaaaaaaaaaaaaggaaaaaaaagaccagctaaaattttcgacttgactttttaacttaactcatgaattaattaaagcaaatgaaaaaattaaaaagtgtgactttttctcggagcatatatgtagcttttaggaaaggctgatgatggtataaagtttgctcattaagaaaaaaagacaaggctgattttgaagagagttgcttttgaaataaaatgatcacctgttctttatgtgactctcccactgaacctgcagacattatttttataccacatgctaaggaagcccactcatctaactctgtagccctggaaaccctcttggcccctgaatgttgtttccaggttataggatctgtgttcattagtggattttgacagcaagtgcctctgatgagttttagccaacattccccgttgcatcctgctcattgttcacactcctctgacttgaggagagctgccttcaccttgatcttgtaacctgtcttccttgcatatacggtagcacattccagatcacttcggtgagaaaagacctctgtttttgaagaggaaactttcttaaattgtaaaataaaacttaaaaaacataaaaactctatacaaaaattgaagacctaaaaattatagcataccttttttttgctcttgagtttttgaagctcttgactttaaatgacttaactttttaaaaaataagatgttttatggctttaacccatgtttttattaagatctgagaatagcatattttaaacactgatagatacagaagaaattattatttaatatataaattgcttggaatgatttcattgcagcttgtaaggatgggttgatgccagaatggtttcataaatctttcagtcttacagagccaaagtttgcagattatatcgagttgcgttgtgcagctgctaaaatggaatcatagctttttataatttgcagaaaacaattgcattaatgtctggatgtttctcagttttattcttttctcataaatgttcctcgaatgttggcaccttctactgctgatctatattagaatctagtccaagaaagtgtctgatttaataacattaaatagttatttcaatatattttttcaaattatcctcatagaacctgttgcctccagtgagatggtaatctactacccgaataaatttaagagcacctgttgagagcccctgttttgcggtagaagacaattgtccctatcccaatttccactgaaatatgagagcagatttgcagagaccatcatgtcagagaagaaatttccttgtcagagatgttaaagggctacagtcccttagcaaagaaacttcgaaatctaagttggtttgtgtttttctaaatttgataccgtaattcatttggcagcaaaatctgacttgaactgatgtgagagtattgtactttatatttatgctacttcattgtgacttaattttccctgaagaaatatccatggatttgattataggttttcccttagatgctgtggaggtgttttgtaatattcaaaatatgcccatattgcctttttaaaaccccaaagattatgaattctgaaacacatccagcccagcgggttttggataaggggttgtaggcatttaagcagcctcacataatgggctgacttcatccaaaacatgaaaatattacaaggcaaattctattttttatattttttggttcaatgcttgaacaacttgtttttctgctgggggaagaaaaaaagaaccaaccctgagtgtgattgttacggaaactaatgactttgtttttaaaggatcacattgattcaacaccttctattggacccagaagtgcgtaaatattacctatggtagtaaacgtttaattatcattcagtttaaatgttggccttctgtatgtagccaagaacagctcattttgtgaatttcagtttttaagtggctgctttttgatttggttgtattattttattataatgtatttgcaagtatattaaaaaattaacattgagccataaaaatccccaaatatgttcaaggacttcataattgaaaaatatatagaaaacaatccttacttctttttacaaaaacaaaatcatgggaattattcttttctatatatttagttataaatctttctctgggccgggcgtggtggctcacgccagtaatcccagcactttgggaggctgagacaggcgaatcacgaggtcaggagttcgagaccagcctggccaacatggtgaaaccccgtctctactgaaaatacaaaaaattagctggacacggtggcaggcgcctgtgtgtggcgggcgccagctactcaggaggctgaggcaggagaatcgcttgaacccaggaggcagaggttgcagtgagccaagattgcgccactgcactccagcctaggtgacagtgcgagactctgtctcaaaaaaaaaaaaaaagaaaaaaaatctttatctggatctgttaaaccatatattattgatcattgcaagtgaaattttgagagattgtttctagtatttaggtgatgaaaacatttggtaatattgctttggttcaaagaattttatgtctttatctttctagaagaaagcaattatatatatatttttgctaaattacataaacatttaattacatcaggttctaatttaaacatgtattactcacttgaggccacttttaaatattcatactctttgacataagatgctttgtatatttctcatttcttttagttcttagtaagtcagctttaaaaagtacctgccaaccagaaccttccatattctggactaaatcttgctcttcggattatacttcagtgcagtaactgtggatttgcaattttgaaggggagatagtagctattatattttacacttgcttgatgtgataactctaaagactttttaactgataaaagcgcacatggctattttgatacacaaagttgtgtttgctactttagaagcttttgtggcagaattgtaatctaattttcataccttgtatttctgaatcacaacaaaaaaataaatggggaacaagactta

SEQ ID NO: 1703 - DNA, 2195 bp, HOMO SAPIENS
gggtggcgccaaggaaggaggagaaaaggcggccgagaaaaggaggagggcaaggggaagaggaagggcgagggaggagcctgaggagactcgcccggctcaaccccgacgtccgcgccccggccgcctgttggccatggcgggcctgggcctgggctccgccgttcccgtgtggctggccgaggacgacctcggctgcatcatctgccaggggctgctggactggcccgccacgctgccctgcggccacagcttctgccgccactgcctggaggccctgtggggcgcccgcgacgcccgccgctgggcctgccccacttgccgccagggcgccgcgcagcagccgcacctgcggaagaacacgctactgcaggacctggccgacaagtaccgccgcgccgcacgcgagatacaggcgggctccgaccctgcccactgcccctgcccgggctccagttccctctccagcgcggccgcgaggccccggcgccgcccggaactgcagcgggtggcagtagagaagagcatcacagaagttgctcaggagctgacagagctggtggaacatcttgtagacattgtcagaagcctgcagaatcagaggcccctatcagaatctggaccagacaacgaactgagcatcctgggcaaggctttttcttctggggtggatctttccatggcttctccaaagctggtgacttccgacacagctgcagggaaaatcagagatattctccatgacctagaagaaattcaggaaaaattacaagaaagcgtcacctggaaagaggctcctgaagcacaaatgcagggagaactcctggaagccccgtcttcctcctcatgcccattgcctgaccagagccaccctgcactcaggagagcttctcggtttgctcagtgggccatccatccaacctttaacttgaagagcctttcctgcagcctggaggtgtccaaggattcccgtacagtgactgtgtctcaccgcccacaaccctatcgctggagctgtgagaggttttctaccagccaggtcttatgttcccaggccctgtcttctggaaagcattactgggaagtggacactaggaattgcagccactgggcagttggggtggcttcctgggagatgagccgcgaccaggtcctgggaaggactatggactcttgttgtgtggaatggaaggggactagccagctctctgcatggcacatggtcaaggaaactgtccttggctcagacagacctggggtggtgggcatctggctgaaccttgaggagggaaagcttgccttctattcagtggacaatcaggagaagcttctgtatgagtgtaccatctctgcctcctctcctttgtaccctgccttctggctgtatggcttacatcctggaaattacctgataataaagcaagtaaaggtgtaaggtttcctaagggattacaacacagtggtttcctggtctctctccctgtcatcaatcagggtagtaacttgacttaagaataccactttttagaaaaattacgatagagatgggatctcactaggttgcccaggctggtgtcgaattcctggtctcaagcagtcctcccacctcagcctcccaaggtgctgggattacaggtgtgagccaccacacctggccaagaataccacttttgaagttaatccttttgtgtgatacaggatgaacttgggatgtttgaaccctggacattccaaataaagaataggcccctgcctggctcctgggagataacctctaagccattagaatatcttgcctgataagagtgtttttgtttacctgtgggccttgggccatgcagtatcagcttgaccttgcaaggtcaagctgaggagactaagttagccatgtgggcagtgaagcatgccaatgtgatcaatccctagtaaaagccctggacacctaggcatgggtgagctactctggttggtaatactctgtgcacacatcattgtagccacacatcattgctgggagaattaagcattatcctgaagactctgccaggagaggataattggaagttctcttggaccttaccttatgtgcctttcttcattgctgattttaatctgtatcctttcactgtaataaactgtaactatgagtgcaaaaaaaaaaaaaaaaaaaaaaaaaaaaaaaaaaaaaaaaaaaa

SEQ ID NO: 1704 - DNA, 2345 bp, HOMO SAPIENS
ctcgagacgcagccgccgtcggccgagcgcccggctagaagcgacaccagacggagcctccggagttcctccgcccccacctcgccgggtcctggagccgcagtcctcccagctgccctcctcgtggccatggagtgtccacacctgagctccagcgtctgcattgctccggactcagccaagttccccaacggctccccgtcgtcctggtgctgcagcgtgtgccggtccaacaaaagcccttgggtctgtttgacttgttcaagtgtccactgtggaaggtatgtgaatggccatgcaaaaaaacattatgaagatgcacaagtacctttaaccaaccataagaaatcagaaaagcaagataaagttcagcacacagtatgtatggattgcagtagctacagtacatactgttatcgctgtgatgattttgtggttaatgacaccaagctgggactggtacagaaagtcagagaacacttacagaacttggaaaactcagctttcacagctgacaggcataagaaaagaaaacttttggaaaactcaacactaaacagcaagttattaaaagtaaatggaagcaccactgccatttgtgccacaggccttcggaatttggggaacacatgtttcatgaatgccatccttcagtcactcagtaacattgagcagttttgctgttatttcaaagaactgcccgccgtggagttaaggaatgggaaaacagcaggaaggcggacataccacaccaggagccaaggggataacaatgtgtctttggtagaagagtttagaaagacactctgtgctttatggcaaggcagccagactgcatttagcccagagtccttattttatgttgtttggaagattatgccaaactttaggggctatcaacagcaggacgcccatgaattcatgcgctaccttttggaccacctacacttggaacttcagggcggtttcaacggtgtttcccgctcagcaattctgcaggagaattctactctgtctgcaagtaacaagtgttgcataaatggagcatctactgttgtcacggctatattcggaggcattctccaaaatgaggttaactgcctcatatgtgggacagaatctagaaagtttgatccattcctagacctttcattagatattccaagtcagttcagaagtaagcgctctaagaatcaagaaaatggaccagtttgttcgttacgagattgtcttcgcagttttaccgacttagaagaacttgatgagacagagttatatatgtgccataaatgcaaaaagaaacaaaagtccacaaaaaagttttggattcaaaaactacccaaggtgctatgcttacatttgaaaagatttcattggacagcatatttaagaaataaagttgatacatacgtagaatttccactgagaggcctagacatgaaatgctacttactagagcctgagaacagtggcccggagagctgcctgtatgacctcgccgctgtggtggtgcaccatggttccggggttggttctggacattacacagcatacgcaactcacgaaggccgctggttccacttcaatgacagtactgtaacactgactgacgaggagactgtggtgaaggcgaaggcctacatccttttctacgtggaacaccaggccaaagctggatcggataaactttaatacctcctccaaatcatcattcaccaaccataccagagaaacatttccagttttccacaaatacttgatacaagatttaatttcattatgcacttttcaatttcctattttggatttagttttgtcaatggtagtgacttactgaacatgggcaccaactaattttgttgttgttctaccagaaaacctcagcagatgttttgatttgctgctttagttgtaataattcaatttttataggtagttgtaagaacttagtcttatttgacttttttattttatgttaatgttttcagttctcactttgaggcacatttacatcaatgcttttgttcctctcacatgctgaaagcaagatgtgttccttattgtgaagagcgacacaactgcctgctgcctttccacagctataatggacatcaggttgactctaaatcaaggatcatgtgtgcacaatacttgtggcccacaaaatttcacaatgactgctgaggaatcattctttttgcctgtaaaatataacaaagggcatcattaagtagaccaggtaattactgcttgtctctcaaggctgctgtctttatcagcactaactaaataaatttgttggttcagttgtacttgtcctgcaaatacaaaaaaaaaaaaaaaaa

SEQ ID NO: 1705 - DNA, 3319 bp, HOMO SAPIENS
agcggagctgcagccggagaaagaggaagagggagagagagcgcgccagggcgagggcaccgccgccggtcgggcgcgctgggcctgcccggaatcccgccgcctgcgccccgcgccccgcgccctgcgggccatgggagccggccgccggcagggacgacgcctgtgagacccgcgagcggcctcggggaccatggggagcgatcgggcccgcaagggcggagggggcccgaaggacttcggcgcgggactcaagtacaactcccggcacgagaaagtgaatggcttggaggaaggcgtggagttcctgccagtcaacaacgtcaagaaggtggaaaagcatggcccggggcgctgggtggtgctggcagccgtgctgatcggcctcctcttggtcttgctggggatcggcttcctggtgtggcatttgcagtaccgggacgtgcgtgtccagaaggtcttcaatggctacatgaggatcacaaatgagaattttgtggatgcctacgagaactccaactccactgagtttgtaagcctggccagcaaggtgaaggacgcgctgaagctgctgtacagcggagtcccattcctgggcccctaccacaaggagtcggctgtgacggccttcagcgagggcagcgtcatcgcctactactggtctgagttcagcatcccgcagcacctggtggaggaggccgagcgcgtcatggccgaggagcgcgtagtcatgctgcccccgcgggcgcgctccctgaagtcctttgtggtcacctcagtggtggctttccccacggactccaaaacagtacagaggacccaggacaacagctgcagctttggcctgcacgcccgcggtgtggagctgatgcgcttcaccacgcccggcttccctgacagcccctaccccgctcatgcccgctgccagtgggccctgcggggggacgccgactcagtgctgagcctcaccttccgcagctttgaccttgcgtcctgcgacgagcgcggcagcgacctggtgacggtgtacaacaccctgagccccatggagccccacgccctggtgcagttgtgtggcacctaccctccctcctacaacctgaccttccactcctcccagaacgtcctgctcatcacactgataaccaacactgagcggcggcatcccggctttgaggccaccttcttccagctgcctaggatgagcagctgtggaggccgcttacgtaaagcccaggggacattcaacagcccctactacccaggccactacccacccaacattgactgcacatggaacattgaggtgcccaacaaccagcatgtgaaggtgcgcttcaaattcttctacctgctggagcccggcgtgcctgcgggcacctgccccaaggactacgtggagatcaacggggagaaatactgcggagagaggtcccagttcgtcgtcaccagcaacagcaacaagatcacagttcgcttccactcagatcagtcctacaccgacaccggcttcttagctgaatacctctcctacgactccagtgacccatgcccggggcagttcacgtgccgcacggggcggtgtatccggaaggagctgcgctgtgatggctgggccgactgcaccgaccacagcgatgagctcaactgcagttgcgacgccggccaccagttcacgtgcaagaacaagttctgcaagcccctcttctgggtctgcgacagtgtgaacgactgcggagacaacagcgacgagcaggggtgcagttgtccggcccagaccttcaggtgttccaatgggaagtgcctctcgaaaagccagcagtgcaatgggaaggacgactgtggggacgggtccgacgaggcctcctgccccaaggtgaacgtcgtcacttgtaccaaacacacctaccgctgcctcaatgggctctgcttgagcaagggcaaccctgagtgtgacgggaaggaggactgtagcgacggctcagatgagaaggactgcgactgtgggctgcggtcattcacgagacaggctcgtgttgttgggggcacggatgcggatgagggcgagtggccctggcaggtaagcctgcatgctctgggccagggccacatctgcggtgcttccctcatctctcccaactggctggtctctgccgcacactgctacatcgatgacagaggattcaggtactcagaccccacgcagtggacggccttcctgggcttgcacgaccagagccagcgcagcgcccctggggtgcaggagcgcaggctcaagcgcatcatctcccaccccttcttcaatgacttcaccttcgactatgacatcgcgctgctggagctggagaaaccggcagagtacagctccatggtgcggcccatctgcctgccggacgcctcccatgtcttccctgccggcaaggccatctgggtcacgggctggggacacacccagtatggaggcactggcgcgctgatcctgcaaaagggtgagatccgcgtcatcaaccagaccacctgcgagaacctcctgccgcagcagatcacgccgcgcatgatgtgcgtgggcttcctcagcggcggcgtggactcctgccagggtgattccgggggacccctgtccagcgtggaggcggatgggcggatcttccaggccggtgtggtgagctggggagacggctgcgctcagaggaacaagccaggcgtgtacacaaggctccctctgtttcgggactggatcaaagagaacactggggtataggggccggggccacccaaatgtgtacacctgcggggccacccatcgtccaccccagtgtgcacgcctgcaggctggagactggaccgctgactgcaccagcgcccccagaacatacactgtgaactcaatctccagggctccaaatctgcctagaaaacctctcgcttcctcagcctccaaagtggagctgggaggtagaaggggaggacactggtggttctactgacccaactgggggcaaaggtttgaagacacagcctcccccgccagccccaagctgggccgaggcgcgtttgtgcatatctgcctcccctgtctctaaggagcagcgggaacggagcttcggggcctcctcagtgaaggtggtggggctgccggatctgggctgtggggcccttgggccacgctcttgaggaagcccaggctcggaggaccctggaaaacagacgggtctgagactgaaattgttttaccagctcccagggtggacttcagtgtgtgtatttgtgtaaatgagtaaaacattttatttctttttaaaaaaaaaaaaaaaaaaaa

SEQ ID NO: 1706 - DNA, 216 bp, HOMO SAPIENS
aaaatatctgcaaagagccacaataagccttgaacaacatacagtcagtaaaacatcaaggtttaaattgttgctttaacttccttttggctggaagctccatattctggtaattcaccaaaatggccaacacaaggaaaacaggagaggcacccagtgtatgttttctaggccttttagaaaacatggagttggccacatgcatgggagtctata

SEQ ID NO: 1707 - DNA, 4315 bp, HOMO SAPIENS
ccgaacgcccacgccagcgaccctgactctatggccccgggggagcgcgccggagccgccgcgccgcccacccccagccggaaccctagcgtcccggggagcaagcggggagccccgggcgtccccggccccggcccagggccctgcttgtggcccccgctcccgccacggggcatgggaggcaggtagcccagcctgcgccaggacacccgtggcgggcggaacccgccaaggaccgcgaagtccagagaaaggaagctgaggagctgcccgcccgcccccggctgcagccccagcagggccctcccccggtggcgcgcacccgcgcgcgcacactcgcacaccgcacctcagcgcctgcccggcctcgcccccacccgcgagcgccgaacctcctggggccggatgccatgggtaacaacttctccagtatcccctcgctgccccgaggaaacccgagccgcgcgccgcggggccacccccagaacctcaaagactctatcgggggccccttccccgtcacttctcaccgatgccaccacaagcagaagcactgtccggcagtgctgcccagcggggggctcccagccacgccgctgctcttccacccgcacaccaagggctcccagatcctcatggacctcagccacaaggctgtcaagaggcaggccagcttctgcaacgccatcaccttcagcaaccgcccggtcctcatctacgagcaagtcaggctgaagatcaccaagaagcagtgctgctggagcggggccctgcggctgggcttcaccagcaaggacccgtcccgcatccaccctgactcgctgcccaagtacgcctgccccgacctggtgtcccagagtggcttctgggccaaggcgctgcctgaggagtttgccaatgagggcaacatcatcgcattctgggtggacaagaagggccgtgtcttccaccgcatcaacgactcggctgttatgctgttcttcagcggggtccgcacggccgacccgctctgggccctggtggacgtctacggcctcacgcggggcgtccagctgcttgatagcgagctggtgctcccggactgtctgcggccgcgctccttcaccgccctgcggcggccgtcgctgcggcgcgaggcggacgacgcgcgcctctcggtgagcctatgcgacctcaacgtgccgggcgcggacggcgacgaggccgcgccggccgccggctgccccatcccgcagaactcactcaactcgcagcacagccgcgcgctgccggcgcagctcgacggcgacctgcgtttccacgccctgcgcgccggcgcgcacgtccgcatcctcgacgagcagacggtggcgcgcgtggagcacgggcgcgacgagcgcgcgctcgtcttcaccagccggcccgtgcgcgtggccgagaccatcttcgtcaaggtcacgcgctcgggtggcgcgcggcccggcgcgctgtcgttcggcgtcaccacgtgcgaccccggcacgctgcggccggccgacctgcctttcagccctgaggccctggtggaccgcaaggaattctgggccgtgtgccgcgtgcccgggcccctgcacagcggcgacatcctgggcctggtggtcaacgccgacggcgagctgcacctcagccacaatggcgcggccgccggcatgcagctgtgcgtggacgcctcgcagccgctttggatgctcttcggcctgcacgggaccatcacgcagatccgcatcctcggctccactatcctggccgagcggggtatcccatcactcccctgctcccctgcctccacgccaacctcgcccagtgccctgggcagccgcctgtctgaccccttgctcagcacgtgcagctctggccctctgggtagctctgctggtgggacagcccccaattcgccagtgagcctgcccgagtcgccagtgaccccaggtctgggccagtggagcgatgagtgcaccatttgctatgaacacgcggtggacacggtcatctacacatgtggccacatgtgcctctgctacgcctgtggcctgcgcctcaagaaggctctgcacgcctgctgccccatctgccgccgccccatcaaggacatcatcaagacctaccgcagctcctagcccgttgcggtggcccatcccgcatacccatcttctcgggcttcagcccagtcccagctgaggaacaagccagtggggccccttctcttcctcattttggaaacttttcctcctctattaaacatgggaaactgaagcccttgaaggtttggggagaggggggtatcaggcagggagggggcagaggcaaatcaccgggcagagggaggggaggagaggaggccgcactctccctgtctctcccgtctctgcacccagctcctctctgcatgctgagggctaaattgggatctcagcctgccctaatctttccccatctgaggcaggtttctaggaggtgtctgtagtccatgtggcacctttgtgagaattagaaaacatgtaccttcctctgggcagctgcagccctgagccaggacatgtggcctggctagtgcagcatggagtggattttaggctcatttgccctctcagccaactgcccttgagcagtgtacagcctgctcaacaaccgccctgggcaggccgctcctgagctgctgtctccctctctgacctatgcctaccttctctttcttcgttccctgcccactgggcatggcagctgggggtgagaggctggtggttgcctcccgtcctgggcaggctgcagcctcatgccatgtctctctcccactacctgatgggcacatggacaggctgcagagggctccaggttctgggcccctggctgagaaggggaggatcctgtcctggctgtagccttcctgccccaatcatctcgctggatgccattgcccaggggtagcccttcggtatgggctggggagaagggttggtcttctgccagggtccctaagaacaggtttgcagctaccctctctgaccttttccccatatcttgtgctgtccagggcctaggctgatagtcagagcctgtggcacacctgggatgggccagggccctgggtggggaggtgtgggttccctgggccaagaccagcctttttcctcagtttaattaatttatttatttggtttgtggttttgggttttttttgtttgtttgtttgtaggtgagttcccatcctctgggcccctagaaatgctgcctttgtgtgtggggtacctgggaaagggtgtggctgaggcagtcataatgcagtatcttcccctgactccagccacaaagctcatacccagccctaccaatcatgaactggaactccataaggaggggccaaattgggaggccttttggcaaacagtgtctattttacagagaggcaaaccaagcctccttagtgccctggggctgatggtcacccagagccatagagcacccttcctcctgggccagagctgggttatcatggttggcttaggtacctcaggtggcccaggaggtcccccctccataaggacgtcaaacttccaggagggccagtgttcctagtgtgggccaggaacaggacagggagaccttgtgatggcggggcagggagcctgttcgtagggaagatgaggaggcaagggctgcctctcacacctccaggttctctaagttctggggagggagcgccccacctgctgaggtcggtcctctcagccctgcctgccctggcctgggctctcccagcctcccagccctctgccccctcagatggctttttgtttttgtttttttttgcatccatcagagactgcacctctgtgtggcaggcagggcatgggttttagtcctggccactgaccagctgtgtggccctggccgagtcgtagccccctggagcccagcttccatttctataaaatggttgtttcgggagagaggggcaggctttctgtgtgactcgggagttcttccgtgagggctgccagggggtggtgtgccaggacctcaggctgggcctttgtgctggccttgcagtgggtgtgtggggaagtcactgtcccactatgggtctccactacccagtcactgaccctgggagaccccttctgtgtgggagggagcgggggctggctagcgggccccccagccagggatcccagaggctgagggttggggagaggaagccatcatctcattacctctgtcagtgcaggggtggctgctgcttcccttgtgcacttgggtcgctgtgattgtgaataaaagtgatttcgtaccagcctga

SEQ ID NO: 1708 - DNA, 185 bp, HOMO SAPIENS
aagacagtaacaaagatggcaaagaacaaagatgaaaaagtatgctgtattacctgaaagtgcttttatggatatcttagcttatccttcgtccatttaaatattgttagttttagccgggaacatgcctgtagtcccagcaccttgggaggctgaggcgggcagaccacttgagaccaggagtt

SEQ ID NO: 1709 - DNA, 379 bp, HOMO SAPIENS
  misc_feature (91)..(91): n is a, c, g, or t
  misc_feature (293)..(293): n is a, c, g, or t
gtgagaggtcactatcctcctctccactgctttcttgttcctgaatccgatactttggctccaagccttcagctgcagctaatttcctggnctaagatgtctggcgccatggcttcagtggcctcggtgtcactacaggcatcttcatcatcccccatcatactatggtaaggagtgcttggttcatctattttcattaaaccatagtctttgtctgctggatgatacgtcgccaagatgttcatttcatcccacttctgggattttttgctcagctcctcgtcgacattccngcggggctgttcggccgacgccaccatagaggaagtcgtagaggtcttgttcttcaagatccccttgatgggccggtgcgaggccg

SEQ ID NO: 1710 - DNA, 468 bp, HOMO SAPIENS
  misc_feature (26)..(27): n is a, c, g, or t
  misc_feature (31)..(31): n is a, c, g, or t
  misc_feature (53)..(54): n is a, c, g, or t
  misc_feature (142)..(142): n is a, c, g, or t
agcctaaccacacagcactgggtttnncttnaaggaagatggctgtgagggcnnaatagagaaggaaagtccaggggaggaaggggaagtcagtgggaataaagctgccaggcactgaagcttttgaggaagcacctttgcnttttttatgtccccagcccctcttgtaaagaaaagggcaagctgatgccttaggaaattgaaaattcaactgttcttagcatgtgaaggtaacctaatgcagaaagttagtaattaaggcaaagaaagaaaacccccaggtatgcaaaggattttgccgcctttcttcctctgtcttgtttgacatttgtgttgcctaacatatacaaacatagggagagtaatgaaatccatccccactttacctataataactatatggccgatcttgtttgtgtgtatcattttccacttttttctctcctgctgtattattactaaattcca

SEQ ID NO: 1711 - DNA, 3924 bp, HOMO SAPIENS
agtgatgaactcatgctctgttctgttttctcaaagctgaagtcggctaggtttgcaaagctgtgggctgagcactcaggcaatcacactctcagaaactgcggcggctctggactgcagcctcccaaggctccatgccagacaaagcatgcgtgtcacacttgctacaatagcctggatggtttcttttgtctccaattattcacacacagcaaatattttgccagatatcgaaaatgaagatttcatcaaagactgcgttcgaatccataacaagttccgatcagaggtgaaaccaacagccagtgatatgctatacatgacttgggacccagcactagcccaaattgcaaaagcatgggccagcaattgccagttttcacataatacacggctgaagccaccccacaagctgcacccaaacttcacttcactgggagagaacatctggactgggtctgtgcccattttttctgtgtcttccgccatcacaaactggtatgacgaaatccaggactatgacttcaagactcggatatgcaaaaaagtctgtggccactacactcaggttgtttgggcagatagttacaaagttggctgcgcagttcaattttgccctaaagtttctggctttgacgctctttccaatggagcacattttatatgcaactacggaccaggagggaattacccaacttggccatataagagaggagccacctgcagtgcctgccccaataatgacaagtgtttggacaatctctgtgttaaccgacagcgagaccaagtcaaacgttactactctgttgtatatccaggctggcccatatatccacgtaacagatacacttctctctttctcattgttaattcagtaattctaatactgtctgttataattaccattttggtacagcacaagtaccctaatttagttcttttggactaatacaattcaggaaagaaaaaacccaaaaaccaacctcattcacatatggctttttttttaaccaataacaattaggtgtacttctattttaaaacatttcagaaaaaaatatatgttatagcaatactcttactcaaaagaagaaatttcctaactctatcagataaactcatctttagtataaataagcattatttgcaggttgccacaggtggacttttagtaagtaacctaacccatgtttcagcttctaaatctgcaaaatgagcaaggtacagtagcacatttttaggtgattcttagtaactccagtagccttcattagttaaaaacattattattttttgcatgctgcttcgactctaaatatctggttttccctgtctttttggtttactacttccccagattcagaacagaggagtaactaggggatctgattttagaggccttaattttctgttcatggactgttaaaagtaaaaccaaactttcaaaagggataaacctaaatatttacttgttatcattagagagggaacatcaaatgctgggacatcattactaaccaatagcatcagacactggatttaatggataatcacaatggtcgtaatgtatacaaagacttatataccactttctcgtataaatttttcaaaaaatacaataataatataatttataaagaacactcttctatgaacaaccaccaccaccaaaaaaaaaaaaagccctcagaaaatttctcacaaataaggcaactaatgcctgatatctcaaaatcctttacaaaaggagatagttctagtcaaggagttttgggtatgttacttttttttcttctttttcttttcatctgcctccatcttaagtgcaatttcttcagctgtaagagctcccagtttcttattctttgctttcttaaccttttccttgatgctggccacatcaattttagtttcagtagaagctagacaaattaaaagcacaacacatgtaatactttagattttaccaagtaaaacaaagaatatatgtttaacaaagaatatatgtttaaggcagttaacttcagagtattcttataattgaataattgaaaggtgatcacagtataaaatataaaaacacttgcctaaagcagttagaaatttcttcagattaagataaaacaaatcataaaatactttatatattagtacaagtatacataaaaatggcataaatggcataattgaaccaattactggattcaactatattaagactatttccttaaatcctacttcagactaaattattttacctacattcttttccatattttggaacttctgagtcattattttccatcttgcacattaaaataatttaaaattacatgtatcccttctcaataagtttaatcagctaaccctaagctagaggtcaaaatctacttcctctaatatcaaaacgaaaatttaaagttttccaaatattaattcaatattaattgaatattcaatgaattaattcatttaatgttagattaattcattgaatattaattcaatgaatgactaattaatagtattttaacaagattttggtatatttaacaacattttggtaataaagacaataatttgagagtgtgtggaagtccccctaatagaagccaactatctaatcaatgccaaaagtgtgaacaaaatagagaaaggaagcagtgaaaaagaatgcaactttttcttaccattcaaagtacaggatcacagcataaaagaatcataagataaaacatcaaactacccagcaacctgagaagcacagagtgttaaagcctccaccgtgtggagaaactaaattagggtaactagctattgagtatattgagtaccttcaaagcactcaactgacaggttttacagactggaaattataatacttatgacatttctaccttttatataaccaataatctaccatagaatgtagtatttttaaagctattaacaagcaatatattaaaataataatgtattatatctgtttctgacccagtctatgtacaatattgctggtgagccctctcccttcagtgtgtcactgttcactttggagggttactttaggaagaggataagtgttaccacaggggaaaaaaatgcagaagaggatgcatcagaagaaatggcatgacaatgttttctcttagtgtcttttaaatactaggttagtgcgaaagtgatttctgccatttaaaaaccacaatcactttcgcactaatagctcctgaataagacctgtcagcatcctttagtctaaggtgatgagaaatccatgttaccgatatagaagccaaactctaagccaagatcacataaagagaagaaaaagtacaacttctgataattcctctttgagaggcatgacagcagagctcagggatcttcttgcatttctacagaagatgcactggctgccctgggtttgtatctttcacaacaaagagtcttttccaagcacagaccagaggtcaggagaggactgtcaatccagtttgcactgaaataggcattagctgcctctaaattataaattatctcagccatcccttgtccttaggattagtaattaatgaaatgctaagagaactgatgaaaagatacaactgtttcttaaaaagattcagacaaatttattatgggtttacttttcctaattaataaagacttttacatcatagaaagcattaccttccttaggtttcacaattggtttttccttaggtggaataaatgctttgtttctttcctcttgtctcttactgatggcttctgcttgtttagcctacattaataaataaaaaatatatcagttaaatgtatttatagttaaataattcaagtatctatgaactttgctattcatgtgagccagacataaagtgccgtacctttattgcttccaaaaaaaaaaaaaaaaaa

SEQ ID NO: 1712 - DNA, 9752 bp, HOMO SAPIENS
tgtttccgtgcgcggccgctgcgcactcggcactgggcggcgctggctggctccctggctgcggctcctcagtcggcggcggctgctgctgcctgtggcccgggcggctgggagaagcggagtgttggtgagtgacgcggcggaggtgtagtttgacgcggtgtgttacgtgggggagagaataaaactccagcgagatccgggccgtgaacgaaagcagtgacggaggagcttgtaccaccggtaactaaatgaccatggaatctggagccgagaaccagcagagtggagatgcagctgtaacagaagctgaaaaccaacaaatgacagttcaagcccagccacagattgccacattagcccaggtatctatgccagcagctcatgcaacatcatctgctcccaccgtaactctagtacagctgcccaatgggcagacagttcaagtccatggagtcattcaggcggcccagccatcagttattcagtctccacaagtccaaacagttcagatttcaactattgcagaaagtgaagattcacaggagtcagtggatagtgtaactgattcccaaaagcgaagggaaattctttcaaggaggccttcctacaggaaaattttgaatgacttatcttctgatgcaccaggagtgccaaggattgaagaagagaagtctgaagaggagacttcagcacctgccatcaccactgtaacggtgccaactccaatttaccaaactagcagtggacagtatattgccattacccagggaggagcaatacagctggctaacaatggtaccgatggggtacagggcctgcaaacattaaccatgaccaatgcagcagccactcagccgggtactaccattctacagtatgcacagaccactgatggacagcagatcttagtgcccagcaaccaagttgttgttcaagctgcctctggagacgtacaaacataccagattcgcacagcacccactagcactattgcccctggagttgttatggcatcctccccagcacttcctacacagcctgctgaagaagcagcacgaaagagagaggtccgtctaatgaagaacagggaagcagctcgagagtgtcgtagaaagaagaaagaatatgtgaaatgtttagaaaacagagtggcagtgcttgaaaatcaaaacaagacattgattgaggagctaaaagcacttaaggacctttactgccacaaatcagattaatttgggatttaaattttcacctgttaaggtggaaaatggactggcttggccacaacctgaaagacaaaataaacattttattttctaaacatttctttttttctatgcgcaaaactgcctgaaagcaactacagaatttcattcatttgtgcttttgcattaaactgtgaatgttccaacacctgcctccacttctcccctcaagaaattttcaacgccaggaatcatgaagagacttctgcttttcaacccccaccctcctcaagaagtaataatttgtttacttgtaaattgatgggagaaatgaggaaaagaaaatctttttaaaaatgatttcaaggtttgtgctgagctccttgattgccttagggacagaattaccccagcctcttgagctgaagtaatgtgtgggccgcatgcataaagtaagtaaggtgcaatgaagaagtgttgattgccaaattgacatgttgtcacattctcattgtgaattatgtaaagttgttaagagacataccctctaaaaaagaactttagcatggtattgaaggaattagaaatgaatttggagtgctttttatgtatgttgtcttcttcaatactgaaaatttgtccttggttcttaaaagcattctgtactaatacagctcttccatagggcagttgttgcttcttaattcagttctgtatgtgttcaacatttttgaatacattaaaagaagtaaccaactgaacgacaaagcatggtatttgaattttaaattaaagcaaagtaaataaaagtacaaagcatattttagttagtactaaattcttagtaaaatgctgatcagtaaaccaatcccttgagttatataacaagatttttaaataaatgttattgtcctcaccttcaaaaatatttatattgtcactcatttacgtaaaaagatatttctaatttactgttgcccattgcacttacataccaccaccaagaaagccttcaagatgtcaaataaagcaaagtgatatatatttgtttatgaaatgttacatgtagaaaaatactgattttaaatattttccatattaacaatttaacagagaatctctagtgaattttttaaatgaaagaagttgtaaggatataaaaagtacagtgttagatgtgcacaaggaaagttattttcagacatatttgaatgactgctgtactgcaatatttggattgtcattcttacaaaacatttttttgttctcttgtaaaaagagtagttattagttctgctttagctttccaatatgctgtatagcctttgtcattttataattttaattcctgattaaaacagtctgtatttgtgtatatcatacattgttttcaataccacttttaattgttactcattttattcactaagctcgataaatctaacagttactcttaaaaaaaaaaaaaaaagactaaggtggattttaaaaattggaaactgacataatgttaggttataatttctcatttggagccgggcgcagtggctcacgcctgtaatcccagcactttgggaggccaaggtgggtggatcacctgtggtcaagagttcaagaccagcctggccatcatggtgaaaccccatctctactaaaaatacaaaaattagccaggcgtggtggctggcgcctgtaatcccagctactcaggaggttgaggcagcagaattgcttgaacccaggaggcagagggttgcagtgagccgagatagcaccattgcactccagcctgggcgactccatctcaaaaaataaaaataaaaaaaatgtctcatttgggaaggaaattccttttaaaaaagagttgagacacttagaaaactaatgttttatatttagtcaagagttatttaagaaagtcaagcttgtttaacaacaaaatatgaagatttaagtgttaattgctggatccattttaaaataagattttaattaacatttgtaaatggtatattttcgtttgtaacaaaccattgtcttttttcaaggatgaacagagtttatgaaggagcatcattctaagaattaagtgatgtagtctttatgtttggacagttcaccagattctcaagaaggctttcaaacaactataaagtttgatgtttgtcctgctgagctaatggggaaagttatagcataaaaattgtgtaaccgcatagatatgtcatttttaaaaactggtttaacagaaatcaagcaaagtcacaaatatgttcacaagttggaattatttattgagtcaaaatgtcgaatcgaacattttgaatgaagtaagtgttataaatgaaaaattgcctgatgtttagcagtttgtattctctaaagctttttttcaaaagttcaggctttctacttactgggaagttggtggtcctcttagtccctgataaatcaaggcaatcacattcatgtgagctggatgaatttataagttataaagaccttatccttcataccttgaggatgattgcactggttttgaagtcagttgcttaatgatgaggtgagaaatgtatcctgttgctaaatctgtcttagacccttggtgaaacttgaagatttcagtttataaagataaaatcaagcatcttttgtgcagttttctttttttaatgcaagaatggtggggaggtttgtttgtaagcatgaaactttgagaatctttattaagaaaatgacataatttttaaaaaccttgtagccaagaacatatgtggccacattaccagtaataaatgtttttctctttatattggccaaaagggaataaaaatgtcatcataggaatttgtacatatgctactgatttgcctagaaaatagcaagtttgatattgctcactttgcaaatatagggccatgtggcacttttatctataggacagattaataaaaatgaagtggggaggggtttatttttgatatattactcttatgagttttcaagctttgataatgtttaactgaaaagtggcttagaaagggctagatccaatgtgttcattattaaataattgctatcagatacaattttaagttcattctttttcaaactcaagtaccatattggcaaccataatattgtcataggtgctctcttcatttagatattcttggggggggtggcatttgtataatatatgtgtacatatatatatatatatatatatatacatacagtatataatctaaagctctgagagctcttaagtcaggaatgctgagtattatagtatattgaggtcagatgaaattttacatttttgtgtgttctgttgcattccttctggtagtttctatgactgcattactccagcactcatgattgattttatcttctaattttcttccaagtattttattttttattagttttctttggcttgatacttttaaatatgttactagtcacttgaaagcctctcccccaaaagtatttggtttgtatgctttgtctgtggcagctataacagtggtaagaacattttgaagatagctttttaaaggaaccactgattttttcaaaaatcatcctgggggaggaattttggcatttcatttgagcagggattttgtcagaaaatgtgttttgatggtaggtcagcagcagtgctagtctctgaaagcacaataccagtcaggcagcctatcccatcagatgtcatctggctgaagtttatctctgtctctcaggataaatccctgtaggacaaatccctactatcatttctaccttttggggtgacatgtggaatcatacaaaggcttaggaagaaatacgtttgtttaaaccaggatgctttacttacttgaagtgacttcaatctagatttcttttaatatttaacaaatttttaattctatgatcagccacagtcagctattaccataaattggtctctgtttattttgaagatcacggctgcttcattttgcaggattaagtagggctaatgtatcttaaagttaagatcttgaattaaagtgagttttagaaatagtgttacataccttttcagttgttttcaagaggctttatttttgttgcctttgtagccctgaaagctgttggtatattttttccctcatggacccaatagaaaagttgtatatttatttggattatatttacattctgtcctttgtaaatgtttggtgtaacttgcacttttttaaatgacccagtttgggtattagcaacttaagaaattccctcatcaagtaattctcaactttttagtctttctcctctcttcaaatcatgtgactttttaaatggaagtttttcattgattaaaatattttagcacctaaaagctagccttaaaaacagctgtaaaagaaaaacatcaggaaattagatatgactagcccagttaattaaaagacgggctcaaaccttgttttattctttttcatcttggatgaagattgaagggaaaataactcaagtgcataatatttattttcaatttttaatgagactttatcctcatcacaacattaatactgtacatagtatgccaaaatatccattaatttgtctagaatagtacaagactttttaaagcaattgtcctcacagagaccacatgtaatatactgaaatatgttcatttttaatggctttgttaacatcaaagaaatgctgcctaaatttgatttcagatgaggaaggagaaagtaaagtgtgcatagtaaggctgtaggtgaagagttgtgagataaatagttcactcagttgtacaaagcacaactagaactttttgttgggaggcttacatacatcttgaatattcttaatgtaataatgttgactattaagttggctacacagtcactgtatgtactaggaactggtttccttgacattctagaatcaatggctaggagaggcattaatctttgaggggctgaacatatcatgaagctgagtcagtatggaaaattttcaaataaacagggtgctgaagttccatctgtctcatctgcttatgataagttcttattgattagtgaatgtagcttaagcctttgtatgtgtcctcagggggcagaccgactttaagagggaccagataacgtttgaatggagggattatatttcaggtgttttagcttgaaatttattttttaaaaaaagaaaaatttaaaaaatatataaataaaatagaacaaagccggtgatgcaagttgatattataaacaggcagttttagcacagaaagaaaatactgacctgtctgcattctggtacggtgggtgcaggtcccagctgggtatgacatgatacatttttaattattctcaccagcaagtaaaaggaaaatgaacaatcttttggaattgtctttgaaaaggatcaaagagtaggaaattcacatttgacctaacattacttgcctatagaagtatggcatttccaagcttttgtctgaggagcatctcagagaagtgagagtaaatctgagttagcttaaaaattggtagggaggaagaaaatctctgcaaataatgattttatgtttgttggccaagtgaaatgatctatcattgtgtttgggaggttttattttcttatgtttttaaaattggtaaatgctttatagatgtatttttatccaagtgccactccaatttgtgtatgtaataaaattatttatattaaaagtgggaaataattgtcaacattttttttgagtatagatttattaggggtggcaaagaagagtgctagttagcagttttccatgtaaagttgtccttgactgatttgtccacatgtcagttgtaactcccccactccctgcaaaaggaattatttctaacccagatgtatcacttgaaactttttagaagcaaaataatcagggaagttcctagaaaggtgtttggctttttggtttttgagggttggggtaaagaagacttcccccacaactgtcagcacaaaacagggtattgatttttaactctgatgtttctattggagttgaatactaaataaataactataatgagggaaatacatttctaataaaattccctacattctagaaacatccctgttttaatttttttatctaaatctttttgtgctttatgtgtaaagaaaaaaatgtactgagttacaatgcattttattaacactatgtacataatagctgctttgtgttcagaatagtagcagttgctttgtatattaaagtgatccttgtgaatttgtgaaatattgtcataaagtgctttttcttactgtaatctttgtggtatcaactgtcataatgctctttttacacaaacatttatgtgcagtcacataaacatgcttttaaaaactctgtaagtctcttttttggggatgggatctctatattttgttgggttttttttgctagtagtgtgaagccatgttttattggacttaaagttacaatatattacaagcttgtgttggaaggcagcaaaactaattcagacaacaacatgtcttcagttactggatccctaattttcaggacaaaacctgtttttcaataagattgaacagtgcctatttgtggatttggagatgttactgtcaagatgactaatggagacatacgaccagctgtgtctgatgtcataaaacacgtgttcactgaaaggacaataagactatataccttctcaggtccccttgcaattctaaaactctgtgatcatataaattggaaggaaaggggaggggatatggttaatctttgcttaagctgtaagaataaaaaagttatctcctatactattaacttctgaaataagttctgagacgagacatctgaaaataagcagctgcattatttgtatgtttcttcactgccaagatgtgttcaagcctgctatacctgccattgtattggaaggcttaatgaatttcatttattttctgcaacaacgattacagaatttattgcacaaaatgagacattttgagagtgatattaattacatgagggacaataggcatgaactaggattgttctaagcaaatcggaatcgggtcaccctgccacgttcaggtgcttggaccttcaggaaaagattgcccatcttgtcatttgaccaggcactgaagtgacaagaccatccttgagaagtcacatccaaagataaaattctgatccatttctagttttagtgtttcgccactgaagacttaacatatgtcttttacactcaggttgcaaaacacaggcccaagacaaacttaacttctcccccaaatcttccttccgctggtttttccatctcgtaagtggtgccactatccatctgttaaattgtttaggggaaacctagaaaagcactaccttaatcagtgttatccttcttcttaactgtgcgtcctaatttctccacatctttcttaagtgcagtgaccaaaccggatgagaattctaacacgggcctgacatcaaatggaaaggaaggataatgtccaggagttggaatgttatccttgtttttaattaagatgcaattcacataaattaactttttaagtgaacaattaagtggtagtacatccacaatggtgtacaaccaccacttctatctagctccaaaacattctcatcactccaaaagtaaagtcccgttactctccattttctcctcccaccgcccttgtccctggcaaccaccaatctgcttcctgtttctttggatttacatccgggtatttcatgtgagactcatacactgtgtattacttctttcgtctagctttaatgtgttgttgaggttgatccattgtaacatgttatcactacttcattcctttttatagctaagtatactttttatagtaagtatgccattgtagatatataccacaagtttatcgattcatccagttgagttgtttctactgtttggctaatgttcatagtgctgttatgaatgttcgtgtacaagtatttgagtccgtgttttcaattatttggggtatatgcctgggagtggagttgctgggtcatgttgaaatcgcacatttaactttttgaggaactgtcaaactttccctcagcagctgtaccgttttaccttccaccattgatgtatgagggttccaatttctccacaccttcaccaacacttattttgccattttaaaaattatagccatcctcatgggtgtggtctctcattgtggttttgatttgcatttccctgattactaatgatgtggagcatcttttgttgtctttggccatctgcgtatcttctttgaagaaatgtctgttgaggtcctttgttcattgaaattttgttgttgggttctgagttccttatatattctgggtactaggcccttataatattttcgcctataagtttttgctttataatgtcctcattgttttcaaacttactttatgtaatatgtacacttctaaaaaaaagaaacatggaaaagggcaaactgtaaaaaaaaaaaaaaaaa

SEQ ID NO: 1713 - DNA, 1809 bp, HOMO SAPIENS
gcgagctgacagaggggagcagaggcccgagcggacgcgaggcgacgcggagagggcggcctgggccgaagtgaggcgacgcggggcggcggagtctgagggccggagcggagcggaggcgacgcggggaggggcgagggatcgcggccggtggctgggggccacctgctccccgagcaccggcccccgctccggggagcagagtccggagcgggatccgcggcccacaggttcgcaggttgcgaggggcggtgttgaagaatgtgtgggcgaacatcctgtcacttacctagagatgttctcacgagagcttgcgcctaccaggatcggcggggccagcagcggctcccggagtggagggaccctgataagtactgcccctcttacaacaagagtcctcaatccaacagcccagtgcttctgtctcgactgcactttgagaaggatgcagactcatctgagcgtatcattgctcccatgcgctggggcttggtcccttcttggttcaaagaaagtgatccttccaagctgcagttcaatactaccaactgtcgtagtgataccgtaatggagaaacggtcatttaaggtgcctctgggaaagggaagacgctgtgtcgttttagcagatggattctatgagtggcagcgatgtcagggaacaaaccagaggcagccatacttcatctattttcctcaaatcaagacagagaagtcaggtagcattggtgctgcagatagtcctgagaactgggagaaagtctgggacaactggaggctgctgacaatggccgggatctttgactgctgggagcccccagagggaggagatgtcctgtattcctataccatcatcacagtggattcctgcaaaggcttgagtgacatccaccacaggatgcctgccatattagatggagaggaggcagtttctaaatggcttgactttggtgaagtctcaactcaggaagctctgaaattaatccacccaacagagaacatcaccttccatgcagtctcttctgtggtgaacaactcgcgaaacaacactcctgagtgtctggctcctgtcgacttggtggtcaaaaaggagctcagggcaagtggcagtagccagaggatgttgcagtggttggccacaaagtcacccaaaaaggaagactcaaaaacacctcaaaaggaagagtcagatgttccccagtggtccagtcagttcctgcagaagagtccactccccaccaagagaggcactgcaggactcctagagcaatggctgaagcgggagaaggaggaggaacctgtggccaagcgtccttacagccagtgacacaggactttcagagaccaaggccagggtctgctgcactgctgttctgataataggttcttaacattgtatgtatatgtgtttgctttgggaggaggtggcactgtgttagttgacagttgtgggctcatgtagtcttttttgccatgagtaggagcccctagtggggctggtggacagctttggaagaggtgtcctgctgctgttaccagccatgtgggccccataggggcactgcgcctgctgccctttcctggcagggctggtggagtcttccctcaaagcatgccttacccagctgggaagtctctgccctgatctggtactccttgtagtaagctgttttctgctcagccactgggctctttcacttttttagttcttaaaaatttatttttaagttctaaaataaaataaaaataagttcttaaaatttatttttttcctgaataaattgtatttggtaaaaaaaaaaaaaaaaaa

SEQ ID NO: 1714 - DNA, 442 bp, HOMO SAPIENS
  misc_feature (110)..(112): n is a, c, g, or t
  misc_feature (124)..(124): n is a, c, g, or t
  misc_feature (127)..(127): n is a, c, g, or t
  misc_feature (131)..(131): n is a, c, g, or t
  misc_feature (358)..(358): n is a, c, g, or t
  misc_feature (361)..(363): n is a, c, g, or t
gtcctcaatgttgtactttttgatccatgtggagattatgtgaaggtttgtcttataattattaaaccatatatgcaatgctttcaaaattccgaaagtatattattttnnncctagagttccnatncccnatcaaaattacaattcaaatgttagtgtaaaataaagacagtttcaaacatgcaaagcctcagaaaatgtatcacgtatattttctcagaaaactatttgaggagaccctccataaaaactaatatgtaatcatagaaacaggaagaaacagaacctaacacagatatgaagtaaaggaaatcacaagcacaattagtaaatatctcaattcggaagccccagggtncannnctacgtcccaggtagagggcatgttgaaggccatcatcactggatgttctgttctactgtacaaccttttcaaccccag

SEQ ID NO: 1715 - DNA, 1510 bp, HOMO SAPIENS
ccgcccgcccctcggcgtctagcttcgtccccgccgtgagggcgggacttcctctcgttggctcgccgtttccgacgctgtccggaagtcgagttagtctagttagtatcggcctgttatctccttttgcgcgacacggtctcagctgttccgcctgaggcgagtgacgctggccgccaacgaggtatacgtactgggaccctcgccctcagtctcgtctccggcgcggctacctgccccgttttccctgtgagttgacctgctccgggccgcgggccgccaatggcaggggccgctccgaccacggccttcgggcaggcggtgatcggcccgccgggctcagggaagaccacgtactgcctgggcatgagtgagttcctgcgcgcgctgggccggcgcgtggcggtggtgaacctggacccggccaacgaggggctgccgtacgagtgtgccgtggacgtgggcgagctggtggggctgggcgacgtgatggacgcgctgcgcctggggcccaacggcggcctgctctactgcatggagtacctggaagccaacctggactggctgcgtgccaagctcgaccccctccgcggccactacttcctcttcgactgcccaggccaggtggagctctgcacgcatcacggcgccttgcgcagcatcttctcccaaatggcgcagtgggacctcaggctgactgccgtccacctcgtggattctcactactgcacagaccctgccaagttcatttcagtactgtgtacctccctggccaccatgctgcacgtggaactgccccacatcaacctcctttccaagatggacctcattgagcattatgggaagctggccttcaacctggactactacacagaggttctggacctctcctacctgcttgaccacctggcttctgaccctttcttccgccactaccgccagctcaatgagaagctagtgcagctcatcgaagactatagccttgtctcctttatccctctcaacatccaggacaaggagagcatccagcgagtcctgcaggctgtggataaagccaatggatactgtttcagagcccaagagcagcgaagcttggaagccatgatgtctgccgcaatgggagccgacttccatttctcttccacactgggcatccaggagaagtacctggcaccctcgaaccagtcagtggagcaggaagccatgcagctgtagcaacaaggtggaccctggagagcaggatgcataatccagcactggggaaagtggaggctcctgatgcaggctgcagacccaagagcaagtcctcccagccagagctggcgggctggcaaggggatattcagctctgcaaaggacttctggccaaaaagccagacatggtgccaagcagaacaccccccatactgtcagtggtgtccgtgagctctgggccctgccaccagaaagtcgagcactggtcctagtcaggctgtgatgaaatgtgctacaatacaagagtttattttct

SEQ ID NO: 1716 - DNA, 5515 bp, HOMO SAPIENS
gccctgccctcacctggctatcccacacaggtgagaataaccagaactcacctccggtaccagtgttcacttggaaacatggctctcagcctctggcccctgctgctgctgctgctgctgctgctgctgctgtcctttgcagtgactctggcccctactgggcctcattccctggaccctggtctctccttcctgaagtcattgctctccactctggaccaggctccccagggctccctgagccgctcacggttctttacattcctggccaacatttcttcttcctttgagcctgggagaatgggggaaggaccagtaggagagcccccacctctccagccgcctgctctgcggctccatgattttctagtgacactgagaggtagccccgactgggagccaatgctagggctgctaggggatatgctggcactgctgggacaggagcagactccccgagatttcctggtgcaccaggcaggggtgctgggtggacttgtggaggtgctgctgggagccttagttcctgggggcccccctaccccaactcggcccccatgcacccgtgatgggccgtctgactgtgtcctggctgctgactggttgccttctctgctgctgttgttagagggcacacgctggcaagctctggtgcaggtgcagcccagtgtggaccccaccaatgccacaggcctcgatgggagggaggcagctcctcactttttgcagggtctgttgggtttgcttaccccaacaggggagctaggctccaaggaggctctttggggcggtctgctacgcacagtgggggcccccctctatgctgcctttcaggaggggctgctccgtgtcactcactccctgcaggatgaggtcttctccattttggggcagccagagcctgataccaatgggcagtgccagggaggtaaccttcaacagctgctcttatggggcgtccggcacaacctttcctgggatgtccaggcgctgggctttctgtctggatcaccacccccaccccctgccctccttcactgcctgagcacgggcgtgcctctgcccagagcttctcagccgtcagcccacatcagcccacgccaacggcgagccatcactgtggaggccctctgtgagaaccacttaggcccagcaccaccctacagcatttccaacttctccatccacttgctctgccagcacaccaagcctgccactccacagccccatcccagcaccactgccatctgccagacagctgtgtggtatgcagtgtcctgggcaccaggtgcccaaggctggctacaggcctgccacgaccagtttcctgatgagtttttggatgcgatctgcagtaacctctccttttcagccctgtctggctccaaccgccgcctggtgaagcggctctgtgctggcctgctcccaccccctaccagctgccctgaaggcctgccccctgttcccctcaccccagacatcttttggggctgcttcttggagaatgagactctgtgggctgagcgactgtgtggggaggcaagtctacaggctgtgccccccagcaaccaggcttgggtccagcatgtgtgccagggccccaccccagatgtcactgcctccccaccatgccacattggaccctgtggggaacgctgcccggatgggggcagcttcctggtgatggtctgtgccaatgacaccatgtatgaggtcctggtgcccttctggccttggctagcaggccaatgcaggataagtcgtgggggcaatgacacttgcttcctagaagggctgctgggcccccttctgccctctctgccaccactgggaccatccccactctgtctgacccctggccccttcctccttggcatgctatcccagttgccacgctgtcagtcctctgtcccagctcttgctcaccccacacgcctacactatctcctccgcctgctgaccttcctcttgggtccaggggctgggggcgctgaggcccaggggatgctgggtcgggccctactgctctccagtctcccagacaactgctccttctgggatgcctttcgcccagagggccggcgcagtgtgctacggacgattggggaatacctggaacaagatgaggagcagccaaccccatcaggctttgaacccactgtcaaccccagctctggtataagcaagatggagctgctggcctgctttagtcctgtgctgtgggatctgctccagagggaaaagagtgtttgggccctgcagattctagtgcaggcgtacctgcatatgcccccagaaaacctccagcagctggtgctttcagcagagagggaggctgcacagggcttcctgacactcatgctgcaggggaagctgcaggggaagctgcaggtaccaccatccgaggagcaggccctgggtcgcctgacagccctgctgctccagcggtacccacgcctcacctcccagctcttcattgacctgtcaccactcatccctttcttggctgtctctgacctgatgcgcttcccaccatccctgttagccaacgacagtgtcctggctgccatccgggattacagcccaggaatgaggcctgaacagaaggaggctctggcaaagcgactgctggcccctgaactgtttggggaagtgcctgcctggccccaggagctgctgtgggcagtgctgcccctgctcccccacctccctctggagaactttttgcagctcagccctcaccagatccaggccctggaggatagctggccagcagcaggtctggggccagggcatgcccgccatgtgctgcgcagcctggtaaaccagagtgtccaggatggtgaggagcaggtacgcaggcttgggcccctcgcctgtttcctgagccctgaggagctgcagagcctagtgcccctgagtgatccaacggggccagtagaacgggggctgctggaatgtgcagccaatgggaccctcagcccagaaggacgggtggcatatgaacttctgggtgtgttgcgctcatctggaggagcggtgctgagcccccgggagctgcgggtctgggcccctctcttctctcagctgggcctccgcttccttcaggagctgtcagagccccagcttagagccatgcttcctgtcctgcagggaactagtgttacacctgctcaggctgtcctgctgcttggacggctccttcctaggcacgatctatccctggaggaactctgctccttgcaccttctgctaccaggcctcagcccccagacactccaggccatccctaggcgagtcctggtcggggcttgttcctgcctggcccctgaactgtcacgcctctcagcctgccagaccgcagcactgctgcagacctttcgggttaaagatggtgttaaaaatatgggtacaacaggtgctggtccagctgtgtgtatccctggtcagcctattcccaccacctggccagactgcctgcttcccctgctcccattaaagctgctacaactggattccttggctcttctggcaaatcgaagacgctactgggagctgccctggtctgagcagcaggcacagtttctctggaagaagatgcaagtacccaccaaccttaccctcaggaatctgcaggctctgggcaccctggcaggaggcatgtcctgtgagtttctgcagcagatcaactccatggtagacttccttgaagtggtgcacatgatctatcagctgcccactagagttcgagggagcctgagggcctgtatctgggcagagctacagcggaggatggcaatgccagaaccagaatggacaactgtagggccagaactgaacgggctggatagcaagctactcctggacttaccgatccagttgatggacagactatccaatgaatccattatgttggtggtggagctggtgcaaagagctccagagcagctgctggcactgacccccctccaccaggcagccctggcagagagggcactacaaaacctggctccaaaggagactccagtctcaggggaagtgctggagaccttaggccctttggttggattcctggggacagagagcacacgacagatccccctacagatcctgctgtcccatctcagtcagctgcaaggcttctgcctaggagagacatttgccacagagctgggatggctgctattgcaggagtctgttcttgggaaaccagagttgtggagccaggatgaagtagagcaagctggacgcctagtattcactctgtctactgaggcaatttccttgatccccagggaggccttgggtccagagaccctggagcggcttctagaaaagcagcagagctgggagcagagcagagttggacagctgtgtagggagccacagcttgctgccaagaaagcagccctggtagcaggggtggtgcgaccagctgctgaggatcttccagaacctgtgccaaattgtgcagatgtacgagggacattcccagcagcctggtctgcaacccagattgcagagatggagctctcagactttgaggactgcctgacattatttgcaggagacccaggacttgggcctgaggaactgcgggcagccatgggcaaagcaaaacagttgtggggtcccccccggggatttcgtcctgagcagatcctgcagcttggtaggctcttaataggtctaggagatcgggaactacaggagctgatcctagtggactggggagtgctgagcaccctggggcagatagatggctggagcaccactcagctccgcattgtggtctccagtttcctacggcagagtggtcggcatgtgagccacctggacttcgttcatctgacagcgctgggttatactctctgtggactgcggccagaggagctccagcacatcagcagttgggagttcagccaagcagctctcttcctcggcaccctgcatctccagtgctctgaggaacaactggaggttctggcccacctacttgtactgcctggtgggtttggcccaatcagtaactgggggcctgagatcttcactgaaattggcaccatagcagctgggatcccagacctggctctttcagcactgctgcggggacagatccagggcgttactcctcttgccatttctgtcatccctcctcctaaatttgctgtggtgtttagtcccatccaactatctagtctcaccagtgctcaggctgtggctgtcactcctgagcaaatggcctttctgagtcctgagcagcgacgagcagttgcatgggcccaacatgagggaaaggagagcccagaacagcaaggtcgaagtacagcctggggcctccaggactggtcacgaccttcctggtccctggtattgactatcagcttccttggccacctgctatgagcctgtctctacagtagaaggagattgtggggagagaaatcttaagtcataatgaataaagtgcaaacagaagtgcatcctgattattttcagaagctgatgaggaata

SEQ ID NO: 1717 - DNA, 2398 bp, HOMO SAPIENS
  misc_feature (2379)..(2379): n is a, c, g, or t
atgcccatcccaagatggcggagatccccctgtactttgtggacttgcaggatgacttagacgactatggatttgaagactatggtacagattgcgacaacatgagagtaacggccttcttggacattccaggccaggataacctgcctccactcactcgcctggagaagtatgctttcagcgagaacaccttcaaccggcagattattgccagagggctgcttgatatcttccgggacttcggtaacaatgaagaagacttcctcacggtaatggagattgtagtcagattgtcagaagatgcagataatctgcaaaatggcttcaatgctgagtaagagtaccgttgaacgcctgctactcccccgattctgtgaactgtgtggtgacaggaagctctttcaagttcggaaggtttgtgctgcaaattttggtgatatttgtcatgctgttggacaagaagccactgagaaatttttgatcccaaagttctttgagctctgctctgatgctgtttggggcatgcggaaagcctgtgcagaatgcttcacggctgtgtcgcacagctcctcccctggggtccgcagaacccagctcttcccgctcttcatcagacttgtcagcgacccctgccgatgggtgcaccaggctgccttccagtccctcggccccttcacttccacctttgcaaacccctccagggctggcctttatcttcgagaggatggcgccctgagcatctggccactcacccaggatttggactctggttttgcctctggctcccctgctcccagcagtggtggtaacacttcccctgccagtttaactcgttcagcaaagcctgtgcggagcgagccagagctacctgtggaagggacctcagcgaaaaccagtgattgcccacacagcagtagctcctctgacggcccagcggaaagccctgtggaaagctgtgtgtcggctggagctgagtggaccagggtttccccagagaccagcgcctgctcaaagctttctgacatgaatgacctccccatcagcagctaccctggatcagattcctgggcctgcccagggaacactgaggatgtgttcagtcattttctttattggtgaactcctctccctgacataagcaaggacttagagctgcttctgagtgaggctgggcctcaggaggacgactgcagcagacctggggttgtgcacaacagctgtgtggcccggagtgagattcagaaagtccttggtagcttgcaggagcatctgatgaatgatccagatgttcaagctcaagttcaggtattatccgctgcactgagagctgcacagctcgactgcgtgaatgaagctgagagcaagccaacagcaggcctaaaggaagtgtccatttcacatcccagctctgcctctgacaatcagatcgctctggcggcctcatcatctcaggatgagctctttgtggccaggatattacaaagcccagatccaggtggacccagaaatggaaccagtgaccatctggagactgaccagaggcaggatcccaccccacttgaagagaataaatctaaattacaggatgtaatacctcagccgctgctagatcagtatgtgtccatgactgacccagctcgagcccagactgtcgatactgacatagccaaacactgtgcctacagcctcccaggggtggcactgaccctgggcaggcaaaattggcactgcctgaaagatacatatgaaacactggcttctgatgtacagtggaaggtacggcgagccctagccttctccattcacgagctggctgtgattcttggggatcagttaacagcagctgacctggtgcctatcttcaatggatttttaaaggatctggatgaagtgcgaataggagttcttagacacctgtatgattttctaaagttgcttcatgaagacaagaggagagactatctttatcagcttcaagaatttgtagtgactgataacagcaggaattggaggtttcgatatgaactagcagaacagctgatactgattctggaactctatagtcccaatgatgtttatgattacctaatgcacattgccttaaagttgtgtgcagatcaagtttctgaagttcggtggatctccttcaaactagtcgtggcaattctgcagaagttctattccaacagtgaaagtgcattggggttaaatttcatcaatgagctcatcataaggttccggcactgttctaaattctgaaatgacttctttgggattaaagaagtgtatgtttctagaagactgcggaaaacatcatttctttggctgtgactttcttggagcaggcagtggtgagcaaggagtgtgtccccgtggacnagttcatggagcacctgct

SEQ ID NO: 1718 - DNA, 3714 bp, HOMO SAPIENS
ggtcctacccggaagcgcgcccgggctcctgcaggcggggcgctgtgcgcgccgcgatccggtacgtgggcctccgggctgtcccctctgggggcggcgatcctccctccggagccccccttcaaccctcccggaagtgaggaccagggatgctgtgctgctctcccatgagccagtcaccgagtcggtctgctgcagccctttctgaacctctggccgtctggatgctccactgtgcttgccaagatgaagtgcgtcttggtggccactgagggcgcagaggtcctcttctactggacagatcaggagtttgaagagagtctccggctgaagttcgggcagtcagagaatgaggaagaagagctccctgccctggaggaccagctcagcaccctcctagccccggtcatcatctcctccatgacgatgctggagaagctctcggacacctacacctgcttctccacggaaaatggcaacttcctgtatgtccttcacctgtttggagaatgcctgttcattgccatcaatggtgaccacaccgagagcgagggggacctgcggcggaagctgtatgtgctcaagtacctgtttgaagtgcactttgggctggtgactgtggacggtcatcttatccgaaaggagctgcggcccccagacctggcgcagcgtgtccagctgtgggagcacttccagagcctgctgtggacctacagccgcctgcgggagcaggagcagtgcttcgccgtggaggccctggagcgactgattcacccccagctctgtgagctgtgcatagaggcgctggagcggcacgtcatccaggctgtcaacaccagccccgagcggggaggcgaggaggccctgcatgccttcctgctcgtgcactccaagctgctggcattctactctagccacagtgccagctccctgcgcccggccgacctgcttgccctcatcctcctggttcaggacctctaccccagcgagagcacagcagaggacgacattcagccttccccgcggagggcccggagcagccagaacatccccgtgcagcaggcctggagccctcactccacgggcccaactggggggagctctgcagagacggagacagacagcttctccctccctgaggagtacttcacaccagctccttcccctggcgatcagagctcaggtagcaccatctggctggaggggggcaccccccccatggatgcccttcagatagcagaggacaccctccaaacactggttccccactgccctgtgccttccggccccagaaggatcttcctggatgccaacgtgaaggaaagctactgccccctagtgccccacaccatgtactgcctgcccctgtggcagggcatcaacctggtgctcctgaccaggagccccagcgcgcccctggccctggttctgtcccagctgatggatggcttctccatgctggagaagaagctgaaggaagggccggagcccggggcctccctgcgctcccagcccctcgtgggagacctgcgccagaggatggacaagtttgtcaagaatcgaggggcacaggagattcagagcacctggctggagtttaaggccaaggctttctccaaaagtgagcccggatcctcctgggagctgctccaggcatgtgggaagctgaagcggcagctctgcgccatctaccggctgaactttctgaccacagcccccagcaggggaggcccacacctgccccagcacctgcaggaccaagtgcagaggctcatgcgggagaagctgacggactggaaggacttcttgctggtgaagagcaggaggaacatcaccatggtgtcctacctagaagacttcccaggcttggtgcacttcatctatgtggaccgcaccactgggcagatggtggcgccttccctcaactgcagtcaaaagacctcgtcggagttgggcaaggggccgctggctgcctttgtcaaaactaaggtctggtctctgatccagctggcgcgcagatacctgcagaagggctacaccacgctgctgttccaggagggggatttctactgctcctacttcctgtggttcgagaatgacatggggtacaaactccagatgatcgaggtgcccgtcctctccgacgactcagtgcctatcggcatgctgggaggagactactacaggaagctcctgcgctactacagcaagaaccgcccaaccgaggctgtcaggtgctacgagctgctggccctgcacctgtctgtcatccccactgacctgctggtgcagcaggccggccagctggcccggcgcctctgggaggcctcccgtatccccctgctctaggccaaggtggccgcagtctgcctttgcatcctgtcctccagccacccttgcttgccactgttccccatgacgagagcctcctgtctgcagtggccatcctgaggatagggcagagtgcccagggtggccccagggcttctaaaaccccacctagaccaccctccatgtcaggtactgagcaaggccccagatccttctctctggaggaagagggaagcccaggggtcctgtttgtaaaacaacggtggcaacagctcctcttccagagctgcctctgcctttatcctgggagatggggaggaagccccatctctgctgttccctgcgtggaggaagcccacccagcaagctctctcctaccccaggtaaaaggtgctcctttgcctgggtttgaattccagcgctgccacttcctctctgcacctcctggcaagtttcttctattccccacgtttaaagcgatggcacctccgtcccagggtggtgtgaggattacccagtgtggtaggtgctcaataaatgttggtcattgttatcactgaagcccaacatgctagtgcttctagacccttctgtcagtgctgataagcccttgctaagtcccagccccttcatgcttggctggcgtctgccctagggctggggttctcaagcccctggccctggcccagagatttggattcccttggcggccgtggagcccagcctttgatgtctttcaaagcttctgtggtgcgccctggattgagaaccaccacccgaggggtacagcccctctcttccaaccgagaagttcctgtcccagaatggacccagggacaagagaccctgagagccctgggactgggagtgtctgctcctctgaggccaggaggccggtgctgggccagagaggacggcgtggcgaaagtcagcgtccactgcagcacaggatcagatggccgtgtgctgtgcatgcaggagcctcgccttctgtgtctttagtcttgagccaaaatttgctcaaagactgatctcttccttgcagggaacagctttggggctgggggaactagaacccacatgttggtctaaaccctgagaaggtggcagtgaggaagtatcccctcaggtgactggatctgtgttcctccttaacatcatctgatggaatggcaatgaaaagcgtggattgtggaaaatacagaaaaacataaaggaaaaaactccaatcccctgagcccaccactgttcaggacccctgcttttgtcacctactatttccctttagtttttagcagcggctggatgtgatatgtctagtttaaccagtccccttgatctttctatataataaataacacaggagtgaacatcctgaatcag

SEQ ID NO: 1719 - DNA, 7687 bp, HOMO SAPIENS
acactgtggaaagaatgtttgaatgttcaggcttctaagtgacagaaaagcagcttgtctgaaaaatgatttttttctggcttctaaccagtgttaattcacttggaaaccaaggcagttttctcccctttactgaactctggatttcttttccaatcaaggcccctgacaccaaagaaggaaatggagcgtaaatcaggctacagagtggctgccattcattcgggaagccttattgttttccgtcctttgttcccctctagacccttgccaatccccaggccgcgaggccctctgaagccctgagcctggagcggtaggagacgggggaactgaaacgccgcggaaccagaggctgagggagcggcgcgatggagggaggaggagcgacggaccggcaggcctagctccggggctgcggcggctgaggcgcggggatggagcccctgcgggtgctggagctatacagcggcgtgggcggcatgcaccacgcgctgagagaaagctgtatacctgcacaagtggtggctgccattgatgtcaacactgtcgctaatgaagtatacaagtataattttcctcacacacagttacttgccaagacgattgaaggcattacactcgaagagtttgacagattatcttttgatatgattttaatgagccctccctgccagccattcacaaggattggccggcagggtgatatgactgattcaaggacgaatagcttcttacatattctagatattctcccaagattacaaaaattaccaaagtatattcttttggaaaatgttaaaggttttgaagtatcttctacaagagacctcttgatacaaacaatagaaaattgtggctttcagtaccaagagtttctattatctccaacctctcttggcattccaaattcaaggctacgatattttcttattgcaaagcttcagtcagagccattaccctttcaagcccctggtcaggtactgatggagttccccaaaattgaatctgtacatccacaaaaatatgcaatggatgtagaaaataaaattcaagaaaagaacgttgaaccaaatattagctttgatggcagcatacagtgttctggaaaagatgccattctttttaagcttgaaactgcagaagaaattcacaggaaaaatcaacaagatagtgatctctctgtgaaaatgctaaaagattttcttgaagatgacactgacgtgaaccagtatcttttaccaccaaagtcattgctgcgatatgctcttctgttagacattgttcagcccacttgtagaaggtccgtgtgctttaccaaaggatatggaagctacatagaagggacagggtctgtgttacagactgcagaggatgtgcaggttgagaatatctacaaatcccttaccaatttgtcacaagaagaacagataacaaagctgttaatacttaaactgcgatatttcactcctaaagaaatagcaaatctccttggatttcctccagagttcggatttcctgagaagataacagtgaaacagcgttatcgcctacttggaaatagtctcaacgtgcatgtagtagctaaactaatcaaaatcttatatgaataattttgaaataactctgaaagatggtcatatgatattccttcattttcagagagtaattctgaaattctgttttgaactaattctggtgaaatttaactaaattattttaatctgtccttattaagaaatttggattttattaaaaaaatccatgtgtttcatcaaatttatattactgtattttataaaatacgaactattgttatgctttatggagagtatattttcatatgaaactgataaatatatatgtggaatattctttttaaaaacaattttataaacaaatcaaggagcactagagctttagtgtctacatgagtatcttgtgaagtgtcataacaggcataacatatttttatgttaattaaagaagttttttatttctaattttaaaataatgattctaattctagcccattgaatgttttacttaatttccaatcctgtaaatatttctttatttcatctaaacaaatgcatatgatatgtaaaccaaattatcatcattcagtttatacagcagactgaagaatatgtcaggaaaaataatcctaaatgtttgattacctctccatgaagcggccacagaaactgttggtgcacattatctacattttcctcagcctctatctgaaggacaaaactcatttttccttcttcattttgtatgtactttcctttagttgactattatcaaagcttgtttttgtcttctcagcttctgagttgaatttgcctttgcacgctgaggaatgtagcatgacgttaagatttcagggaggaagctgccctctgatcccatgtcatatgacagtactcccctccccccagttgttctttattgtagcaacatacactctcaatgaacttttatgacttttaactttctctgtctctcttcctcagcagacctcttggaattagggtttctaatcaaactaagtcttgcatcataaattctatggtttgtgataaaagcaagtgacaaagagaagagagatgaaaagaaacaagtccagaaatcatattacaagattttaattcaaatttttcttcttaaaaatcagctatttagaggtggataaattggaagtttgtgcattgcttgtgggaacgtaaaatggttcagctgctgttggaaaacgctatggaggttcgtcacaaaattcaacatagaattaccctatgattcagcgattccacctctggctatagatccaaaagaattgaaagcagggacttgaacagatatttgtacaccagcgtttataacaccattatttacagtagccaaaaggtagaagcagcccaagtgtcatcccattcacccatgaatggatgcaggaattgtgttccgtgcatgcagtggaatagtaccagccttccgcaggaaggaaattctgacatatgcggtgacatggatgaaccttgagtacattatgcgaagtgaaataagccaccctgtggggatggagaatgggtagttagtgcataatggatacaaagtttctgattggggtgatgagaaagttctggaggtggatggggaggatggttgcacaacagtgtgagtgtacttaatgccactgcaactgtatatttaaaaatagttaaaatgataaattttacattatgtatattttactgcaattgaaaaaatcatactctattaccaatttttcagaactcatagataaatatgaatgtagggaagctgtaagccagcccatatacagaaactatcactatctacatttttcatatgtgttcagacagagcctattacaagtctcataaatttcagtaaacaatcacaaattattttggcacactttcatgtaggttctgttcactgctgaaatattctaaataaaatggtttagagttttactgtaactatgaataattatgctataattatagtatcccacattcggttgagcaacattatacaaaataagtgtcgagttactgtgcaccaactataaatacttgaaaggtctgtagagacatttgcttacaaactggtagacagaatgtagcttagtggaattcttaaattatgggaatgtattcacaggaagacggtgattcttgcccttaattcataattgaaaatatgcagtaacaagcataaaactcacatcttaatgaagatgtatctaccagtgtcattcaattagcagatgtatatgtatgcataattaatttggaaaatgttattttatggaatgtctgctatatgcttttggtaataatgctgtatataaaatttgcactggaaattctgtttcctgatatttggacttgtacatttattcagatgttggaaaacatagcttctcattttcaggagaactatgtgtaattcagtcttcaccataccttacagtaaaccgatttttcgttctccttttcccatcatccctgctcttttaaacggcttgccagataattgtaaggtatttattaccctgcttcatatttttagtatgtcttcaggatccaaaactaattctaagagatgaccaaatcaattaatgtaaacaaaatgagtcatagttggaaaatgatttcgaagaggtgggtagtcattgtaggaggggtcagagcctgacaatcctcagtggcaggcaagaaagaggaatgatggcatcaccttcacagaggaccctggccatggtgttctgtctgtgaaatcagaccttcaccatgggcactgccctatgtctggaaagatgagaaaatacctccaaccttcagccaacttattcttcctcaaaaaggagagccttctaaagaggcaaaaacagtagttgaaattgtgaacagtgagggtccacccagcacttttttagaaatttgagggtaaactgttgcttgaaattatccaacttttcaaagaggtaaagttatttagtagagaggcttttaagttgccctgaaaggctgtattgctaccatgtgggatgtaaaattggatggggttagagatgagtgcaggcaattcaacgcattggtaggggtggaagttctcagcagaaatcaccatctgggtttttgctcccatctcaacctagttgaggtctagagtgattaagctggagacttctgaggagagagaaatgaactaaagataaatacaactgatttaattttagccatagcagaacagaacaaagaagcaaccacatttcatctaatatcaagcacctactaaaggatgcattctgcaggccagctgcatctgcatccaaaccaaagtcactctggttgctcttttgctttgataacttaagagtttagaaacaagcggtttctaaaaaagccaagataacacaataaggaccaaattttaatcccacatagacaaagagattaaagtgggttttcctgaattgcttatgttatgaacaggttaccttgtcataatttggccttcggcttgggattctaactgttttaggccaccagttatgacactgacttactaatagctttggactttgaaactgtgtgagggtcatatagcctcagcagttttcttgtagcctgtgattgcattgagattatataatttttaaagacatggcctttggacctctgtctactagttaatctcttccatctaccattcaaatgtgctatatacaactatcatatcagcttcttagcaagcacttttctggacctctgtcacacccaccaagatgtctagttatgcctttcatttgagagtttccctttgctgttttttttgttttgttttgttttgttttgttttgtttttgagactgagtctcgctctgttgcctaggctggagtgcagtggcgtgatctcggctcactgcaatctccccctcctgggttaaagtgattttcctgcctcagcctccctagtagctgggattacaggcgcatgccaccacacctagctaatttttgtattagtagagatcgggtttcaccatgttggccaggctggtctcgaacacctgacctcaagttaatccacccaccttggcttccctaagtgctgggttttacaggcatgagccaccacgcccagcctccctttgcatgttttttaaaaaggcattaagcatcttgcacatgttctttagtttcagtttgcatgagtcaacctgtgtgcatcattttccctttcactatttcttgtctttgctggtgaaattttaaagcttcagtttaaaaaaaaaaagaaaaagtattttttgttgttgttgtttctagcttccgtttctctctttaggctgtctaggaacattttaaggtactcatgctcttcaaaatcttacacaatcaagatccaaactccatcaccattcatgtcttagcttgtgaatttatttctttttaaatatatttgttcaagaaatatgagcatgtacaatgagctgttttggctttgtattccccaagttctcatatacattggctttatatttaccatagattctgagtcttactttcagccacatccagcacttactgaagtctccctcaagtacaccacacttgactcctaaagcttccaaaatctcatttttcctataaatatgagaccggaaattttcacaaaaattacaagataggaactgagttctcccatagaactcttttctgaataagcctagggttttttcatttctttgcttgtacctagcatggcttcagtgtttacttcaaatatttgctctgtattttgtttgcattttgatttctatttttatcaggacagattgaaattataagagtgtacatagagaacatgtttgtttagctaaattagctctataatcagatgagatcacctagagggtcagaggatgagagtgaaagagagaaagagaaaaagaagagcagaggcttggagctgacttatctgaaggttccgtcctcaggtctctttctacccttcacttttcatgccatttttcttagagattctcaccctttcctacaacttcagccattttgccgatgacacccagatgactctaaatctgctgttttcctaagtcctattctagaatcttcatgctgggacatttttaacttggatatcttgctattcaagttgtatcggatttgcatcaaatttagcatgcttgcaacctaagcacactccattctatagtcagttccactcttgactttaatatttatggtacggttagtctccacatcttccaagttcaagcttcataaccaaagatcatcttcaccttccttctcactctgcattccattggtcagcttctgttaaaatggccttcctaaggcaggcctctgaacgatcatttatttttaggaaaacttataaaaagtcactgagatttaaaaacacccacacatatatttgcaatcatatttgtgtgcttggttaaacatgtcaacatttaacagatttgagccttctaaatttaatccagcatgaatgtcgtttttactaaaatatttgctattttactcacttagctggttccttacacaagtccagttaaatttcacatgtgaaaaaaatgactgaaaacactgaatggaatgtgatactccttgtgtagtagaaatgagttgactttcatatttaagagctgatcctatgaatgagtagacaataagctgaatagctgttacgatctgagttttaaaaatggaaaatgtttcatgttttagagaatgtaaacttccacaagggcagagattgttaatacgttgtccccccagtgacttaaaacagtactggcacatagtaagcactcaataaatagttgttgaatgagtgaatgtaggaaccatactggaatcaatattgaagctacatagaaagcaccacactgtggagttcaaacaatgtctttaagttgttctcttgaaaactatttaatttgtctgttactgccacttcttccatgcccagaggaacagccaaagttactcaagtctggaacacatgatttaaaaaataattctgggataggcttttggcttttggaaagtagcgcaaataaaactttttaaaatactgtaaaaaaaaaaaaaaaaaa

SEQ ID NO: 1720 - DNA, 152 bp, HOMO SAPIENS
tcaggaacatgaaacatcatcgactattctctacagacaacaggcaaaggttcttactggtccagtacatacaagtccttcaggaagaaaaacatgattctaccaggattgggttgaatagagagagaattgcagtttaagattcatgagta

SEQ ID NO: 1721 - DNA, 8032 bp, HOMO SAPIENS
gtgcgtgcgtgtttgcgtgtggtcacagttcccgccatcagccgctctccctgactaggggtagctagcggcctccctcctttgggttcggtatccctacttccattaccctcggctcctcccactcctcgcgggctccgtgctttccgcgggtctgtccgggggctccggaccctcggcgcagctgagttgatggcttccggagaactggcatagctgcagaatatgagtagtgtcccaagaagagtgctttgcctttggcacaaggatcagaataaaggtgaattgctattacatagggtttttcggtaaaagtcactgaaaattatttgccatacagtaaccagagacctccaactaggggcccccaaactgtatcctgcctgtagccagaagcaatttttaaagaaaatatgtctcctctgaagatacatggtcctatcagaattcgaagtatgcagactgggattacaaagtggaaagaaggatcctttgaaattgtagaaaaagagaataaagtcagcctagtagttcactacaatactggaggaattccaaggatatttcagctaagtcataacattaaaaatgtggtgcttcgacccagtggagcgaaacaaagccgcctaatgttaactctgcaagataacagcttcttgtctattgacaaagtaccaagtaaggatgcagaggaaatgaggttgtttctagatgcagtccatcaaaacagacttcctgcagccatgaaaccgtctcaggggtctggtagttttggagccattctgggcagcaggacctcacagaaggaaaccagcaggcagctttcttactcagacaatcaggcttctgcaaaaagaggaagtttggaaactaaagatgatattccatttcgaaaagttcttggtaatccgggtagaggatcgattaagactgtagcaggaagtggaatagctcggacgattccttctttgacatctacttcaacacctcttagatcagggttgctagaaaatcgtactgaaaagaggaaaagaatgatatcaactggctcagaattgaatgaagattaccctaaggaaaatgattcatcatcgaacaacaaggccatgacagatccctccagaaagtatttaaccagcagtagagaaaagcagctgagtttgaaacagtcagaagagaataggacatcagggcttttacctttacagtcatcatccttttatggtagcagagctggatccaaggaacactcttctggtggcactaacttagacaggactaatgtttcaagccagactccctctgccaaaagaagtttgggatttcttcctcagccagttcctctttctgttaaaaaactgaggtgtaaccaggattacactggctggaataaaccaagagtgcccctttcctctcaccaacagcagcaactgcagggcttctccaatttgggaaatacctgctatatgaatgctattctacaatctctattttcactccagtcatttgcaaatgacttgcttaaacaaggtatcccatggaagaaaattccactcaatgcacttatcagacgctttgcacacttgcttgttaaaaaagatatctgtaattcagagaccaaaaaggatttactcaagaaggttaaaaatgccatttcagctacagcagagagattctctggttatatgcagaatgatgctcatgaatttttaagtcagtgtttggaccagctgaaagaagatatggaaaaattaaataaaacttggaagactgaacctgtttctggagaagaaaattcaccagatatttcagctaccagagcatacacttgccctgttattactaatttggagtttgaggttcagcactccatcatttgtaaagcatgtggagagattatccccaaaagagaacagtttaatgacctctctattgaccttcctcgtaggaaaaaaccactccctcctcgttcaattcaagattctcttgatcttttctttagggccgaagaactggagtattcttgtgagaagtgtggtgggaagtgtgctcttgtcaggcacaaatttaacaggcttcctagggtcctcattctccatttgaaacgatatagcttcaatgtggctctctcgcttaacaataagattgggcagcaagtcatcattccaagatacctgaccctgtcatctcattgcactgaaaatacaaaaccaccttttacccttggttggagtgcacatatggcaatttctagaccattgaaagcctctcaaatggtgaattcctgcatcaccagcccttctacaccttcaaagaaattcaccttcaaatccaagagctccttggctttatgccttgattcagacagtgaggatgagctaaaacgttctgtggccctcagccagagactttgtgaaatgttaggcaacgaacagcagcaggaagacctggaaaaagattcaaaattatgcccaatagagcctgacaagtctgaattggaaaactcaggatttgacagaatgagcgaagaagagcttctagcagctgtcttggagataagtaagagagatgcttcaccatctctgagtcatgaagatgatgataagccaactagcagcccagataccggatttgcagaagatgatattcaagaaatgccagaaaatccagacactatggaaactgagaagcccaaaacaatcacagagctggatcctgccagttttactgagataactaaagactgtgatgagaataaagaaaacaaaactccagaaggatctcagggagaagttgattggctccagcagtatgatatggagcgtgaaagggaagagcaagagcttcagcaggcactggctcagagccttcaagagcaagaggcttgggaacagaaagaagatgatgacctcaaaagagctaccgagttaagtcttcaagagtttaacaactcctttgtggatgcattgggttctgatgaggactctggaaatgaggatgtttttgatatggagtacacagaagctgaagctgaggaactgaaaagaaatgctgagacaggaaatctgcctcattcgtaccggctcatcagtgttgtcagtcacattggtagcacttcttcttcaggtcattacattagtgatgtatatgacattaagaagcaagcgtggtttacttacaatgacctggaggtatcaaaaatccaagaggctgccgtgcagagtgatcgagatcggagtggctacatcttcttttatatgcacaaggagatctttgatgagctgctggaaacagaaaagaactctcagtcacttagcacggaagtggggaagactacccgtcaggcctcgtgaggaacaaactcctgggttggcagcatgcactgcatatttgttactgctgcccacctcacctttcctctgctgaaggagaatttggaattctacttgatgcgggagcaacaaacagctcagggccaaaccaaaagacaaaaattggagtaacgtagaatgctccatgctattttatggaaactttggtctcacatccgtagctgattatcctctttttctcctatgagtggcacttcttttgtcttaggaatacatgttgtaaatatatatctgtgtatgtgtgtatacacacacacagacacacacacacacacacgggatgaatggagccttaaagagttaggatgagccaccagaatatgcctgctcaaaattaatagcacagcagtttggagaagaaatgaaggtgtcaaagagtccattcacctgagaaatgtgtgaagacatacttatcagttggcttttagcttttatgttccttgagtagtttcactcaagtctgtaaccttttgtgtttccttattagtaaaattcactggaaagccagctcttcatgttacactaatgacagtttgttctctttgcaagagaggggcattactgtcacctgacttgaggagctgttttgttgttgttgttgtctgcaaatttcatgaatttgtgatgtctttgctgtttacatgcagtcccaagaaatggattgttggtgctttggaatatgttacagtcccacatttgatatttcttatatactttgttttctctaaggagatttcttcacacagtatgttcatcatatatcatcatcattattatggtggtaaagatagaatcttttttcttttttgtcattctgccatggagcagcattaccctaatggattgcaaccaaaactttaaacaagtagaaagataatatttctccaattgggactccccagcaggaatacttagggataaggaagaatgctagcatctctgtctctcaaacatagggaggataagaagagtgttcttctggtaaagctaaaattctggaccactgaagctaaaagccctattgcaagtatgaaattaagtacttgagctgtaggacaaaccttgggcatttaaccatttactgtctggctttgcccttaaaatagggttgcaattaaaatgtgattggcttaggtaatcccaaaaactaacaaataacaaaggtgcataatttatttatctactttttaggtgctctgagttgaggcaaagtagagcggcaacattaagtgctatgctagtcacttagctgacgtaaccagcttggttaagcagcttatgaaaccatataaagaattcttttgaggatggaattctgtccacaaaataattttgtgagcccagatatcattaggatcacacagagttaaatatagaaaaatgaaaccatcattatattctttcgtgttttttcttttattataaacaaggggattattctttagttctcagaggtagggacaaaaccacatcaggttttcagaaggaaaaaacatttaaaaacccaccatcacatgagagaatcacttgaacccaggaggcagaggttgcagtgagctgagatcgcatcattgcactgcagtctgagtgacagagtgagactccatctcattaaaaaaaacgaaaacaaaaacaaaaaaaacacaaaccatcatcacagaagatgcaacatcttttctgaaagattgccttaagagagctccagtcctactcttggaacttggatgtattctaatgtagtaaactattctaagttttcattctttgaattataaatggcctcagcagttttgctcaactactgataaatgctttgcctcctaccatctacctatataccttattgtaatgaatgttccaaaatggtagagtggtagaaaacgccagagtagtttagagcagaggaaaatatttgttttaaaactagctttaaagttttgtttcatttctaccaggagcctctttggtttggtttgattttgcttggaaataattggttttcttataaatgagtgaagcggtgataaaattctttggctagttattaattcttttacgtgtctttgcatttgagaggcactgttaaaaattattgggaaagatttaaagtgcaggctgcaattaaaacatggagaaaagtagaaataatgccataagtctagattgcctcatgaagcagcctcatttgaattgctttcatagctttcatgtgtgtatggtttagaagtacacttacctcagaaacctgatttgatcttcatgtcttgggcaggagttgttgaaaataggttattggaatatataagttatctcactgctcatgtacttgcatgtttgggactcaaattttacttgatgtctgtccattcttgtggccctatcagccttctccttcctttactcctttaatctacttctttgactaccagtggagatttcagctggactatgttgatggggtttgttgttgtttttgagctggctgtatatattttaaaattataaatagataatatattattttttgcacattgtgatcagtttgcccagaattggggatggggcagttagcatgttggggccaggaagggacaagttagataaggactgagtgcttccgttgcaggcagtttgcacaatacctaattaaccttcctattgaaaataccaaatgtgtggttacattactttaaatgacattgaattggaacttgatggcaattagttctagatacaaccttttgatctttgttggaattttaagggaaaaatgaactaaacttcatatttgttgattttaatcacctaatagtactgaaggttggaaagttgcatgtggctggatgctgttaatttctttaatagccatgactataatttaagcctatgagaagatagactgtttcgtagggatatattcacatgtgtgtgcacactcatgagttttgtctcagcaggatagaataagcaaatccatgaactggtcttctattaatactttgattctaaaaattatttgtttacttgctatggtctgttcattctgggcctaaccttaaaggctcaataacaaatacaacaaatgtaaatatgtttacattttaagacatatgcagtggttcttacagatcagttaattaactccagaaagcaaatgttagactacacatttatttttctccttgatcaagtataaaattctgaaacagaggctttaaaatttaaaacctcagcaaaataatccatgaatttactgattcttctgtatcgtgtgtagttaccattatgtaactatacacacatacagctacggatataatgaaaattatctgcaaacacctaaattaaagagaaaaaaaagtagtttgtaaactcatttgtgatctactgaaaagaggttatattaaagcaaattaaaatattttccttctctgtcctctgaaatgactgcagtagatactcttagttatcccatttagggtggttggagggcctttttaatttaattgaccccccgaggtggtcttttgttttaaacagggggcaacagctggatctccaagtacatatggattttgtatatataggagatttttagaaaaatcaacaacctaacaccagattcaagtcacataaaagtgttccaataaaatggatggatgtctttttcctccccattttgctttatactgagtaatgcactcttgcaagtgtatacaaaaactaaatagacttctgccctccaacatctttttattgcattacttcaaaatcctaattttgtctctactgatatgtcttattaacatctgaaaaaatatatattttttattggaaaattctaatttgttaggccttgaaagttttgtgacaattattttgctgtgtttaaccacaatcattcaccttatggcatgctttgattactagacttcaggcagtctcattcattgtatcatacttacacacaattagtaagttgtctccatgtgtgctatatgtctgaggtgtatggagtttttatttaaaaagtgtgccagtctgaatataagcatttgattttgtaacattggacttttcttaaaagtacagaggttcaaagtataggtatgtccattggcataagaatagagtgggtgagggtctggaccaggttccaggttggtccagtcagatgccagaacaaagaagaacagtcaactaaactggtctacttcaaaaatagtgggcctgtgtgaagagtgagaccacatgtgggtgtgcacacctcttgtccccaggtttccctccctttgagcttttctttccctccctaacttctctggcctattgtcattgttgtttctttaaacttaaggagagaaaaacaaaaatgagattcctacactttgcctaattgagccactaccaggttttctggcagctgtggccacattatttgtgagatgattttttttctttatgttcagagtgacttttgattctgattctttatgttttgtatggagcggcacttttatctgtgttttagcagaactgttcctctgtatcctttacggtttttctttgtttttgtttcctttttaaattatgcatagagtttttttgtgtgtatgaaattaaagcctttattaaccttc

SEQ ID NO: 1722 - DNA, 3037 bp, HOMO SAPIENS
agtggccctcgccccgccccaaacccgaccccggtgggcgtcgacgcgcagcagcagcgggtccccccaaccccggcgccccgcctccccgggcctcgcgccgcatgccggcgtcggcgctttttgacgccatagtgggcgtgtcggcgcgacccgcgacgtcgccacgcgccgacaatggcggctgcgtcggcctgagcagggcttagtttagaagtaatttcctgacgttgccgagggagccgcagtcgcctcagatccggtcggcggcggcggcggtggcggcggcggcagcgcgcctgcgcgctcccgcagcgccctggacctagcggcggtgccgaggcccggcggagcaagccagctccagcgtcatttcggcctcttagttcttctgaaccctgctcctgagctaggtaggaaacatgagcggcaccaacttggatgggaacgatgagtttgatgagcagttgcgaatgcaagaattgtacggagacggcaaggatggtgacacccagaccgatgccggcggagaacccgattctctcgggcagcagccgacggacactccctacgagtgggacctggacaaaaaggcttggttccccaagattactgaagatttcattgctacatatcaggccaattatggcttctctaacgatggcgcatctagttctaccgcaaatgttgaagatgtccatgctaggactgcagaggaacctccacaagaaaaagccccggaacccactgatgccagaaagaagggagaaaaaagaaaggctgagtcaggatggtttcatgttgaagaagacagaaatacaaatgtatacgtgtctggtttgcctccagatattacagtggatgaatttatacaacttatgtccaagtttggcattattatgagagatcctcagacagaagaatttaaggtcaaactttacaaagataatcaaggaaatcttaaaggagacggtctttgctgttatttgaaaagagaatctgtggaacttgcattaaaacttttggatgaagatgaaattagaggctacaaattacatgttgaggtggcaaagtttcaactgaagggagaatatgatgcctcaaagaagaagaagaagtgcaaagactataagaagaagctgtctatgcaacaaaagcagttggattggagacctgagaggcgagccggaccatcccggatgcgccatgagcgagttgtcatcatcaagaatatgtttcatcctatggattttgaggatgatccgttggtgctgaatgagatcagagaagaccttcgagtagagtgttcgaagtttggacaaattaggaaactccttctctttgataggcacccagatggtgtggcctctgtgtcctttcgggatccagaggaagctgattattgtattcagactctcgatggaagatggtttggtggccgtcaaatcactgcccaggcatgggatgggactacagattatcaggtggaggaaacctcaagagaaagggaggaaaggctgagaggatgggaggctttcctcaatgctcctgaggccaacagaggccttaggcgttcagattctgtctctgcttccgaaagggcagggccttctagagcaaggcatttttcagagcaccccagcacatctaaaatgaatgctcaagaaactgcaactggaatggcgtttgaagaacctatagatgagaagaagtttgaaaagacagaagatgggggagaatttgaagaaggtgcttctgaaaacaatgctaaggaaagtagccccgaaaaagaggctgaagaaggctgccctgaaaaagaatctgaagagggctgccccaaaagagggtttgaaggcagctgctcccaaaaagagtctgaagaaggcaatcccgtaagaggatctgaagaggatagtcctaaaaaagagtctaaaaagaagacactcaaaaatgattgtgaagagaatggccttgcaaaggaatctgaagatgacctcaacaaggagtctgaagaggaggttggccccacaaaagagtccgaagaagatgactcagagaaagagtctgatgaagactgctctgaaaaacagtctgaagatggctccgaaagagaatttgaagaaaatggtctcgagaaagatttggacgaggaaggttctgaaaaggagcttcatgaaaatgttcttgacaaagagttagaagaaaatgactctgaaaactccgaatttgaagatgacggctctgaaaaagtgttagatgaggaaggctctgagagagagtttgacgaagattcagatgaaaaggaagaagaggaggatacatatgaaaaagtatttgatgatgagtctgatgagaaagaggatgaagaatatgcagatgaaaaggggcttgaagctgctgataaaaaggcggaagaaggtgatgcagatgaaaagctgtttgaagagtcagatgacaaggaagatgaagatgcagatggaaaggaagttgaagatgctgacgaaaagttgttcgaagatgatgattccaatgagaagttgtttgatgaggaggaagattccagtgagaagttgtttgacgattctgatgagagggggactttgggtggttttgggagtgttgaagaagggcccctatccactggcagcagctttattctcagtagcgatgatgatgacgatgatatttaatcccttaaacttgctttttagggagagtcctccatctacatttgcctgtgcttcagggtaattactagtagtgttacatgaacatgtgcatagtggtaggatgccatcagattaaagcattgaagtgtttcattgttacctgtacctaatggttttaaatatatgttaattgattgtttagttaaaatgtcatagttacaatgcaagtaaactggatacttgttcttttgtcagatttgttaaatgcatgcagaataatatttttaagagtattgattgaagtttgtgatattcatcaataaaaatgagttgataatatgcagaaactgaaaaaaaaaaaaaaaaaa

SEQ ID NO: 1723 - DNA, 1038 bp, HOMO SAPIENS
gacagagaaagcgcttcggcggctgcagctcgggcggcggccgcgggggacaaagggcgggcggatcggcggggagggggcggggcgcggccaggccaagcccgggggctccgcatgctgcagctgcccccgggcgcccccgccgccgccctcgccgcggagccgcgcggagcggagccggcgagctaacccgagccagccggcgggcgtcccggaggcggtggcgcagggaggggcccgacgctcgcacgtggccccggcggccgccatggcggacagcggcaccgcggggggcgcggcgttggcggccccggcccccgggccgggcagtggcggcccaggaccacgcgtctactttcagagcccccccggggccgcaggagagggcccgggcggggcggacgatgagggcccagtgaggcgccaagggaaggtcaccgtcaagtatgaccgcaaggagctacggaagcgcctcaacctagaggagtggatcctggagcagctcacgcgcctctacgactgccaggaagaggagatcccagaactggagattgacgtggatgagctcctggacatggagagtgacgatgcccgggctgccagggtcaaggagctgctggttgactgttacaaacccacagaggccttcatttctggcctgctggacaagatccggggcatgcagaagctgagcacaccccagaagaagtgacggtccccgacccaggagaacggtggctcccacaggacaatcgctgccccccaacctcgtagcaacagcaataccgggggaccctgcggccaggcctggtgccatgagcagggctcctcgtgcccctggcccaggggtctcttcccctgccccctcagttttccacttttggggttttttattgttattaaactgatgggactttttgtgtttttatattgactctgcggcgcgggccctttaataaagctaggatacgcctttggtgcagctaaaaaaaaaaaaaaaaaaaaaaaaaaaaaaaaaaaaaaaaaaaaaaaaaaaaa

SEQ ID NO: 1724 - DNA, 7852 bp, HOMO SAPIENS
ggcgctgagcgagctcggagcccgcgctgtgcgcctgcggccggggcgccccgccgagcgccggtgccccggctcccgggccgccttcgccgcgcgggaaggattcttcaaaattaacagaaaccaattcgggccagctgaagagaaaaaataaaggtggctcccggctgcctctgctgcagttcagagcaacttcaggagcttcccagccgagagcttcaggacgcctttcctgtcccactggcccagttgccacaacaaacaacagagaagacggtgaccatgggggatgtgaagctggttgcctcgtcacacatttccaaaacctccctcagtgtggatccctcaagagttgactccatgcccctgacagaggcccctgctttcattttgccccctcggaacctctgcatcaaagaaggagccaccgccaagttcgaagggcgggtccggggttacccagagccccaggtgacatggcacagaaacgggcaacccatcaccagcgggggccgcttcctgctggattgcggcatccgggggactttcagccttgtgattcatgctgtccatgaggaggacaggggaaagtatacctgtgaagccaccaatggcagtggtgctcgccaggtgacagtggagttgacagtagaaggaagttttgcgaagcagcttggtcagcctgttgtttccaaaaccttaggggatagattttcagctccagcagtggagacccgtcctagcatctggggggagtgcccaccaaagtttgctaccaagctgggccgagttgtggtcaaagaaggacagatgggacgattctcctgcaagatcactggccggccccaaccgcaggtcacctggctcaagggaaatgttccactgcagccgagtgcccgtgtgtctgtgtctgagaagaacggcatgcaggttctggaaatccatggagtcaaccaagatgacgtgggagtgtacacgtgcctggtggtgaacgggtcggggaaggcctcgatgtcagctgaactttccatccaaggtttggacagtgccaataggtcatttgtgagagaaacaaaagccaccaattcagatgtcaggaaagaggtgaccaatgtaatctcaaaggagtcgaagctggacagtctggaggctgcagccaaaagcaagaactgctccagcccccagagaggtggctccccaccctgggctgcaaacagccagcctcagcccccaagggagtccaagctggagtcatgcaaggactcgcccagaacggccccgcagaccccggtccttcagaagacttccagctccatcaccctgcaggccgcaagagttcagccggaaccaagagcaccaggcctgggggtcctatcaccttctggagaagagaggaagaggccagctcctccccgtccagccaccttccccaccaggcagcctggcctggggagccaagatgttgtgagcaaggctgctaacaggagaatccccatggagggccagagggattcagcattccccaaatttgagagcaagccccaaagccaggaggtcaaggaaaatcaaactgtcaagttcagatgtgaagtttccgggattccaaagcctgaagtggcctggttcctggaaggcacccccgtgaggagacaggaaggcagcattgaggtttatgaagatgctggctcccattacctctgcctgctgaaagcccggaccagggacagtgggacatacagctgcactgcttccaacgcccaaggccagctgtcctgtagctggaccctccaagtggaaaggcttgccgtgatggaggtggccccctccttctccagtgtcctgaaggactgcgctgttattgagggccaggattttgtgctgcagtgctccgtacgggggaccccagtgccccggatcacttggctgctgaatgggcagcccatccagtacgctcgctccacctgcgaggccggcgtggctgagctccacatccaggatgccctgccggaggaccatggcacctacacctgcctagctgagaatgccttggggcaggtgtcctgcagcgcctgggtcaccgtccatgaaaagaagagtagcaggaagagtgagtaccttctgcctgtggctcccagcaagcccactgcacccatcttcctgcagggcctctctgatctcaaagtcatggatggaagccaggtcactatgactgtccaagtgtcagggaatccaccccctgaagtcatctggctgcacaatgggaatgagatccaagagtcagaggacttccactttgaacagagaggaactcagcacagcctttgtatccaggaagtgttcccggaggacacgggcacgtacacctgcgaggcctggaacagcgctggagaggtccgcacccaggccgtgctcacggtacaagagcctcacgatggcacccagccctggttcatcagtaagcctcgctcagtgacagcctccctgggccagagtgtcctcatctcctgcgccatagctggtgacccctttcctaccgtgcactggctcagagatggcaaagccctctgcaaagacactggccacttcgaggtgcttcagaatgaggacgtgttcaccctggttctaaagaaggtgcagccctggcatgccggccagtatgagatcctgctcaagaaccgggttggcgaatgcagttgccaggtgtcactgatgctacagaacagctctgccagagcccttccacgggggagggagcctgccagctgcgaggacctctgtggtggaggagttggtgctgatggtggtggtagtgaccgctatgggtccctgaggcctggctggccagcaagagggcagggttggctagaggaggaagacggcgaggacgtgcgaggggtgctgaagaggcgcgtggagacgaggcagcacactgaggaggcgatccgccagcaggaggtggagcagctggacttccgagacctcctggggaagaaggtgagtacaaagaccctatcggaagacgacctgaaggagatcccagccgagcagatggatttccgtgccaacctgcagcggcaagtgaagccaaagactgtgtctgaggaagagaggaaggtgcacagcccccagcaggtcgattttcgctctgtcctggccaagaaggggacttccaagacccccgtgcctgagaaggtgccaccgccaaaacctgccaccccggattttcgctcagtgctgggtggcaagaagaaattaccagcagagaatggcagcagcagtgccgagaccctgaatgccaaggcagtggagagttccaagcccctgagcaatgcacagccttcagggcccttgaaacccgtgggcaacgccaagcctgctgagaccctgaagccaatgggcaacgccaagcctgccgagaccctgaagcccatgggcaatgccaagcctgatgagaacctgaaatccgctagcaaagaagaactcaagaaagacgttaagaatgatgtgaactgcaagagaggccatgcagggaccacagataatgaaaagagatcagagagccaggggacagccccagccttcaagcagaagctgcaagatgttcatgtggcagagggcaagaagctgctgctccagtgccaggtgtcttctgaccccccagccaccatcatctggacgctgaacggaaagaccctcaagaccaccaagttcatcatcctctcccaggaaggctcactctgctccgtctccatcgagaaggcactgcctgaggacagaggcttatacaagtgtgtagccaagaatgacgctggccaggcggagtgctcctgccaagtcaccgtggatgatgctccagccagtgagaacaccaaggccccagagatgaaatcccggaggcccaagagctctcttcctcccgtgctaggaactgagagtgatgcgactgtgaaaaagaaacctgcccccaagacacctccgaaggcagcaatgccccctcagatcatccagttccctgaggaccagaaggtacgcgcaggagagtcagtggagctgtttggcaaagtgacaggcactcagcccatcacctgtacctggatgaagttccgaaagcagatccaggaaagcgagcacatgaaggtggagaacagcgagaatggcagcaagctcaccatcctggccgcgcgccaggagcactgcggctgctacacactgctggtggagaacaagctgggcagcaggcaggcccaggtcaacctcactgtcgtggataagccagaccccccagctggcacaccttgtgcctctgacattcggagctcctcactgaccctgtcctggtatggctcctcatatgatgggggcagtgctgtacagtcctacagcatcgagatctgggactcagccaacaagacgtggaaggaactagccacatgccgcagcacctctttcaacgtccaggacctgctgcctgaccacgaatataagttccgtgtacgtgcaatcaacgtgtatggaaccagtgagccaagccaggagtctgaactcacaacggtaggagagaaacctgaagagccgaaggatgaagtggaggtgtcagatgatgatgagaaggagcccgaggttgattaccggacagtgacaatcaatactgaacaaaaagtatctgacttctacgacattgaggagagattaggatctgggaaatttggacaggtctttcgacttgtagaaaagaaaactcgaaaagtctgggcagggaagttcttcaaggcatattcagcaaaagagaaagagaatatccggcaggagattagcatcatgaactgcctccaccaccctaagctggtccagtgtgtggatgcctttgaagaaaaggccaacatcgtcatggtcctggagatcgtgtcaggaggggagctgtttgagcgcatcattgacgaggactttgagctgacggagcgtgagtgcatcaagtacatgcggcagatctcggagggagtggagtacatccacaagcagggcatcgtgcacctggacctcaagccggagaacatcatgtgtgtcaacaagacgggcaccaggatcaagctcatcgactttggtctggccaggaggctggagaatgcggggtctctgaaggtcctctttggcaccccagaatttgtggctcctgaagtgatcaactatgagcccatcggctacgccacagacatgtggagcatcggggtcatctgctacatcctagtcagtggcctttcccccttcatgggagacaacgataacgaaaccttggccaacgttacctcagccacctgggacttcgacgacgaggcattcgatgagatctccgacgatgccaaggatttcatcagcaatctgctgaagaaagatatgaaaaaccgcctggactgcacgcagtgccttcagcatccatggctaatgaaagataccaagaacatggaggccaagaaactctccaaggaccggatgaagaagtacatggcaagaaggaaatggcagaaaacgggcaatgctgtgagagccattggaagactgtcctctatggcaatgatctcagggctcagtggcaggaaatcctcaacagggtcaccaaccagcccgctcaatgcagaaaaactagaatctgaagaagatgtgtcccaagctttccttgaggctgttgctgaggaaaagcctcatgtaaaaccctatttctctaagaccattcgcgatttagaagttgtggagggaagtgctgctagatttgactgcaagattgaaggatacccagaccccgaggttgtctggttcaaagatgaccagtcaatcagggagtcccgccacttccagatagactacgatgaggacgggaactgctctttaattattagtgatgtttgcggggatgacgatgccaagtacacctgcaaggctgtcaacagtcttggagaagccacctgcacagcagagctcattgtggaaacgatggaggaaggtgaaggggaaggggaagaggaagaagagtgaaacaaagccagagaaaagcagtttctaagtcatattaaaaggactatttctctaaaactcaaaaaaaaaaaaaaaactcaagatagtaaaagcacctagtgtgatagattatcggttaggtcatttgtgggttgattcttcagaaacagcagttgatacctagcagcgttattgatgggcattaatctatgttagttggcaccttaagatactagtgcagctagatttcatttagggaaatcaccagtaacttgactgaccaattgattttagagagaaagtaaccaaaccaaatatttatctgggcaaagtcataaattctccacttgaatgcgctcatgaaaaataaggccaaaacaagagttctgggccacagctcagcccagagggttcctggggatgggaggcctctctctccccaccccctgactctagagaactgggttttctcccagtactccagcaattcatttctgaaagcagttgagccactttattccaaagtacactgcagatgttcaaactctccatttctctttccccttccacctgccagttttgctgactctcaacttgtcatgagtgtaagcattaaggacattatgcttcttcgattctgaagacaggtccctgctcatggatgactctggcttccttaggaaaatatttttcttccaaaatcagtaggaaatctaaacttatcccctctttgcagatgtctagcagcttcagacatttggttaagaacccatgggaaaaaaaaaatccttgctaatgtggtttcctttgtaaaccaggattcttatttgtgctgttatagaatatcagctctgaacgtgtggtaaagatttttgtgtttgaatataggagaaatcagtttgctgaaaagttagtcttaattatctattggccacgatgaaacagatttcaactgataaagagctggagaactccatgtactttggaatctcctccaagatagccagagtttaatacatcttcattctcaacactctccaaagaacttgacctaccttatgggttccatatttttcttcttaaatgtgcatcaatcatgccttgcccccaacctttaaatatattcttagacctggtaaatgcactcagacttgcgtctttaggaatttttaactttctttcactacattggcacttaaattttttctttataaagctttttgaaggtcataaacaaagaccataattgatgatagacctaatacatttcctctgtgtgtgtgtgtaacattccaaatactttttttttcttttccactgtttgtaaggtgcaacaatttaatatttttaagggactttttaagagttccttaagaaccaatttaaaattacttcagtgcaatcctacacagtatcaacattagaattttgatattagtcttatgttatcttccattctatttttatctgctttttgctgctagtttcaaactgccagtatttttccttttgcttttaaaatagttacaatatttttcatgatagccacagtattgccacagtttattataataaagggtttttatttgatttagcgcattcaaagcttttttctatcacttttgtgttcagaatataacctttgtgtgcgtgtatgttgtgtgtgtgcatgtgtggcgtatatgtgtgttacaggttaatgccttcttggaattgtgttaatgttctcttggtttattatgccatcagaatggtaaatgagaacactacaactgtagtcagctcacaatttttaaataaaggataccacagtgcatgctgtttgttcaaaaaaaaaaaaaaaaaa

SEQ ID NO: 1725 - DNA, 1290 bp, HOMO SAPIENS
gagtctagtctttgttcggggctgtccaaaggacgctagctgttgcacctgttcctccctgcgcgtaagatagaggataaatctcctggcaaagcccagaatgaccacagccctggaacctgaggaccaaaaaggacttctgataattaaggcagaggaccattactggggacaggattccagctcacaaaagtgcagtcctcacaggagggaactctatagacaacacttcaggaagctctgctatcaggatgcacctggaccccgtgaagctcttacccagctgtgggagctctgccgtcagtggctgaggccagaatgccacaccaaggagcagattttagacctgctggtgctagaacagttcctgagcattcttcctaaagacctgcaagcatgggtgcgtgcacaccatccagagactggagaggaggcagtgacggtactggaggatctggagagagagcttgatgaacctggaaagcaggtcccaggcaattcagaaagacgggacatactcatggacaagttggcccccttgggaaggccatatgaatcactgactgtccagctccatcccaaaaagacccagctggagcaggaagctgggaaaccacaaaggaatggtgataaaactaggactaagaatgaagagttgttccagaaggaagatatgcccaaagacaaggaattccttggggagataaatgacagactgaacaaagatactcctcagcatcctaagtccaaagatattattgaaaatgagggcagatcagaatggcaacagagggaaagaagacgatataaatgtgatgaatgtgggaaaagtttcagtcatagctcagaccttagtaaacacaggagaactcacacgggagagaagccctataaatgtgatgagtgtggaaaagccttcattcagcgctcacatctcattggacatcatagagtacacacgggagtaaaaccctataaatgtaaagaatgtgggaaagacttcagtgggcgcacaggtcttattcagcatcagagaatccacacaggtgaaaaaccctatgaatgtgatgagtgtggaaggcctttccgagtaagttcagctcttattagacatcaaagaattcataccgcaaataaactctactaatatagcagtaatatcaaaagttctttggacactcaggcctaactagttatcaaagaatctattttagaaaccttgagtttcctcaatgtggtcaaagcttcagtcatcattaaacttctctggaccaaaaaaaaaaaaaaaaa

SEQ ID NO: 1726 - DNA, 5170 bp, HOMO SAPIENS
gtttcctgtcgccgtcgttgcccgggccatggcgacctgcatttggctgcggagctgtggggcccggcgcctcgggtcgacgtttccaggctgccgcctccgcccccgcgccggcggcctggtccctgcctccgggcctgcgcccggcccggcccagctccgctgctacgctgggcgcctggcgggcctctctgcggcgctgctgcgcaccgacagcttcgtgggcggccgctggctcccggccgccgccaccttccccgtgcaagacccggccagcggcgccgctctgggcatggtagccgactgcggggtgcgagaggcccgcgccgccgtgcgcgctgcctacgaggctttctgccgctggagggaggtctccgccaaggagaggagttcattacttcggaagtggtacaatttaatgatacaaaataaggatgaccttgccagaataatcacagctgaaagtggaaagccactgaaggaggcacatggagaaattctctattccgcctttttcctagagtggttctctgaggaagcccgccgtgtttacggagacattatccacaccccggcaaaggacaggcgggccctggtcctcaagcagcccataggcgtggctgcagtcatcaccccgtggaatttccccagtgccatgatcacccggaaggtgggggccgccctggcagccggctgtactgtcgtggtgaagcctgccgaagacacgcccttctccgccctggccctggctgaggtaaatcagggatttcttcttgatttggatccattgttgcttgcaagccaggctgggattccttcaggtgtatacaatgttattccctgttctcgaaagaatgccaaggaagtaggggaggcaatttgtactgatcctctggtgtccaaaatttcctttactggttcaacaactacaggaaagatcctgttgcaccacgcagcaaactctgtgaaaagggtctctatggagctgggcggccttgctccatttatagtatttgacagtgccaacgtggaccaggctgtagcaggggccatggcatctaaatttaggaacactggacagacttgtgtttgctcaaaccaattcttggtgcaaaggggcatccatgatgcctttgtaaaagcattcgccgaggccatgaagaagaacctgcgcgtaggtaatggatttgaggaaggaactactcagggcccattaattaatgaaaaagcggtagaaaaggtggagaaacaggtgaatgatgccgtttctaaaggtgccaccgttgtgacaggtggaaaacgacaccaacttggaaaaaatttctttgagcctaccctgctgtgcaatgtcacccaggacatgctgtgcactcatgaagagactttcgggcctctggcaccagttatcaagttcgatacagaggaggaggctatagcaatcgctaacgcagctgatgttgggttagcaggttatttttactctcaagacccagcccagatctggagagtggcagagcagctggaagtgggcatggttggcgtcaacgaaggattaatttcctctgtggagtgcccttttggtggagtgaagcagtccggccttgggcgagaggggtccaagtatggcattgatgagtatctggaactcaagtatgtgtgttacgggggcttgtaggattctttggttctttaaaaaaatttaaaaggagacttatctacatatataggtacatgccatccattattttaaataaactaataggttttcagaattatgaatttttcagaactcatccagtccttgtaatcttaaacagatgcaaatcctacccctgcccttaatgtaactagggaccaatatgtgccacgtgcctgtggctgcagactcccagagaaccagcactgggtttacagaatgaggccctggctccccaccacagccccagctgcctcagagcaggcacagcacaaggcaggcccagccccatgggccgtcacaaaggcttgatcactgcctgggcagtggcacaaccatcccccatgtcgctacagaacatgggcccagagcaccttgaaggagacccttgactgtgactggcaggcaggtgaggggcacagcacccctccccggcatctgccagctcagcacagaagacaccgaatgtgcatctggaggtgttgcggcagaggtttgagtgaaccctctttcaaagacaataaatagcacagaattgtccgtgcttctgtgaggcacgaaggagcacctctccctattcctgaaccatattttaattgatgcctttattgtcccaaatttaccacttaaagaattctattttcatttctgtcctgtttgccacttcatttcatttccttgagtaaatgagctgaagtgtaaagcaaagaatagcagaagcagcttggtaggatggaaggcacgcagtggcatggcctggctccttccctgagtggccttgttgccttgggcgtgtgttcagcacctcccatcccatggatacagtggagattccatacaggccttacttagctccttgcgatactgtgagccagagagaaagtaaaagcacttcacaaaaaaatgaaaattctaaggacatacaagagccattgttacgagcagcaccgcccagcccttccttgcctactgtcagtggctttgccaagatgggaggaggccagtgcccacttgcccaccgacctgagcctgagtaagtggctgtcacctgagcctgttctttctgtcctggtgtggtgctgctccctcacctccaaaagagcaaaagtactttcaccacagtcaacccaaaagggaaagaatttctgtaattgccaacccactttgtagaagaggcatgagcccttgaatttcaggcaccttttatctaatgagagtttttacagctcatcattcaaataacgcacaaaaaacaaaagccgctatgaccggcgttgcctctcactttgaaagaaagactccgtaatcttaaacagatgcaaatccaattaggcggccaagtaggtggagacgaagcaccttcctttccccatctctgtctgtgtagactccacttacatcttgtggttattctgggttgtggaaggaaaatgtgaatgaaagtagtgctggatgcaattactcctgaaccccacctaggatttaacatccctcattgagccactgggaagctatggttgagtaactaaaggtctggcaagaccctgggcacacagggagctgcctagcatctggcctggagtgtactagccacattcccaaggtcccaaggagaaggaagagctgaaattcatctcctagtgacagtgccccggccctgtcaagaatcacatactcagcattttgacagttaatgtcttctctttatttgtgtagtttttaggtggttttatataacattttaattacttgtgatttagatgtatccatcctttttctattaagaatacaaatgctgggctgggcacagtggctcacgcctgtaatcccaacaccttgggaggccaaggcaggcagatcacgacatcaggagatcgagaccatcctggctaacacggtgaaaccccgtctctactaaaaatacaaaaaaaattagtcggatgtggtggcaggtgcctgtagtcccagctactctggaggctgaggcaggagaatggcgtgaacccaggaggcggagcttgcagtgagcagagatcacgccactgcactccagcctggatgacagagcgagactccgcctcaaaaaaagaatacaaatgctccaacattattttttataactctggattaccgatgctgagatgtgtgcaggaatacttccaaataaatttttaacattgtaagccagtagattctttggctgggtggcaaattttgagtcttcttgcatatttggctcatgggttcataaattgaggccagagactcattgtatatccttgatcaattttctaattaaaggaaatagcttattgtttagtaaaatggcccttggttgtgggaagaaagagaattatttttaactgaacgtttttgttgttttttaaataaagtagccatatgtaacgggattttaaaaatatatacattttacaacatggactagaaaaggaccattagatcaggggttggcaaactatggcccacgaatcaaacctggcctgccacctgtttttatacaacctgtgagctaagaatggtttatatgttttcaaatgattgggcagaaaatcaaaagaagaacaatatttcatgacacctgaaaattctatgaaattcagatttcagtgtccataaacaaaatgttattagagcatagccacacccattcatttatggtattgtctgggactgctttcttggcagagttgaatagttgggacagggacagtatagcctgcaaagcctaaaagatttactacttgtctccttaaagaaaaagtttgccagctcctgatctagaccaagagggagatattgaccttacttgcatttatccggcattatttcaacacctcctgtgaagaaagtacttttctggcatagctaccgtgagttctcagcaggaacttcccagcgatgataatgtacatgaaattagccacgtaacaagagtctatttgccttgaaaaaacaattatccttgaacttcctccagctatgcagggattctcattaaagagctgatctgcatctgtttatccattttagtagcttttaaatatgattttatgtgaagtgccatttctttattctactaaagagagacagcagaaataaagatcagaagcaaatgtgagcaaatctgttttactgttaacttcaattatgaacttgaaattgtgccacatgactttttcctctaaaaactggatcctagtgttttaattacctgtgtgcagctattttaaatagcattttacttgaataatatgtatgttgtcattgtttcatgctatactttgtgggataaaacttgggaatgagtgtggtaagaaatttataaagttttgcttttaaaacgtggacataactcatttttctagtttttgacaattgtgtgttttagtgtctagtctgcagagagctgtgtgattaataaacgtggaattaacagaatttcctctccctgta

SEQ ID NO: 1727 - DNA, 5958 bp, HOMO SAPIENS
gggaggcggtcccgggatttcaggggtctaccggctctcttatggcgaatgcaacccgaagagagagtgagctgtatcttcagagttgtctccgtctttccaagaacagaacaaaatgaacaaggtagatcagaagttccaggggtcagtatcatttaaagatgtgactgtgggcttcacccaggaggagtggcagcacctggaccctagtcagagggctctgtatagagatgtgatgctggagaactacagcaaccttgtctcagtggggtattgtgctcacaaaccagaggtgatcttcaggctggaacaaggagaagaaccatggagactggaggaagaattcccaagccagagctttccagaagtctggacagctgatcacctgaaagagaggagccaagaaaatcaatctaaacatttgtgggaagttgtattcatcaataatgaaatgctgactaaggaacaaggtaatgtaataggaataccatttaacatggacgtaagttcttttccttccagaaaaatgttctgtcagtatgactcacgtggaatgagtttcaacactgtttcagaattggttatcagtaagataaactatttaggaaaaaagtctgacgaatttaatgcatgtgggaaattgttactcaatattaagcatgatgaaactcatactcgagagaaaaatgaagttttgaaaaataggaacactctgagtcatcgtgagaacactttgcagcatgagaagattcaaactttagaccacaattttgaatacagtatatgtcaggaaaccctccttgaaaaggcagtattcaatacacggaagagagagaatgcagaagagaataactgtgactataatgaatttgggagaactttctgtgatagttcatccctcttgttccatcagatacctccatcaaaggacagtcactatgaatttagtgattgtgagaagttcttatgtgtgaagtccaccctttctaaacatgatggggtacctgtgaaacactatgattgtggtgaaagtgggaataatttcaggaggaaattgtgtctgtcacagcttcagaaaggtgataaaggagagaaacactttgaatgtaatgaatgtgggaaagctttctgggagaagtcacatctcactcgacatcagagggtgcacacaggagagaaacactttcaatgtaatcaatgtggaaaaactttctgggagaagtcaaacctcactaaacatcagagatcacacacaggggagaaaccttttgaatgcaatgaatgtgggaaagcctttagccataagtcagccctcacattacaccagagaacacatacaggggagaaaccctatcagtgtaatgcatgtgggaaaactttttaccagaaatctgacctcactaaacatcagagaacacacacagggcagaaaccctatgaatgttatgaatgtggaaaatccttctgtatgaattcacaccttacagtacaccagagaactcacacaggtgagaaaccttttgaatgtcttgagtgtgggaaatccttttgtcaaaagtcacatcttacacagcatcagagaactcacataggagataaaccttatgaatgtaatgcatgtgggaaaactttctaccacaagtcagtactcaccaggcatcagataattcatacagggttgaaaccttatgaatgttatgaatgtgggaaaaccttctgcttgaagtcagacctcacaatacatcagagaacgcacacaggggagaaaccctttgcatgtcctgaatgtgggaaattctttagccataagtcaaccctctctcaacattatagaacacacacgggggagaaaccctatgaatgtcatgaatgtggaaaaatcttttacaataaatcatacctaacaaaacataatagaacacatacaggggagaaaccctatgaatgtaatgaatgtggaaaaaccttctgccagaagtcacaactcactcagcatcagagaattcacataggggagaaaccctatgaatgtaatgagtgtggaaaagctttctgccataagtcagctctaattgtacatcagagaacccatacacaagaaaagccttataaatgtaacgaatgtggaaaatctttctgtgtgaagtcaggacttattttacatgagagaaagcacacgggggagaaaccctatgaatgcaatgaatgtgggaaatccttcagtcacaaatcatcactcacagtacatcacagggctcacacaggagagaaatcttgtcagtgtaatgaatgtggaaaaatcttttaccgtaaatcagaccttgctaaacatcagagatcacatacaggggaaaagccctatgaatgtaacacatgcaggaaaaccttctctcaaaagtcaaatctcattgtacatcagagaacacacataggagaaaaaccttatgaatgaattggatattagaaatttccagccacaagtcagcctccataatgcctcagagtcttcacactgtggagaagggcctgttgacatcctgaatgttcaataactatccacaaactcgccttatgttactccaaagtaacagtaggggataaacccatagactacaacaactataggatggcttttgttaggaagtgatattctgttgaatatcagatggttaatactggcataaaacctcacagatttttttgaatttgtgaaagtttttggcaaaactacaaataggattatgttagcatttacactgaggagaaaattgtcaatttaagaaatctaaagtgaaaattttgcttagaaataaaatatgacaagttctgttttgagtttgatgccataatagtttttaaggtatctaacaataatttatagatgtacattgtggaatgtaaagctttaagaattttttaagaagtaataattaaaataacctcacaagaagttgtaatgagtacagagaattcccgtgtacccttcaccaagcttcctctaaggataatatataatcatagtatatggtcaagtccaagaaatcgatgttaccttgctagtagatgcagacttactcagattttgctatggtttgcgtgcactctgtgtgtgtacgtgtatgtgtgtgtgtgtggttataacaaactggtacttttacatttgagtaaccatcaacacaattagtttacagaatggaaaaggagtctgagatctgtactgtttcaggattacaaaggaatcaggatttagcctcaagtagttcccttgttgtattaataaccacaccctttctgcatccctgtccctggcatccacttgactatgaagctttttgtaaagcatagataaattgaataatcagggcaacagcattaagcacatctgtgaattatccctgaagttcataggacttacatatgtacaagtggtatgtgatataaatcgtgtgtttcatatgcataatggtatttaacgtaattgtgaataggaagtaggtatcctaatttagtagtggttacttcatcaggcccatcccaggtgtttgtcgtgtcctgaaacaatttaaatagagacccacagagctaatgtttatccatttaaaagttataaatcaaaataacagattatctgaaaaaaaatctatcctgtacgtgtgaagatctaggcctgcctccatgttactccctttctcttactacctgtggctcatcccatgccatgaactgcctggggtacatatgtgaacactccagccttcagcgtaagtgatagtccaaattttctttaagcagctgctctccaagacagggccctggaaagaggcccacacatacagcccagttgctgcccagggctgttggactgtcatttcattgctcattgtacccagacagggatctgggccttcagagacttttgagaatatgaagaggagggttgaggctggagaagagccagaatcaagctggcatggggcttttattgacagtgtgaagattgtacactacattacatgatcagatcatacaaataatctaagattttacagtctggtgaccctagattacacaagtaatctaagcttccactttggaaaactagaaaaagaagagcaaattaaatccaaagtaacctggaaaaaaattagagtaaaaatcagtgaaattgaaaagagaaaatcaataaaacccaaaactgttctttgaaaaggtgggtaaaattgataaacctctagctagattaagaaaaaacagaagacaaatactgctaataccaaaagtgaaagaggccatcatagctgatcctatggtcaccaaaaggattagaaagaaatatggacaactctgtccataaatttgataacttagctaaaatggatcaattccttgcaagatgcattctctcaaagctcataaaaggtagatctcagtaggcatatatatctattaaataaattgaagcagtaattaataaccttccaagaccaggcgcggtggctaaaaatacaaaaagttagccgggcgtggtggcatgcgtgtatagtccaagctactcaggaggctgaggcagaagaatcacttgaacctgggaggtggaggttgcagtgagccaagattgtgccactgtactccagcctgggtgacagagtgagactccatctcaataaaattaataataataaaaccttccaaaaaaagtgccgggaccaaatggattcactgatgtgcatttttcgagatacttaaggtagaaatgataccaagtctgtactgtctctttcagaaaataaaagcagggataacacttcccaaatcattttgtgaggccaggattaccctaataccaaagccaggcaaaaacattacaagaaaggaaaactacagatcaatatttccagtgaacacagatgcagaaatccttaaaatgttagcaaatcaggaatgcaagccttgttcaacatttgatattcagtgcaatccattgcatgcattagcagttcaaagattaaatatgatcatatcaataggtacagaaaaagcatttgacaaaatccaatatccattcatgataaaacctctcaacacagaaggaatacaggagaacttactcaatttgataaagaactactacaaaaaaccctacatctagcatcatccttgatgtttccaactaaatgctttcctactaagatcaggaacatggcaaggaacaccactgcttttcagcattgtactggaagtgctatctaatgcagtgataccaaaaaaaaaggaaataaaatgcacataaatttggaaggaggaaatacaactgtctttgttctcaaataacatgattgtctttgtagaaaattctaaataacaaaaacctgctgacattaataagcaattatagcagggttgtagaatgtagtcctcaggtatatgataaaaaagaattagacatcaagtcattaaaagacatataggaaccctaaatgcttattgttaagtgaaaaccaatctgaaaaggctttctatgttgtatgattgcaattatatgacattctgggagaggcaaaactatcgagcgagtcaaaggaccagtggttgctgagagttgaggggaaaggagggatggcaggtaggtgatttttaggacagtgaaagtactctgtagggtactgtaatttgtcaaaatgcagagaatggaaaacagtgaacggaaaacacagagtaaaccctagtgtcaactctggacttcagttaataacagtgtaccactattggctcatcaattgtaacaaatgaaccataatgatgcaagatgttaataattggggagcctgtggaggatgggagggttaaaggtttatatgagaattctctgtactttttgctcaatttttctgtaaccctaaagctgctctaaaaaatgaagtgtattaagtaaataaataagtaaataaccaaccaacc

SEQ ID NO: 1728 - DNA, 403 bp, HOMO SAPIENS
  misc_feature (152)..(152): n is a, c, g, or t
cactaattccgttgatgagggccctatgctcatgactttgtctaaacctaattaattctcaaaggcctcacttcccaatactgtcacattgtggggtagggctttaacatatgaaatttgagggaaaaggaatgttcagtctagaacaaagnccccatacatttcaaaaagctgtgggacaggagggaatggggatggtattcaatggtaccacatccaagcaagtcttgtatggttaaaacaaatcaatataataacatgaaattttacacagaaacctatctgattataaactgtatgcttaccataatcaacactgatgtacattgttttaaaaatacttaatagtgttctttgtttaaccaaacaatagaggtattaactagtttcctagtgctgccaa

SEQ ID NO: 1729 - DNA, 3108 bp, HOMO SAPIENS
acgtgcagggctgtccttggagggccagcacagccccttccaagtgggcaagacccaggggtggctcaaaagatagctgtgccctagccctggaacctctgaatgttgatttttgtagcaaaaaaggacttgcagatgtgagtaaaggctgttgagataaggacatcctccctgctctctgggaggaccccaaatgcaggtgcacagatcttaagaagaagaggcagagactggggtgatgcagccacaactaaggaaagccaaggattgctggcagcctgcagaaactggagggcaaggagcatcccccaaccgcccggagcctccaggaggcgcaaggtcctactgactccctgacttcagacgtccagtctccggaattttgagaggatccatttctgttattttaagcaaccaaacttgtggtagtttcaccagtctcaggaaatgaatacgaatggaaagtcaaagattccaagaaatgagtggcggggtgcggtggctcacacttgtaatcccagcatttgcgggaagattgcttgggctcaggacttggagaccttgtgtctgtgagaaacttaaaaaataggctgggtgcgatggctcacgcctgtaatcccagcactttgggaggccgaggcaggcggatcacaaggtcacgagtttgagaccagtgtgaccaacatggtgaaaccctgtctctactaaaaatacaaaaattagccgggtgtggtggtgcgtgcctgtaatcccagctactcgggaggctgaggcagaagaattgcttgaacccaggaagcagaggttgcagtgagccgagatagtattactgcactccaggctgggcagcagagcaagattccgcctcaaaaaaaaaaaaaaaaaaaaaaaaaaaaaaaaaaactgagcatggtagcatgcacctgtggtcctggctacgccggaggattgcctgaagccaggagttcaagaccagtctggacaaaagagcaagaccccatctctaccaaaaaaatttaaaaattagccaggcatggtgccgtacccatagtcttagctactcaggaggctgaggagggaggattatctgagccctggcggttgaggctataatgagccatgattgtgccactgcactccagccttggcaacacagtgtgagaccctgtctcaaaaacaataaaaacccaaaacaaaagaaccaagaaattactggacctgaggcctggcctttagctgctgccctgcccttgtgacctggtcactcgggatcccctgggcctaaacacacagcctattgtctacctcaagaaggctccccactgcttggctggcaattggggtgggctttgcaggccccacctgtcctggccccacggcgctggtgctgcaggcccccaccactgcttgttccgagctccccagcctcctgcagagttgcctgcacctgatggcgatgaatcaggaaggcaggcgtgtcctgggccacagagcagtcatggctgtcagccaccagggggctccatttgcaactttggatgtggctttggcctctttgtccaaagtgaccttggggcccccagacaagagacagggagactggagcccagccccaccctcccgcacatacctggcccatccctgccctatcctggaagatgggggccaccacacgtgcaagggacacgggataggaacctttggccttgttatcagacattttaaaactaagtgcaaacgtgattatcaggtgcagtttttacagcagcaagaaacctgtgcttacagaaagaaacacgtgctagcaacccacctatgcggaaagccacacagagccattgttttctgcactctcaggtgacggctcacatttgccccagggaaggtcacagctgcctgaacttttaaaactcccagacacgcactgcctgtgcaggatccggagcccagcagcactgccagggccttgaagtgcttcttcagagacctttcttcatagactacttttttttctttaagcagcaaaaggagaaaattgtcatcaaaggatattccagattcttgacagcattctcgtcatctctgaggacatcaccatcatctcaggatgaggggcatgaagctgctgggggcgctgctggcactggcggccctactgcagggggccgtgtccctgaagatcgcagccttcaacatccagacatttggggagaccaagatgtccaatgccaccctcgtcagctacattgtgcagatcctgagccgctatgacatcgccctggtccaggaggtcagagacagccacctgactgccgtggggaagctgctggacaacctcaatcaggatgcaccagacacctatcactacgtggtcagtgagccactgggacggaacagctataaggagcgctacctgttcgtgtacaggcctgaccaggtgtctgcggtggacagctactactacgatgatggctgcgagccctgcgggaacgacaccttcaaccgagagccagccattgtcaggttcttctcccggttcacagaggtcagggagtttgccattgttcccctgcatgcggccccgggggacgcagtagccgagatcgacgctctctatgacgtctacctggatgtccaagagaaatggggcttggaggacgtcatgttgatgggcgacttcaatgcgggctgcagctatgtgagaccctcccagtggtcatccatccgcctgtggacaagccccaccttccagtggctgatccccgacagcgctgacaccacagctacacccacgcactgtgcctatgacaggatcgtggttgcagggatgctgctccgaggcgccgttgttcccgactcggctcttccctttaacttccaggctgcctatggcctgagtgaccaactggcccaagccatcagtgaccactatccagtggaggtgatgctgaagtgagcagcccctccccacaccagttgaactgcaggaagagaggacccatcctgccacaggacccagaaaaaaagcccaacacacactcgggttaagaaatacctttaaatttaggtaaataaagctcaaggaggtggggctgtcaaaaaaaaaaa

SEQ ID NO: 1730 - DNA, 516 bp, HOMO SAPIENS
  misc_feature (43)..(43): n is a, c, g, or t
ttttcaccatcttccattttcttcaacacaccagtcagagtcntttttaaagacattttaaacacctcagtggcctgtagatcttatcttctgttttttgtttctttttaatcttagttttttggcacacttggagggttttgattgaatgctagacatagtattcaggaaggcagagaggatttttttttaagtcagattttttgaggtataatttaatacagtaaaattcacctattttagttcagttctaagagtttcctctgtgacttttcctttggcccatggtttatttaaaattgtgttcttttacttccaaattatttgggatttttctagatatctttctgttcttgatttctggcttacctctatcagggtcagagaacaaacttaatatgatttcaattattttaaatttgccaatgtttattttatggcccagaatatggtctatgttggtgaaagttcaatttgaacttgaaaagaatatgttttatgctgttgtctactgaa

SEQ ID NO: 1731 - DNA, 2285 bp, HOMO SAPIENS
cccgctcgtctggcccgcccccctcgccctcgcaggcggtccgcgccactgcctctcagtccctgtcctgcgcccgcgcgccccgggagcctacccagcacgcgctccgcgcccactggttccctccagccgccgccgtccagccgagtccccactccggagtcgccgctgccgcggggacatggtcctctgcgttcaggggtgagcacccccttgtaagctcagggctactgttgggtgtcagggaacaaagttttagactgctgcgctccaaagcgggcacacacatgtacctagaacacaccagccactgtccccaccatgatgatgacacagccatggacacacccctgcccagacctcgtcctttgctggctgtggagcggactgggcagcggcccctgtgggccccgtccctggaactgcccaagccagtcatgcagcccttgcctgctggggccttcctcgaggaggtggcagagggtaccccagcccagacagagagtgagccaaaggtgctggacccagaggaggatctgctgtgcatagccaagaccttctcctaccttcgggaatctggctggtattggggttccattacggccagcgaggcccgacaacacctgcagaagatgccagaaggcacgttcttagtacgtgacagcacgcaccccagctacctgttcacgctgtcagtgaaaaccactcgtggccccaccaatgtacgcattgagtatgccgactccagcttccgtctggactccaactgcttgtccaggccacgcatcctggcctttccggatgtggtcagccttgtgcagcactatgtggcctcctgcactgctgatacccgaagcgacagccccgatcctgctcccaccccggccctgcctatgcctaaggaggatgcgcctagtgacccagcactgcctgctcctccaccagccactgctgtacacctaaaactggtgcagccctttgtacgcagaagcagtgcccgcagcctgcaacacctgtgccgccttgtcatcaaccgtctggtggccgacgtggactgcctgccactgccccggcgcatggccgactacctccgacagtaccccttccagctctgactgtacggggcaatctgcccaccctcacccagtcgcaccctggaggggacatcagccccagctggacttgggcccccactgtccctcctccaggcatcctggtgcctgcatacctctggcagctggcccaggaagagccagcaagagcaaggcatgggagaggggaggtgtcacacaacttggaggtaaatgcccccaggccgcatgtggcttcattatactgagccatgtgtcagaggatggggagacaggcaggaccttgtctcacctgtgggctgggcccagacctccactcgcttgcctgccctggccacctgaactgtatgggcactctcagccctggtttttcaatccccagggtcgggtaggacccctactggcagccagcctctgtttctgggaggatgacatgcagaggaactgagatcgacagtgactagtgaccccttgttgaggggtaagccaggctaggggactgcacaattatacactatttatttatttattctccttggggttggtgtcaggggcgagccaaccccacctctatgccctgagccctggtagtccagagaccccaactctgccctggcttctctggttcttccctgtggaaagcccatcctgagacatcttgctggaaccaaggcaatcctggatgtcctggtactgacccacccgtctgtgaatgtgtccactctcttctgcccccagccatatttggggaggatggacaactacaataggtaagaaaatgcagccggagcctcagtccccagcagagcctgtgtctcaccccctcacaggacagagctgtatctgcatagagctggtctcactgtggcgcaggccccggggggagtgcctgtgctgtcaggaagagggggtgctggtttgagggccgccactgcagttctgctaggtctgcttcctgcccaggaaggtgcctgcacatgagaggagagaaatacacgtctgataagacttcatgaaataataattatagcaaagaacagtttggtggtcttttctcttccactgatttttctgtaatgacattatacctttattacctctttattttattacctctataataaaatgatacctttcatgtacagagccctcaatggggccgattttcagttgtgtaaaaaaaaaaaaaaaaaa

SEQ ID NO: 1732 - DNA, 3036 bp, HOMO SAPIENS
gggggagcccctgcaagtttcccgggccgcgcgccgcgctcgctcgcctcccagcccgcggcccgagccgccgccgcgcccgccatgccctcggccaaacaaaggggctccaagggcggccacggcgccgcgagcccctcggagaagggtgcccacccgtcgggcggcgcggatgacgtggcgaagaagccgccgccggcgccgcagcagccgccgccgccgcccgcgccgcacccgcagcagcacccgcagcagcacccgcagaaccaggcgcacggcaagggcggccaccgcggcggcggcggcggcggcggcaagtcctcctcctcctcctccgcctccgccgccgctgccgccgccgccgcctcgtcctcggcgtcctgctcgcgcaggctcggcagggcgctcaactttctcttctacctcgccctggtggcggcggccgctttctcgggctggtgcgtccaccacgtcctggaggaggtccagcaggtccggcgcagccaccaggacttctcccggcagagggaggagctgggccagggcttgcagggcgtcgagcagaaggtgcagtctttgcaagccacatttggaacttttgagtccatcttgagaagctcccaacataaacaagacctcacagagaaagctgtgaagcaaggggagagtgaggtcagccggatcagcgaagtgctgcagaaactccagaatgagattctcaaagacctctcggatgggatccatgtggtgaaggacgcccgggagcgggacttcacgtccctggagaacacggtggaggagcggctgacggagctcaccaaatccatcaacgacaacatcgccatcttcacagaagtccagaagaggagccagaaggagatcaatgacatgaaggcaaaggttgcctccctggaagaatctgaggggaacaagcaggatttgaaagccttaaaggaagctgtgaaggagatacagacctcagccaagtccagagagtgggacatggaggccctgagaagtacccttcagactatggagtctgacatctacaccgaggtccgcgagctggtgagcctcaagcaggagcagcaggctttcaaggaggcggccgacacggagcggctcgccctgcaggccctcacggagaagcttctcaggtctgaggagtccgtctcccgcctcccggaggagatccggagactggaggaagagctccgccagctgaagtccgattcccacgggccgaaggaggacggaggcttcagacactcggaagcctttgaggcactccagcaaaagagtcagggactggactccaggctccagcacgtggaggatggggtgctctccatgcaggtggcttctgcgcgccagaccgagagcctggagtccctcctgtccaagagccaggagcacgagcagcgcctggccgccctgcaggggcgcctggaaggcctcgggtcctcagaggcagaccaggatggcctggccagcacggtgaggagcctgggcgagacccagctggtgctctacggtgacgtggaggagctgaagaggagtgtgggcgagctccccagcaccgtggaatcactccagaaggtgcaggagcaggtgcacacgctgctcagtcaggaccaagcccaggccgcccgtctgcctcctcaggacttcctggacagactttcttctctagacaacctgaaagcctcagtcagccaagtggaggcggacttgaaaatgctcaggactgctgtggacagtttggttgcatactcggtcaaaatagaaaccaacgagaacaatctggaatcagccaagggtttactagatgacctgaggaatgatctggataggttgtttgtgaaagtggagaagattcacgaaaaggtctaaatgaattgcgtgtgcagggcgcggatttaaagtccaatttctcatgaccaaaaaatgtgtggttttttcccatgtgtcccctaccccccaatttcttgtcccctcttaaagagcagttgtcaccacctgaacaccaaggcattgtattttcatgcccagttaacttatttacaatatttaagttctctgcttctgcatttggttggtttcctgaagcgcagcccctgtgaataacaggtggcttttcatggatgtctctagtcagagaaaaatgataaaggcttaaattgaggattaacagaagcagattaacctcagaaatcctgtctggctggcagatttcaagtaaaaaaaaaaaaaaggtgggttggggggacccttttctttctagttgtctttaaggaaaattaattttacttttttttttgttctggccgaaatttttatgagatatctctcacttgtcttccactttgaaccggttaaagctcatagctgtcagctctgaatgaggaggggagaagcccctgggtctttctttgaaaggaatccgctgcttgagggctgcctccctcatggtgtgcgtgtcgtttctcttcctgacgcatcttgtgatatcagaggtaactatgcaaagcatccaggcggttctgaatgtgaagcactacacccagcagagtcccggtgccctctgtccccactgccggcccatgttctctctccggaggtcaccaaggaatgcacaggtttcgactaccagaaaggggagtccttgggttctttcaaaaaattcgtgaggagagctgtctacagtggaatagggggtctccctggggaatgcaggccaagtccttttattttaacatgatgtccatgaagaggtttgccgtctgggcagccctgtcggcaaggagcgtgcatactgcgtttgtgtaattgtttgctgtatctcccttccctctgagctgtattgttctttaatggctgtcttgcccttccaaaaaaaattgaaaaaaaaaaaaaaaaaaaaacccgaaaagtaaaaaaaaaaaaaaaaagttttgtttagtttactgtgaaatgaactgtatggcttatttacagtatttttaattcttaataaacacttgagctttgttatga

SEQ ID NO: 1733 - DNA, 552 bp, HOMO SAPIENS
tgtttagtcagcttgtctattttcttctttttcttgaaaattattttccactgagtttaattttttgtaaaagttacacagcattctcttgtcattctttatatctccctttttgtagttatgttccttaatttctgtaactttctgaaaccagggttaatttgttttgaaattgtccaacgtgtgctttgaaaaaaagaagggatgttttctgtgtcaaatgaaggtaatcatagatcaaatttgcttattgtcttgttcaaatcctagaaaaccattagcatttttctttgcttgtaatatgagaatctaacactcatacagaatattgaaaggttaccctacaattgtaaatttgaaattctccttctaattctgtcagttatttattgacatagtagtggttctgtagtcaagtgcatataaggttttgaatgttacatcttatttttggatttttattttatcattatggagtatagcaaagttctattttgttctttttcaaatgtacttggttttgattatcccttggtccttgattgttttatt

SEQ ID NO: 1734 - DNA, 8643 bp, HOMO SAPIENS
tggggctcgagggggcgagcggtggcggtggcgggtacggcaggctcgcgggcgccgggcttcgttacataatctcggaccggaggagcggcggcacatggcggcggagcggcgctgtggaagtatgcgagacttaagagctcaagtgactagtggtctcctgccatttccagaagtgactcttcaagcccttggagaagacgaaataacattagaatctgtgcttcgtggaaagtttgctgcagggaaaaatggacttgcttgcttggcttgtggtccacaacttgaggtagtaaactctataacaggagagcgattgtctgcttacagattcagtggagtcaatgaacagcctcctgtagttttagctgtgaaagaattctcttggcagaagagaactggattattaataggattggaagaaacagaagggagtgttctctgtctttatgaccttggaatatcaaaagtagttaaagcagttgttcttcctggaagggtaacagctattgaacctataattaatcatggaggagccagtgcaagcactcagcatttacatccaagtctgcgatggctttttggagtggcagctgtggtcactgatgttggacagatccttcttgttgacctatgtttggatgacttgtcatgcaatcaaaatgaagttgaagcatcagatcttgaagttctaactggtatcccagctgaagtaccacacattagagaaagtgtaatgagacaagggcgccatctgtgtttccagttagtaagtccaacaggaacagctgtttcaactcttagttacataagcaggacaaatcagcttgctgtaggtttttctgatggctatctagcactttggaacatgaaaagcatgaaaagagaatattacatacaattggaaagtggacaagttcctgtatatgctgtcacttttcaagaacctgagaatgatcctcggaattgctgttacttgtgggctgttcagtctacacaagatagtgaaggggatgttttgagtttgcatctgctgcagctggcctttggtaatagaaagtgtttggcatcaggacaaatcttatatgaggggttagaatactgtgaagaaagatacaccctggacctgacaggtggcatgttccctttgaggggacagacgagtaataccaaattgttgggatgccagagtatagagaaatttcgatctcatggtgacagggaggaaggcgtgaatgaagctctatcgcctgacactagtgtttcagtctttacctggcaggtgaatatatatggacagggaaagccttctgtatatttggggctttttgatataaatcgttggtatcatgcacaaatgccagattcgttaaggtcaggagaatatctacataattgctcttattttgcactgtggtcattggagtctgttgtaagtaggacttctccacatggcatcttggatatattagtacatgagagaagtttaaatagaggagtccctccttcatatccacctcccgagcagttttttaatccaagcacttataattttgatgccacttgtttgttaaactcgggagttgttcatttaacttgtactggctttcagaaggagactttgacttttttaaagaaatcaggtccatcactcaatgaactcattcctgatggttataatcgatgtcttgtagctggccttctttccccaagatttgttgatgttcagccttccagtttaagccaagaagaacagttagaagctatattgtcagcagcaattcagactagttccctgggacttttgactggttatatccgaagatggataacagaagaacaaccaaattctgccactaatttgcgctttgttcttgaatggacgtggaataaagtggttctcacaaaagaggaatttgacagactatgtgtgccattatttgatggttcgtgtcatttcatggatccacaaactatacagtctatccagcaatgctatttgcttcttagcaatcttaatatagtcttgagctgttttgcatcagaagcccgagagatcactgagagaggactgatagacttaagcaataagtttgtggtttcccacctcatctgtcagtatgcacaagtggttctttggttctctcattctgggcttttaccagaaggcatagatgattctgtgcagttgtcaaggttatgctacaactaccctgtaattcagaactactacaccagtcgtcgacagaagtttgagcgtttatcaagagggaagtggaatcccgattgcttgatgattgatggactggtttctcagttaggagagcgaattgagaagttgtggaaacgagatgaaggaggcacaggaaaatatcctcctgctagtctgcatgcagtacttgatatgtacctattagacggcgttactgaagcagccaaacactctattaccatttatttgctacttgatattatgtattcctttcccaacaaaacagacactcccattgaatctttcccaactgtatttgccatttcttggggccaagttaaacttattcaggggttttggttgatagatcataatgactatgagagtggtttggatcttttgtttcatccagctactgcaaaacctttgtcatggcaacattcaaagattattcaggcattcatgagtcagggcgagcacagacaagccctcagatatattcagacaatgaagccaacagtgtccagtggtaacgatgttatccttcacctcactgttttgctttttaataggtgtatggttgaagcctggaattttttgcggcaacattgcaataggttgaatatagaggagttactgaagcacatgtatgaagtctgtcaggaaatgggcttgatggaagatttactgaagttaccatttacagacactgagcaggaatgtttagtgaaatttttgcagtccagtgccagcgttcagaatcatgaattccttttagtgcaccatttgcagcgtgccaattatgtgcctgccttgaagctgaaccaaactctgaagattaatgttatgaatgatcgtgatcctcgtttgcgggagagatcactggctcgaaattctatattagaccagtatggaaaaatccttcctagagtccatcgaaaattagccattgaacgagctaagccttatcatctgtcaacatcatcagtttttcgattagtttctagacccaaaccattatcagcagttccaaagcaagttgtaacaggaactgtgttgacaagatctgttttcatcaacaatgtgttatctaaaattggagaagtttgggcaagcaaagaacctataaatagcaccacacctttcaatagttctaaaatagaagaaccatctcctatagtgtattcgctcccagctccagagctgcctgaggcattttttggaacaccaatttcaaaagcatcacaaaaaatttctagactgctagatttggttgttcagcctgtcccccggccttctcagtgttcggagtttattcagcaaagctccatgaaatctcctttgtacctagtatcccgttcactgccctcaagttcgcaattaaaaggatcgcctcaggccatctccagggcttcagaattacatttgcttgaaactcctcttgtagttaagaaagctaaaagtttggccatgtcagttactacttctggattttctgagttcactcctcagtccatcctgaggtctactcttcgatcaacacctttagcatctccctctccatcacctggaaggtctcctcaacgacttaaagaaactagaatttcatttgtggaagaagatgtccacccaaaatggattcctggggctgcagatgatagcaaattagaagtatttactacacctaaaaaatgtgcagttccagtggaaactgaatggctgaagagcaaagataggaccacatcttttttcctgaacagccctgaaaaggagcatcaagaaatggatgaggggtcacaaagtttagagaaactggatgtgagcaaaggaaacagcagtgtttcaatcacatccgatgagactaccttagagtatcaggatgcaccgtcaccggaagaccttgaagagactgttttcacggcctctaagcccaaaagctcttccactgcactaactactaatgtaactgaacaaactgaaaaggatggagataaagatgtatttgcatcagaagtaactccttcagacctacagaaacaaatgggcaatttagaagatgcagaaacaaaggatctcttagttgcagcagaggcattttcagaattgaatcacttaagcccggttcaaggaactgaagcttctctttgtgcaccatcagtctatgaagggaaaatcttcacccagaagtccaaggtaccagtgttggacgaaggattaacatctgttgaaacctacacccctgcaattagagcaaatgacaataaatctatggctgatgtccttggtgatggtggaaactcctcgctcactatctctgaaggtcctattgtctctgagcgcaggcttaaccaggaagtagcgctgaacttaaaagaagatcatgaagtagaagttggtgtactaaaagaaagtgttgacttaccagaagaaaagcttccaatttctgacagccctcctgatactcaagaaattcatgtgattgaacaagaaaagcttgaagctcaagattcaggagaagaggctaggaatctttcatttaatgagttatatccctctggaacacttaagcttcagtacaattttgatactattgaccaacagttttgtgacttagctgataacaaagacactgctgaatgtgacattgctgaagtagatggggaactttttgtggctcaaagcaactttaccttgatattggaaggtgaagaaggagaagttgagccaggtgattttgcatcatctgatgtgttacctaaagcagctaacacagcaactgaagaaaaacttgtatgcagtggggaaaatgataatcatggacaaattgcaaatttgccatctgccgtaactagtgaccaaaagtcccaaaaagtagacactttaccatatgtgcctgaacctattaaagtagcaattgcagaaaatttactagatgtaattaaagacacaagaagtaaagaaattacttcagatacaatggaacagtccattcatgaaacaatacctttagtgagccaaaacataatgtgtcccactaaattggtcaaatctgcatttaagactgctcaggaaacaagcacaatgactatgaatgtcagccaggttgatgacgtggtttcctccaaaactcgtacgagaggtcaacgtatccaaaacgtgaatgtcaaatcagcacaacaggaagcatcagcagatgttgctactcctaagatgccagggcagtcagtcaggaagaaaactaggaaggcaaaagaaatttctgaagcttctgaaaacatctattctgatgtcagaggactatctcagaaccagcaaatacctcaaaattctgttacgcctaggagaggaaggagaaagaaagaagttaatcaggacatactagaaaacaccagttctgtggaacaagaattacagatcactacaggtagggaatcaaaaagattaaaatcatctcagctgttggaaccagcagttgaagaaactactaaaaaagaagttaaggtttcatctgttacaaaaaggactcctagaagaattaaaagatctgtagaaaatcaggaaagtgttgaaattataaatgatctaaaagttagtacggtaacaagtcctagcagaatgatcagaaaattgagaagtactaatttagatgcttctgaaaatacaggaaataagcaagatgataaatccagtgacaagcagctgcgtattaaacatgttagaagggtcagagggagagaagttagtccatcagatgtgagagaagactccaaccttgagtcatctcagttgactgttcaagcagaatttgatatgtctgccatacctagaaaacgtggtagaccaagaaaaatcaatccatctgaagatgtaggatctaaggctgttaaggaagagagaagccccaagaagaaagaagctcccagcattagaaggagatctacaagaaataccccagctaaaagtgaaaatgttgatgttggaaaaccagctttaggaaaatccattttagtgccaaacgaggaactttcgatggtgatgagctctaagaaaaaacttacaaaaaagactgaaagtcaaagccaaaaacgttcattgcactcagtatcagaagaacgcacagatgaaatgacacataaagaaacaaatgagcaggaagaaagattgctcgccacagcttccttcactaaatcatcccgcagcagcaggactcggtctagcaaggccatcttgttgccggacctttctgaaccaaacaatgagcctttattttctccagcgtcagaagttccaaggaaagcaaaagctaaaaaaatagaggttcctgcacagctgaaagaattagtttcggatttatcttctcagtttgtcatctcacctcctgctttaaggagcagacaaaaaaacacatccaataagaacaagcttgaagatgaactgaaagatgatgcacaatcagtagaaactctgggaaagccaaaagcgaaacgaatcaggacgtcaaaaacaaaacaagcaagcaaaaacacagaaaaagaaagtgcttggtcacctcctcccatagaaattcggctgatttcccccttggctagcccagctgacggagtcaagagcaaaccaagaaaaactacagaagtgacaggaacaggtcttggaaggaacagaaagaaactgtcttcctatccaaagcaaattttacgcagaaaaatgctgtaatttcttgggaagattttaatgtacacctatttgtaaagtcatcagaatagtgtggattattaaatatctagtttggaagaaaataatttatataaattattgtaaatttttatgtaaacagaaggtcttcaataagtaaagtaactccatatggagtgattgtttcagtccaggcaatttttctattttatattaagacttcatacatttatatatgtaaatatggcttattaatggaatgttaaataaaatgtatacttcacagtcgtttgtgtcttggatttttgaaagggaggggatatctgtttaaatagttttatatgctcattggtctcattttctctataattaaaatactagaccagtcttaaaatggggatgattgaagtattgatatttctttttacagttactattttataatttatgcactttgattctgtgattcagatttctaatcagaaaatgtatttttttgtttttggctgttactatgttaaaattgaattatgggcatgtcattttgccatctttgtagtttcacaaattttgtgtaatctacctcaaatgaataatccaagtattggttaactataatgttggcatctcttattcggcaagcttaaaggctctttaaagtcttaattagtcaaagactaatccaggttagattgaccggttcactgctcacttgcaaccttatcaaagggtttgacaaagggaaatgtaaaataaatctgtttatggatattgagtgcatcttgtatgtgcctaatattgataggatgagatgtctgaacaaatttttataatattgctgtgaaggagcttgctattgaaccacagaaatcccttaatattcaggttttaaaactggcaaattctcacaggacctcaggcacagattattgaggttgggagagagtgagtagatgtagaaaaggagaaaaacaacacacgccctgttctctacagtacaactgtgtgcaattaagcaatggtacttgatgtaggctctaacactcatcaataaataagtgttgtaaaataatttataacaggtaatcgatagtgtgtaatgaatggactattaataattgattatctagaaacgaactgctttcgtgggcttttaatattttaatgtgaagcatatgcagtgtgctttctgcatttatttttctaccaaataatacagataatgagaaattggtgaaaatgcctacgcaaagtgttgacagtgtgaaagcagtgcgagtgcggccttttagtcaggttagtgatggatgttacgctgccttgttgaaaatttcactgactttgattttattacttttttaatgatagttatcaaacttgtatttaagctgcttgtcatttatggaatattgaacttatttaaatgaacttgttaaatgaataaagagctaaacataattcagtaaacaattcctttgcgcaagtagcacaataaacatggatgcaacgtatgtcaagttaatacttttttaaaccaacgcaatttggtgaatatagatgtgtggtacctgtttttaataagtgtactttttttcccccctccgtgaatgtagatcataagcaaacaaattgcctgttctaaatgaactttacatatattttaaatgaatgtatgtacttacgtataaatgtctttatatagcttgaataaaaacactgctcattaaaaaaaaaaaaaa

SEQ ID NO: 1735 - DNA, 6738 bp, HOMO SAPIENS
ctgcagacgaggcaggcggaagaggcgggacttcgcgggtgacgtcatcggggcgccggaggcccggggcgcctgggaatttgaagcaaacaggcagcgcgcgacaatggcggtcgctcgtgcagctttggggccattggtgacgggtctgtacgacgtgcaggctttcaagtttggggacttcgtgctgaagagcgggctttcctcccccatctacatcgatctgcggggcatcgtgtctcgaccgcgtcttctgagtcaggttgcagatattttattccaaactgcccaaaatgcaggcatcagttttgacaccgtgtgtggagtgccttatacagctttgccattggctacagttatctgttcaaccaatcaaattccaatgcttattagaaggaaagaaacaaaggattatggaactaagcgtcttgtagaaggaactattaatccaggagaaacctgtttaatcattgaagatgttgtcaccagtggatctagtgttttggaaactgttgaggttcttcagaaggagggcttgaaggtcactgatgccatagtgctgttggacagagagcagggaggcaaggacaagttgcaggcgcacgggatccgcctccactcagtgtgtacattgtccaaaatgctggagattctcgagcagcagaaaaaagttgatgctgagacagttgggagagtgaagaggtttattcaggagaatgtctttgtggcagcgaatcataatggttctcccctttctataaaggaagcacccaaagaactcagcttcggtgcacgtgcagagctgcccaggatccacccagttgcatcgaagcttctcaggcttatgcaaaagaaggagaccaatctgtgtctatctgctgatgtttcactggccagagagctgttgcagctagcagatgctttaggacctagtatctgcatgctgaagactcatgtagatattttgaatgattttactctggatgtgatgaaggagttgataactctggcaaaatgccatgagttcttgatatttgaagaccggaagtttgcagatataggaaacacagtgaaaaagcagtatgaaggaggtatctttaaaatagcttcctgggcagatctagtaaatgctcacgtggtgccaggctcaggagttgtgaaaggcctgcaagaagtgggcctgcctttgcatcgggggtgcctccttattgcggaaatgagctccaccggctccctggccactggggactacactagagcagcggttagaatggctgaggagcactctgaatttgttgttggttttatttctggctcccgagtaagcatgaaaccagaatttcttcacttgactccaggagttcagttggaagcaggaggagataatcttggccaacagtacaatagcccacaagaagttattggcaaacgaggttccgatatcatcattgtaggtcgtggcataatctcagcagctgatcgtctggaagcagcagagatgtacagaaaagctgcttgggaagcgtatttgagtagacttggtgtttgagtgcttcagatacatttttcagatacaatgtgaagacattgaagatatgtggtcctcctgaaagtcactggctggaaataatccaattattcctgcttggattcttccacagggcctgtgtaagaatgggttctggagttctcatggtctttaggaaatattgagtaatttgtaatcaccgcattgatactataataagttcattcttaagcttgctttttttgagactggtgtttgttagacagccacagtcctgtctgggttagggtcttccacatttgaggatccttcctatctctccatgggactagactgctttgttattctatttattttttaatttttttcgagacaggatctcactctgttgcccaggatggagtgcagtggtgagatcacggctcattgcagcctcgacctcccaggtgatcctcccacctcagcttccagattagctggtgctataggcatgcaccaccacgtccatctaaatttctttattatttgtagagatgaggtcttgccatgttacccaggctggtctcaactcctgggctcaagcgatcctcctgcctcagtctctcaaagtgctgggattacaggtgtgagccactgtgcccagcctaattgcagtaagacaaaaattctagggcaccaagaggctaaagtcagcacagcttttcttgtgtcctgtattctctgtctaatgtgttgcccaaataatacctaattgttagccattcccctccatctctggcctaaaagtgatagtccaggtatccacatgggctggttcccagaactgccattgctcactctccaaagaggggaaggtggggaaggggaaggtgactatagctcagctcctgagctagtatctggctgttatttcaacaaccggagttggggtttgggctcattttttcccctagccagcaattatggaccagtagtaacacaagtgacagcttcctgtgactgacttcacaattaggaggtctaagattccatttgggtatttgcttaaggatcccacataattgtcccaacggtcattagtagaggggaggtaagccttcattaataataaagagaaagcccacattcaaggtggtgtttgagcaggggcagggtgagggctgtcccggtgctcattgcaccagcacactcacattccttctcatttggggcccacctgcaggaagtggcacaggatcagccatttccccacccttgtcagctgatggcccactgttctttaatgactcagaggaatgcctaggatttttttttttttttgagacagaatctcactgtcgcccaggctggagttcagtggcacgatctcggctcactgcaacttctgcctctctggttcaagcagttctcctgcctcagcctcccgagtagctgggactacaagcctaggatttttaactcaggtttttattatattccctcctgaagtttttacttcaagagcttctgctctaaagtccaatttgggcttcatgtccccagtgctgcatctccagggaaatgctgtctgtgggagagaccaactctcaaggaagaagtggccacagaaggagcaggaagggagttggccctcagggctactctggggaagccaaaagtcatgaaggggagaagaattttctgacaaaaacttgcaggaatctcttaggtgtcttcagtgttggagtgatatgttgagaggcctttggagtgatgtgctgaggtctcaggcgcccacctccctggctgtcacttccatgtgtcagtggttctcccactttagcaggtatcagagtcacctggagtcttgtcaaaacaggtaccagccccacccgcagcgtttctgactctgggtagctctgggatggggcttgagaatttgcgtttccaaaaaggtcccaggtgatgctgcggttgcctgcgcagggactggactttgagaaccacttcactggttattcacatttctgcctctgcagtgagacagccttgaggtctgcctcctgctaagagtcacatgctcctgtcctttagaaatgtgggctcctgccatctccaggacgcaggcactgttcctgttgatgaaccctatttcacaggacccctgctaaggtgatttgaggggaaatgagaggaggctcaaataatcacccagcccctgccacttactgaaagtgtaggtccttgtgccccacaccatcagagtttctgcgttagcagatttgtggtttgcccagcagcctgggcgtgtgcatttctaatgggtgcctcaagtgatctgtttctgatttgtatttctattgtgaagagtcagcccagtactgcaggcctcttacctaagcagaatcccagtctggcatcaaagctttagaggacaagttgattcaggcagagaagaacttgggctatacaagcgctgttcttcagcattgaagtattttggaggcattagatagtttaaccctttctcagtcaaggaatatttacagaacatgatctctgggcattgtaactcctggtcttagtggggaatatagggaccccatgtctccatggggtgcacagaatgtctgtgagactgatggagtggagaacgccatcccccagcctctccagctactcgaggcattctgtagaacataagcccatagattgtgtgtgtgtgtgtgtgtgtgtgtgtgtgtgtgtgtgtgtgcatgcgcgcgcgtgcgcactggaggaacctaagaaactatttggtgcacttcctcttattttagagctcccaaagtgtagctccagaatcgtaaagggatatgctcagtctcacagccagcctgtggatctcagtcccaacactcacccttgtgctactgagtcagctctaagaaaatctgccaaaagtaggccgagggctggttttttgttttgttttgtttgtttgatacagggtcttcactctgttgcccaggctggagtatatcatggctcactgcaaccttgacttgggctcaagcgatccgctcaagtagctggaactactctcaagtagctctcaagagcctctcgagtggctggaactacaggcgtgcaccaccacagctggttaatttttaaaattttttgtagagacggtggaggaggttctcactgtgactcagtgtgtgcccgacagcagagcccacaccactccagttgcagtggttgccatctgggtcatcagacctggctgtcaggggtgcagccacaggagagccaacagcagagggtgctggccgctgagctagctgctaatgctggcctgggtgcagttctcatccaaagtacccggtgggtgggagtcactcagtaccagttccgagcctgaacccaaactctcgtgtttctgctcacccctctctggcttctgccaccacatgggaagaatatgccctggttagcccatggcttctgaagagcaagagaaagtagagcagagcctactccagcctcccccgtccaatgtatgaaagccccagctgatctgtaagcctgggagcgtgataaatgcttagtagtgcatgccatggagttccagggtggtttattacacggcaatatctagctaaatacatttaacttgctgcagctctctggatccagcctggttaccaggaagacaaaaactgggctccaccaggaaccagtcttctgccttcccaaccatcacctctggctgcatcagcgatctctcccagcgaaatagctgcttggtcttgtgtgaatcctgtactttaacacagtggaccaagtgtcagtcattgaaaatgaccatgagtaaccctgtggactctctgcagcttggttcctttgccccttaacaggtgggtatgaatcgtgtcttcagtgccagggctgaatgagaaagggcattcctttttgaaggaatctgatactaaacacaaagcatgagaaaaatcaggacttgttggagttatatttttaaaatatatattttaacagttatatatattagatataatatataatagtatatataaataatactatattgcccaggctggtctcgaactccttagctcaagtgatcctcctgccttggcttcccaaagtgctaggattacaggtgtgagccactgctcccggcctgttggagttctttacatttattttataatcaatgctgttttattaaatgcggattttattttggattacaggatgtagaatgccatatttttcttagatcatagggcctttcacatttgtaatttggccttgtatgagttaccctgcaatccctttgttttccccataacccttccaaaggaaggccgcaatagaaatacaaagagaaacaaaataattagaatattttttaacttctaaagttcaaggttttggcataagtctggtttagaagcacatttgcctagccctttccttcccaccaagggggaaagtcttcctctagacaagaggcagagggctcctcagagtcagatcctggtgtgggctctcacgtgctgctgctgaatcccagggaaggagggaggaagggcagttgacacccaaaataagggtggggaactgtcagcagaggaggtctgtgtcatgtttttcagcgctggggttggggggagcccaggagagcaggaagatccagagatccctcgccccagctcggccatgtgtgtctgggacagagcctgaggtggcctgagcttcctgtggctccagagtaacattatagagaagctgaattctcctgtttttctgaaaagggcatgggagttagctgagaagcagacctggtgggcctgagagtctcaatcgtcaggtaaggacagtcagtgggaagtggacgggccgcacaaccaaggttctcatgaggacaaccatgtcttcgggggtgcccttgtgcacagacagctccatagtcctgcctccaatgtcccaacactgcattgtctccctgcacttagcagccctgcagggtgagacttggggaggatcctgaaatgattgtatttaacaagacatgctgtccttgtttacctggaacctagcaatgttgttttctgccacaacttgaatagatacttgaagcagagatgatgttgagttaaaaaaaatatatacataaaaatatgggttcttttcaacctgaatagatggcctaaaaattcaaa

SEQ ID NO: 1736 - DNA, 387 bp, HOMO SAPIENS
  misc_feature (246)..(246): n is a, c, g, or t
aagcttggagtggctcacggtggatgcattgacgctgcagacgccagcaagtgctacaaaccagagctggcctttaactcagactgatggagaaggtgttaataatgcagattagacttaaaagtgttgaagccattgcactgtgaacagcaaaaaaattgaagaactcttctggcatttaaaaacaattactcagttcagcagagaagtcactgacaaacgagatcacactgactgctttgtcgntttggttttgtcttactcattaatgcaaataagaacattcactagcatctgtgtcgggcctaccctccctggtcaaatacagctacagtctccctgcagatacgagttttccagaaatgagccgatgttttctgcgagaat

SEQ ID NO: 1737 - DNA, 369 bp, HOMO SAPIENS
  misc_feature (211)..(211): n is a, c, g, or t
  misc_feature (220)..(220): n is a, c, g, or t
ggccagctgctcaatagaagcgtctgcgtcccttgtcccgtcttcggagctccccgtgggtgctgtagccccactcacttccctgacatcaccagagcacatgctcagtatgttgccacctcccaaatccagaagggtgtggtcttagatgccatggaagcgattctgtacaatgccgagtcagtcacaggctgatgtggcagctggtggnttgtgtcantgtgtcacccacctccgcagcaggcctgctccctccctgggaaagagctacttcagggtagggccacattgccaaggtatcttgagatccattcatgccaactttcattttcatggaaactcgtgaactcgtgctggaacatctttaac

SEQ ID NO: 1738 - DNA, 6364 bp, HOMO SAPIENS; identical to SEQ ID NO: 491

SEQ ID NO: 1739 - DNA, 3922 bp, HOMO SAPIENS
atcagagcagctggcagcgcggcgggcagcgtttgccgagcgggcgctccgggtcgcacgcaagtccgcgcggggtccgggccacgcacgcggtttcatcgccatccccagccgggccacgcgcgcaggcagacaagctgttcgcggcgaccggagagcgccgacaccatgtggatccaggttcggaccatggacgggaggcagacccacacggtggactcgctgtccaggctgaccaaggtggaggagctgaggcggaagatccaggagctgttccacgtggagccaggcctgcagaggctgttctacaggggcaaacagatggaggacggccataccctcttcgactacgaggtccgcctgaatgacaccatccagctcctggtccgccagagcctcgtgctcccccacagcaccaaggagcgggactccgagctctccgacaccgactccggctgctgcctgggccagagtgagtcagacaagtcctccacccacggtgaggcggccgccgagactgacagcaggccagccgatgaggacatgtgggatgagacggaattggggctgtacaaggtcaatgagtacgtcgatgctcgggacacgaacatgggggcgtggtttgaggcgcaggtggtcagggtgacgcggaaggccccctcccgggacgagccctgcagctccacgtccaggccggcgctggaggaggacgtcatttaccacgtgaaatacgacgactacccggagaacggcgtggtccagatgaactccagggacgtccgagcgcgcgcccgcaccatcatcaagtggcaggacctggaggtgggccaggtggtcatgctcaactacaaccccgacaaccccaaggagcggggcttctggtacgacgcggagatctccaggaagcgcgagaccaggacggcgcgggaactctacgccaacgtggtgctgggggatgattctctgaacgactgtcggatcatcttcgtggacgaagtcttcaagattgagcggccgggtgaagggagccccatggttgacaaccccatgagacggaagagcgggccgtcctgcaagcactgcaaggacgacgtgaacagactctgccgggtctgcgcctgccacctgtgcgggggccggcaggaccccgacaagcagctcatgtgcgatgagtgcgacatggccttccacatctactgcctggacccgcccctcagcagtgttcccagcgaggacgagtggtactgccctgagtgccggaatgatgccagcgaggtggtactggcgggagagcggctgagagagagcaagaagaaggcgaagatggcctcggccacatcgtcctcacagcgggactggggcaagggcatggcctgtgtgggccgcaccaaggaatgtaccatcgtcccgtccaaccactacggacccatcccggggatccccgtgggcaccatgtggcggttccgagtccaggtcagcgagtcgggtgtccatcggccccacgtggctggcatacacggccggagcaacgacggagcgtactccctagtcctggcggggggctatgaggatgatgtggaccatgggaattttttcacatacacgggtagtggtggtcgagatctttccggcaacaagaggaccgcggaacagtcttgtgatcagaaactcaccaacaccaacagggcgctggctctcaactgctttgctcccatcaatgaccaagaaggggccgaggccaaggactggcggtcggggaagccggtcagggtggtgcgcaatgtcaagggtggcaagaatagcaagtacgcccccgctgagggcaaccgctacgatggcatctacaaggttgtgaaatactggcccgagaaggggaagtccgggtttctcgtgtggcgctaccttctgcggagggacgatgatgagcctggcccttggacgaaggaggggaaggaccggatcaagaagctggggctgaccatgcagtatccagaaggctacctggaagccctggccaaccgagagcgagagaaggagaacagcaagagggaggaggaggagcagcaggaggggggcttcgcgtcccccaggacgggcaagggcaagtggaagcggaagtcggcaggaggtggcccgagcagggccgggtccccgcgccggacatccaagaaaaccaaggtggagccctacagtctcacggcccagcagagcagcctcatcagagaggacaagagcaacgccaagctgtggaatgaggtcctggcgtcactcaaggaccggccggcgagcggcagcccgttccagttgttcctgagtaaagtggaggagacgttccagtgtatctgctgtcaggagctggtgttccggcccatcacgaccgtgtgccagcacaacgtgtgcaaggactgcctggacagatcctttcgggcacaggtgttcagctgccctgcctgccgctacgacctgggccgcagctatgccatgcaggtgaaccagcctctgcagaccgtcctcaaccagctcttccccggctacggcaatggccggtgatctccaagcacttctcgacaggcgttttgctgaaaacgtgtcggagggctcgttcatcggcactgattttgttcttagtgggcttaacttaaacaggtagtgtttcctccgttccctaaaaaggtttgtcttcctttttttttttatttttatttttcaaatctatacattttcaggaatttatgtattctggctaaaagttggacttctcagtattgtgtttagttctttgaaaacataaaagcctgcaatttctcgacaaaacaacacaagattttttaaagatggaatcagaaactacgtggtgtggaggctgttgatgtttctggtgtcaagttctcagaagttgctgccaccaactctttaagaaggcgacaggatcagtccttctctcgggttctggcccccaaggtcagagcaagcatcttcctgacagcattttgtcatctaaagtccagtgacatggttccccgtggtggcccgtggcagcccgtggcatggcgtggctcagctgtctgttgaagttgttgcaaggaaaagaggaaacatctcgggcctagttcaaacctttgcctcaaagccatcccccaccagactgcttagcgtctgagatccgcgtgaaaagtcctctgcccacgagagcagggagttggggccacgcagaaatggcctcaaggggactctgctccacgtggggccaggcgtgtgactgacgctgtccgacgaaggcggccacggacggacgccagcacacgaagtcacgtgcaagtgcctttgattcgttccttctttctaaagacgacagtctttgttgttagcactgaattattgaaaatgtcaaccagattctagaaactgcggtcatccagttcttcctgacaccggatgggtgcttgggaaccgtttgagccttatagatcatttacattcaatttttttaactcagcaagtgagaacttacaagagggtttttttaaaatttttttttctcttaatgaacacattttctaaatgaattttttttgtagttactgtatatgtaccaagaaagatataacgttagggtttggttgtttttgtttttgtattttttttcttttgaaagggtttgttaatttttctaattttaccaaagtttgcagcctatacctcaataaaacagggatattttaaatcacatacctgcagacaaactggagcaatgttatttttaaagggtttttttcacctccttattcttagattattaatgtattagggaagaatgagacaattttgtgtaggctttttctaaagtccagtactttgtccagattttagattctcagaataaatgtttttcacagatagaaaaaaaaaaaaaaaaaaaaaa

SEQ ID NO: 1740 - DNA, 3021 bp, HOMO SAPIENS
aagagggaggggtctgtgcgcccgcagagtcgccaggcgccctgcgagttgtctccgctgggaggggcgaggctgtcacttgccagggcgcgaggagcctcagcgcggcttggagaacttggccccgcgcagcgtctggtcactcgctctcctctggggactgcagagaagcaggacctcgggccatggattctactgaagaaaggtagccatggaagagaatatggaagagggacagacacaaaaagggtgttttgaatgctgtatcaaatgcctggggggcattccctatgcctctctgattgccaccatcctgctctatgcgggtgttgccctgttctgtggctgcggtcatgaagcgctttctggaactgtcaacattctgcaaacctactttgagatggcaagaactgctggagacacactggatgtttttaccatgattgacatctttaagtatgtgatctacggcatcgcagctgcgttctttgtgtatggcattttgctgatggtggaaggtttcttcacaactggggccatcaaagatctctatggggatttcaaaatcaccacttgtggcagatgtgtgagcgcttggttcattatgctgacatatcttttcatgttggcctggctgggagtcacggctttcacctcactgccagtttacatgtacttcaatctgtggaccatctgccggaacaccacattagtggagggagcaaatctctgcttggaccttcgtcagtttggaattgtgacaattggagaggaaaagaaaatttgtactgtctctgagaatttcttgaggatgtgcgaatctactgagctgaacatgaccttccacttgtttattgtggcacttgctggagctggggcagcagtcattgctatggttcactaccttatggttctgtctgccaactgggcctatgtgaaagacgcctgccggatgcagaagtatgaagacatcaagtcgaaggaagagcaagagcttcatgacatccactctactcgctccaaagagcggctcaatgcatacacataaatgcatcttcctgttctttctaccatttgaatgcattggtgtttaactaagggccatccaaccatccaacctttaaaaaacaaaacgaaagtgcttctcatcaatgatatgtaaggtgacttatgaatcacctgagtacaattctttgttgtttagcacttaaatttcccaatttattaaattgatgtaaatcagatcttttctacaagctcctatccagccttttttttgaaatttctcaaactcatttactagttctgtaaaatcaaagatactaacattgtcaaatgcaaagatttgtttgatttttaaccacttcccatgtgttatacataacaccttttgcattatttcttatgttttgaaaagaaaatagctttttatactttttagttttgatttcggtaactagtttaactacaggtaaccttcaaagggaccattgtacattatgaacaatagatagagattacatcttgatgactcttgaaatatggaaattttgtctgaagatcagtggccatattactgtaggccctggttcatgttttcatcaatctaaggtgcaatttctaaatttgtaagagtaggtttaaaaaaaaaagtgcttcttatctttgttaacattgtacttttccttgatgttcttaaaaggtatttccctcagattactcatgtttatgttgtgagcatgtagaaacagtaatgctaatgcatggctagttgcctttttaagattgtgacaccaggcttaccttttaaagtttagtatatagagacaattttaatggaaataactactgtagactattgaagaatgatctctttgtgatttaagaagtggctggattggaacttttaatatgctaatgtggaaaattaattacctttatgaaggtggtttattacaaataagcacactaacccctcggaagttgttttacctactttaaaagttttaatggattgcacctctgtaaactattcctaaaatgtgtatgatatatttgaaaaggcttccattaatataatagctttgcttgcagccttccaatctatgttggtttacctgtagtgttttataaagtgtggtcagaggcccctatagaatgtattgtttgaaagtgtagtgatatatttgtgtttttatttcaagtaagtcattttaaccgaatgttcattcatattcatttataaaaagtacctgtatcaaaggaattttaacaaagagcaatcagtattattggaccaaatttggtgtttgttttcaccttgacgctcttcttttcattatttctaatgctacaagaatgctgtaaagtgtcttctaaaatgatgtagcctgacaagacatttttttcagtgtataaaactaggtagtattgtgcactgatttgaccattgtgaaatcctttctcagtgtaactgcatttctaataaaaatttattgagtgaaacaatctttgtacaatgactagtcatgcatcatcagtaattttacaagttcttgtagtaggtagggggtactactagggatatctgtggcatgattatgcattccgtagtattatttaattaatttggggttcattttgcttccttttctttatgcttagattatcttactggttcaacatttttctgatatatgcagtattacagatattcagcaaaagtattaatgggcttctttaaattctatattatagtatttcagttccgtgtcttaacagtttgtgataatttctaaaactgtcttttcaacttatgtaatgatgttgacacttttggcttttatttctggtattagagtttgtattttcacagagtgctttgtagcaggcattacaattaatctgttttgtacataaatgtgccaacagcttgatggtggcgtttttgaaatgtagaacagagtgcttgcaaaatgtaataaatacacttgtgtactttgtgtacttattattaaaaaa

SEQ ID NO: 1741 - DNA, 3222 bp, HOMO SAPIENS
gagcggcttcctgcaaaccttccctggcatctggagggaccaccgttgccgcgtcttcggcttccacgatctgcgttcgggctacgcggccacggcggcagccactgcgactcccactgtgcctggctctgtccatattagttcccaggcggccgtcgccgttccagcagcggcagcggcagcggcagcggcggacatgttgtgaggcggcggcgcgggtgtctgaaggatggtttggccgaggcggcggcaacggctgctggcggcggcggcagcggcagcggggcctcgggctctatagagccgagcccgctgggtacccgcccggtaccgcggcgaggccagtgcccctggatcttgcctctgctccgacgccgttggggaccagttaggcgacagcgcccgcccctctgaggagacacgaaggtggttccccagccgctcaaatttccggaccaccgcgctttcccctcctcagcctgggctgtgctctctctagaatcctcgggcccccactttcttcccaaactcatcctaaatctctcacacacgcgagtgttcccagccctcaagccagctgctcctccgttcattttctgcaccctcttcgcaaagcaccccccgggatcactctccgagggcgactttttgagaaatctcggtggagtagtggaccagagctggggagtttttaaaagccggggcgcgagaaacaggaaggtactatggcttcctcgtctggcaacgatgatgatctcactatccccagagctgctatcaataaaatgatcaaagagactcttcctaatgtccgggtggccaacgatgctcgagagctggtggtgaactgctgcactgaattcattcaccttatatcttctgaagccaatgagatttgtaacaaatcggaaaagaagaccatctcaccagagcatgtcatacaagcactagaaagtttgggatttggctcttacatcagtgaagtaaaagaagtcttgcaagagtgtaaaacagtagcattaaaaagaagaaaggccagttctcgtttggaaaaccttggcattcctgaagaagagttattgagacagcaacaagaattatttgcaaaagctagacagcaacaagcagaattggcccaacaggaatggcttcaaatgcagcaagctgcccaacaagcccagcttgctgctgcctcagccagtgcatctaatcaggcgggatcttctcaggatgaagaagatgatgatgatatctgaaattcaccagctgagtttctatttcttctataaatgtttttccctgcacaacaaaaacagtgaaagaaatgcttatctgtaattttgtatgcatcttggtggacttgtcattggtattctagggatgtctgctattaagtttcatctattgtgtgctatacatgtaaaaactgtctctttgaactattgaaaatttaaggttcagtataatatcaattttgaatttttaatggtgtttatgaaattttagatagcagcgagtccttcgtttgatcaataaacagtgttacagataacttcaagtttataaaaatacagtgaaatttctacaaagctctaaatctgcatttgcatttcctctgcccttttaactaaactaaaacttgtgaattttaaattattaaggggggggtgctgtgtgaatcagtagacattggattgggttggtgaaagagttcagttctgtagtatctgaatttgtcttttaaaatgagtacatatataggcaataaatatatatgctcagatcaatatacttgtttagaaaaacttcaagacattcaaaaactaggaaggagtatgtttaatagtatttgtataaatttggtggttatgtttttttattttgtttctgttttgtgtagaggtaaaaactatagttttattacagcataattcattttgagctccactatgacatttcaaagactgcccagtttggaagtctgtcatgatttttactctttcactccaattcagtaattgttgatagtattacttacctagtccatccatactcatattattcaaatatataggtggtacttttgaaacaattacattggttctcttggtttaactgaggtttatgaatattcaaacctttgctgggggaaagaaatgaaagttaatgagcatgcttgctatgagagagggatttttaatttaacttgtagttatagtttacttattgtttttagaattacttttacattttcccaactagatggcctagagtccaacattaccttttgagatgacattattgtctccataattgagtgatagctttaaaaaaaagattagttttgcttaagaagttatgttacaactgatcagccctatatgaattaactgatcagccctatatgaaacataagttgtgttataacttatcagccgtatatggaacataaatagtttctacctgcttgttagagaagctttaatttggttctaataaatacagtatggtagtgtttataggaatccaggatgttgaagaaatggcataatgtctatattttggaaacagaaaggaaaagtcacttaagatagtattaagtaattaaattcctatgtcagttgccaaatcttttaaacttatgtattcaccaagcccaaaaatagattgtggctcccaggattccaattttaattggagagctaagtaagtaaagttttataactgttaggtttcttaatgatcatattttgcagttttagtaaaagggaaatattgttatacatttattaaatatacttcccccatgaagtgaaaaggttaattttgctgaatgttttaagttgaagttacttcatggatgtcatacccatgaagtgcatttggatgagatagaagaaattgttttttaaaaagtttaagtaccaaaggtagtctagtctagaacgataagttaatacgtgttggcttttctaatttgtactgtaacatccttatactttctattttaagtatatctgtttcttaagtaaacaacttagatattttccacacctttttttttttttctgatgcagagttcaggttaatattttactgcatctgataatgtattatacgtttgaagcctagtgacttttcattttgacattcttgtgatttcatatgctgtattcttcaagcaataaaattgtgatgtgttttataaaaaaaaaaaaaaaa

SEQ ID NO: 1742 - DNA, 4022 bp, HOMO SAPIENS
aataatctccgctcccagactactccgttcctccggatttcgatccccctttttctatctgtcaatcagcgccgcctttgaactgaaaagctctcagtctaacttcaactcactcaaatccgagcggcacgagcacctcctgtatcttcggcttccccccccctttgctctttatatctgacttcttgttgttgttggtgttttttttttttttaccccccttttttatttattatttttttgcacattgatcggatccttgggaacgagagaaaaaagaaacccaaactcacgcgtgcagaagatctccccccccttcccctcccctcctccctcttttcccctccccaggagaaaaagacccccaagcagaaaaaagttcaccttggactcgtctttttcttgcaatattttttgggggggcaaaactttttgggggtgattttttttggcttttcttcctccttcatttttcttccaaaattgctgctggtgggtgaaaaaaaaatgccgcagctgaacggcggtggaggggatgacctaggcgccaacgacgaactgatttccttcaaagacgagggcgaacaggaggagaagagctccgaaaactcctcggcagagagggatttagctgatgtcaaatcgtctctagtcaatgaatcagaaacgaatcaaaacagctcctccgattccgaggcggaaagacggcctccgcctcgctccgaaagtttccgagacaaatcccgggaaagtttggaagaagcggccaagaggcaagatggagggctctttaaggggccaccgtatcccggctaccccttcatcatgatccccgacctgacgagcccctacctccccaacggatcgctctcgcccaccgcccgaaccctccattttcagtccggcagcacacattactctgcgtacaaaacgattgaacaccagattgcagttcagtatctccagatgaaatggccactgcttgatgtccaggcagggagcctccagagtagacaagccctcaaggatgcccggtccccatcaccggcacacattgtctctaacaaagtgccagtggtgcagcaccctcaccatgtccaccccctcacgcctcttatcacgtacagcaatgaacacttcacgccgggaaacccacctccacacttaccagccgacgtagaccccaaaacaggaatcccacggcctccgcaccctccagatatatccccgtattacccactatcgcctggcaccgtaggacaaatcccccatccgctaggatggttagtaccacagcaaggtcaaccagtgtacccaatcacgacaggaggattcagacacccctaccccacagctctgaccgtcaatgcttccatgtccaggttccctccccatatggtcccaccacatcatacgctacacacgacgggcattccgcatccggccatagtcacaccaacagtcaaacaggaatcgtcccagagtgatgtcggctcactccatagttcaaagcatcaggactccaaaaaggaagaagaaaagaagaagccccacataaagaaacctcttaatgcattcatgttgtatatgaaggaaatgagagcaaaggtcgtagctgagtgcacgttgaaagaaagcgcggccatcaaccagatccttgggcggaggtggcatgcactgtccagagaagagcaagcgaaatactacgagctggcccggaaggagcgacagcttcatatgcaactgtaccccggctggtccgcgcgggataactatggaaagaagaagaagaggaaaagggacaagcagccgggagagaccaatgatgcaaatactccaaagaagtgtcgggcactgttcgggcttgaccgacagactttatggtgcaaaccgtgcaggagaaaaaaaaagtgcgttcgctacatacaaggtgaaggcagctgcctcagcccaccctcttcagatggaagcttactagattcgcctcccccctccccgaacctgctaggctcccctccccgagacgccaagtcacagactgagcagacccagcctctgtcgctgtccctgaagcccgaccccctggcccacctgtccatgatgcctccgccacccgccctcctgctcgctgaggccacccacaaggcctccgccctctgtcccaacggggccctggacctgcccccagccgctttgcagcctgccgccccctcctcatcaattgcacagccgtcgacttcttccttacattcccacagctccctggccgggacccagccccagccgctgtcgctcgtcaccaagtctttagaatagctttagcgtcgtgaaccccgctgctttgtttatggttttgtttcacttttcttaatttgccccccacccccaccttgaaaggttttgttttgtactctcttaattttgtgccatgtggctacattagttgatgtttatcgagttcattggtcaatatttgacccattcttatttcaatttctccttttaaatatgtagatgagagaagaacctcatgattctaccaaaatttttatcaacagctgtttaaagtctttgtagcgtttaaaaaatatatatatatacataactgttatgtagttcggatagcttagttttaaaagactgattaaaaaacaaaaagaaaaaaaaagcaattttgaagcagccctccagaaggagttggttctgtattatttgtattaaatacgagcttgcgaaccaatcattttacatctggtttttaaaccgtaagggcaccatgaatgcagtgccgttactttttttttttttttctgtgtgaaacaactcttattgtgatgttacttgttattgtttaaatgtacagaaacaaagggtaaaaatgtgttaatataccttgttccatggtgttgttcttttggggggaggggacgctactcaacacttaatagaatcacaacgctgttgggccagtagtatttattgctttagagattgcttgtcgtacctgtatgtcgtccctttttaaatatgttttcctttttcttgaaactgtataaagtttttttcccccttagcataagcatcttatatataacaactcatttgtacaaggtttttaagtttatatataaaatgtgtatatatatttttgtttcccctttttgacttttttttttctgtatgaaacccagatgtcaccaaatggacattaatagttgcattaaggatcagtagcattaacaaaagttgctttaaaagccattatgtaaaacaagacttgaaaatgagtgagggaattttagcgacactgtctgagcagcagtgggaaccatcttcgtttcccctttgaactcccagtgggatgccctaccctgcgcccttaggacccggactgaccgtgtacaaaactttacgtgccaaaattctcagtgaatttagctttctccctctttttgatgctgtaatttttgttcatcatgttttgctgtgatgttacataggtagatttgtatgtagttttaatgtcacctataacaaaatgtgtttggtagcagattgtccagaaagcattttaaatgaagaggtataaacccttaagggccaaaattctgtatattagattactcttaaacgaaaaaccagctgccgcttttatgtacacatattacatacgagtaggcagcagactttaaaaataaaaaaaacctaggcatgttgatgttgcaaaatgctgtataaagctgaaacctgttcattcagtgccattgtagttgacatgaagcgattgtaaaactgtctccgatttttctctggtttattaaaatgctaactataacattttttgtgaatactttgaatgtttcctaacagttgtgatgttactgttccgttttatgctcttattccaagttcatttttaatggtttggaagccatttttgtaatgaataaatgttcatgctgtacagtatctgtagcatgccgttctggattaataaaagcaacttagtatgtgcagataaa

SEQ ID NO: 1743 - DNA, 2683 bp, HOMO SAPIENS
gctccacttacctttggtgcccggccctctggccgctctcctcccgccctcgcgccccttcggcccgtcccgtccagcccgggctgcccggctctcgcaggcccccccgcgccgaccgcgttcctatggacagacgcacagacacctgcaggagtgacactgctgatcctgtaacatggaggattgtcttcatacctcatctgagaatctgtccaaattggtcagctgggcccatagccatgggactatttgcagcctcattccaaacctgaaacacttgctttctgaaggttcccatgggaacctgacagcaatgtggggctgtagtgctggccatgcttatcactggccactaacagctacttgcagagctgggtcccaagagagggtctgtttccaggataacagaagttttaactctgatagtcccagtataatcggggtgccctctgagacacagactagccctgttgaaaggtaccctgggagaccagtgaaagcaaagctagactgtaaccggaccagagactcttgtgacttctcctactgtagtgagccctctgaactggatgaaactgttgaagaatatgaagatgagaacaccctgtttgacatggtttgtgagtcttctgttacagatgaggatagtgactttgaaccccaaacccaaaggcctcaaagcattgctcgcaaaagacctggggtagtcccatcttccctccattcaagctcccagacgcagatggttgacgaatgcagcaatgatgtcatcatcaagaaaatcaaacaagaaatccccgaagattattacattgtggcaaatgcagaactgacaggaggagtagatggaccagccctgtccttgacacagatggcaaaacccaagcctcagactcacgctggtccctcctgtgtagggtctgctaaactgattccccatgtcacatctgccatcagcacggagctagacccacacggtatgtctgcatccccctctgtgatctccagaccaattgtccagaagactgctagggtatctctggcttcaccaaacagaggaccccctggtacacatggcaccaaccaacaggtggccatgcaaatgcctgtgagcacatcccatcctaacaaacagatcagtatccccttgtctgccctgcagctgcctggacaggatgagcaagttgcctctgaagagttcctgtcccatctgcccagccaggtctcctcctgtgaggtagccctttctccctcagttaacacagagccagaagtgagctccagtcagcagcagcccccagtcgctccagccataaccactgaggccacagcacagtgcataccagcttattccactaagctcaacaaatttcctgtatttaatattaatgatgacttgaatgatctgtgtaccagtgcagtaagcccaaatactaccaaagccacgcggtacgccttgaatgtgtggcgttattggtgcatgaccaacgggctcaaagaccacacagacatcaccaagatccctgcagtgaagttgaacgagctgctcgagaacttttatgtcaccgtcaagaagagcgacggctcggacttcctggccacctcgctccatgctattcgccgaggcctggaccgcatcctgaagaatgcaggtgtcggcttttccatcaccagcagcaccttcagctcctccaccaagaaactcaaggagaagctgtgggtgctgagtaaggcaggcatgtcgggcgcgcgttctcgcaacatcgtctacttctccctttctgacgaggaggagatgtggcaggcagggtgtctgggggatgacagccctatcactctcctgtccactgtggtcaagtacaacagccagtacctgaacatgcggacgctgcaggagcatgcggatctgatgtatggtgacatcgagctgctcaaagacccccaaaaccagccctactttgcccggacggacagcgtcaagcgggagagtcggagcggctccaccagagtgtgtcacgggaagatctaccatgagcattcccggggacacaaacagtgcccttactgcctcctctacaagtacatgtacatccaccggccgcccacccaaatggaggccaagtcccccttctacctgactgccaggaaggaggccacagacatgggcagcgtgtggtatgaggagcagaggatggggctgcgctctcttcggggaattgtcccaaacttagccaagaaggtcaagctggaaaactgtgagaacttcacctttgtctcgttcactcaggtctcccggaggcttggctcccacagctgctgccagtgagcccccactggggcccggccactgccctgtcacctgctcgggccagccagggttggagcagctggagctccttggaggcaggggctgaccaggtgtgacctcccggtctggcggctctcccctggtgtggcctgccctccctttgacttggggtttgctttttaaaatgaaactagatgagtctaaatcattcggatggtttatccaaatgtgcgtcaacttcgttagcttttagaatctaacacaatgtataattgttacatacaagagtgaggaaattcattttctctagtgcctttctagcacaggttttctcaaaacaaacaaacaaaaaaggaaactgttaagtagtcgttt

SEQ ID NO: 1744 - DNA, 3789 bp, HOMO SAPIENS
ctgggcagtgcttctgggccctctgctgctcctgcttgtcggttgctaggcgctgggacgcgcctcccgaagggtgcggggcacaggtggcctcttcggggtggaccgcgcctggccggggccgaggacaccgcggccgcccgggcctgcgggaagcgatggagcccgggaagagaagaaccaaagatgatacctggaaagcagatgacctcagaaaacatctctgggccatacagtcaggtggttccaaggaagaaagaaagcacagagagaagaagctgcgtaaggagtctgagatggaccttcctgaacataaggagccgaggtgcagggatcccgaccaggatgccaggagcagagacagggtggccgaagtccacaccgctaaggagagtcctcgtggggagagggacagagacagacagagggagaggagaagagacgcaaaagaccgggagaaagaaaagctgaaggagaaacatcgagaggcagaaaagtctcacagcagaggaaaggacagggaaaaagaaaaagacagaagggcccggaaggaagagctccggcagaccgtggcccaccacaacctgctgggccaggagacacgcgaccggcagctcctggagcgggcggagaggaaaggccgctcagtaagtaaagtaagaagtgaagagaaagatgaagactctgaaagaggagatgaagatagagaaagaagataccgagaaagaaagctgcagtacggagacagcaaggacaaccctctcaagtactggctttataaagaagaaggcgagaggagacacaggaagcccagagagccagatcgagacaacaaacaccgagaaaaaagcagcacaagggaaaaaagagagaaatattccaaagagaaaagtaattcattctctgacaaaggggaagaaagacataaagaaaagcgacacaaagaaggttttcattttgatgatgagaggcaccaaagcaacgtggatagaaaagagaaatcggcaaaagatgagcccaggaaaagggaatcccagaatggtgaacacagaaatcgaggtgcaagctcaaaaagagatgggaccagcagccagcatgctgagaatttagtaaggaatcatggaaaagataaagattcaagacggaagcatggccacgaggaaggctcttctgtgtggtggaagctggaccagaggccgggaggcgaggaaaccgtggaaattgaaaaggaagaaactgatttagaaaatgctagagctgatgcatatacagccagttgtgaagatgattttgaagactatgaagatgactttgaggtttgtgatggtgatgatgatgaaagcagtaatgaacctgagtcaagagaaaaactggaagaacttcctctagctcaaaaaaaggaaatacaagaaattcaaagagctattaatgcagaaaatgaaaggattggcgagttatctttgaaactgtttcagaagcgaggtagaacagaatttgaaaaggagcccaggacagatacaaacagttccccttccagagcctctgtttgtggaatttttgtggattttgcctcagcttcacaccgtcaaaagagtcggactcaggcccttaagcaaaagatgcgaagtacaaaactgcttcggctcattgacttagatttttcatttactttctctctcttggatctaccaccagtaaatgaatatgacatgtatatcagaaactttgggaaaaaaaataccaagcaggcatatgttcagtgtaacgaagataatgttgaaagagacattcaaacggaggaaatagagaccagggaagtgtggacccagcacccgggagaaagtactgttgtatctggaggcagtgaacaaagagatacctctgatgctgtagttatgccaaagattgatactccaaggttatgtagctttctgcgggctgcttgtcaggtgatggccgttttgctggaagaggatcgcttggcagctgaacccagctggaatcttagggctcaagacagggccctgtattttagtgacagctcatctcagctgaacaccagtctaccattccttcaaaatcgaaaagtatcctccttgcacacctcccgagttcagaggcagatggtggtctccgttcacgacttacccgagaagagctttgtgcccctgctggacagcaaatacgtcctctgtgtgtgggatatttggcagccttcagggccacagaaagttctgatatgtgagtcccaggtcacgtgttgctgcttgagccctttgaaagcatttttactgtttgccggaacagcgcacggctcagttgtcgtctgggatttgagagaagactcaaggctgcattactctgtgacgctgagcgatggcttctggacgttccggaccgccacgttttccaccgatggaatccttacctcagtaaaccaccgaagccctcttcaagcagtagaacctatctcaacgtccgtccacaaaaagcagagctttgtgctttcacccttttctactcaagaagaaatgtcaggtttgtccttccacatcgcttccttggatgagagtggggttctcaatgtatgggtggttgttgaattaccaaaggcagacatcgcaggttcaataagtgatttaggtctgatgcctggagggagggtcaagctggtacatagtgctctgatccagttgggtgacagtctttcccataaaggtaatgaattttggggcactacacaaacactgaatgttaaatttctgccttcagatcctaatcactttattattggcacagacatgggtctcataagccatggcacaagacaagatttgagagtggctcccaaactattcaaacctcagcaacatggtataagaccagtgaaagttaatgtcattgatttttcaccatttggagaaccaatatttttggccggctgttcggacggaagcatcaggctgcaccagctgagctccgcgtttccgctcctgcagtgggacagcagcacggacagccatgcggtcaccggcctgcagtggtccccaaccaggcctgccgtgttcctggtgcaggacgacacatccaacatctacatctgggacctcctccagagcgatctgggtcctgtcgccaaacagcaggtctcccccaacaggctggtggccatggctgcggtgggtgagcctgagaaggctggtggcagcttcctggccctggtgctggccagggcgtctggctccatcgacatccagcacctgaagaggcggtgggcggccccggaggtggacgagtgcaacaggctgcgtctgcttttgcaggaagccctgtggccagagggaaaactgcacaagtagcgggtgtggctgagaggaccgcgtttctgtaatgacccagatttaaaagacataaggtggataattctacatttgtgtgcaagtatatttatgtatatagactatgtatattctgtatataatttattttacatgaatatgtctttggtattcccagtaaatagatgactacttttgagtggaaacaaagaacattctagcatttacaaaacttccaggggaatgtagagccacgtccagggtgctcttttctgagagtatttcgagttatttttagaacagtttaaatattgtcacattactgctagattttaaacagcctaccatgaaaatgtatcttaatgaactattttcttatgcataaagtatgtgaacacatgtctaaattaaaaggaattactccaccgaaatgaaaaaaaaaaaaaaaaaa

SEQ ID NO: 1745 - DNA, 3299 bp, HOMO SAPIENS
gggtgcttagccccgcccccgtcccactctgccctgttgctgtcgcgccgctgctggttgctgtccctggacccctaccatggaggagaccatcaaagatccccccacatcagctgtcttgctggatcactgtcatttctctcaggtcatctttaacagtgtggagaagttctacatccctggaggggacgtcacatgtcattataccttcacccagcatttcatccctcgtcgaaaggattggattggcatctttagagtggggtggaagacaacccgtgagtattacaccttcatgtgggttactttgcccattgacctaaacaacaaatcagctaaacagcaggaagtccaattcaaagcttactacctgcccaaggatgatgagtattaccagttctgctatgtggatgaggatggtgtggtccggggagcaagtattcctttccaattccgtccagaaaatgaggaagacatcctggttgttaccactcagggagaggtggaagagattgagcagcacaacaaggagctttgcaaagaaaaccaggagctgaaggacagctgtatcagcctccagaagcagaactcagacatgcaggctgagctccaaaagaagcaggaggagctagaaaccctacagagcatcaataagaagttggaactgaaagtgaaagaacagaaggactattgggagacagagctgcttcaactgaaagaacaaaaccagaagatgtcctcagaaaatgagaagatgggaatcagagtggatcagcttcaggcccagctgtcaactcaagagaaagaaatggagaagcttgttcagggagatcaagataagacagagcagttagagcagctgaaaaaggaaaatgaccacctctttctcagtttaactgaacagaggaaggaccagaagaagctcgagcagacagtggagcaaatgaagcagaatgaaactactgcaatgaagaaacaacaggaattaatggatgaaaactttgacctgtcaaaaagactgagtgagaacgaaattatatgtaatgctctgcagagacagaaagagagattggaaggagaaaatgatcttttgaagagggagaacagcagattgctcagttacatgggtctggattttaattctttgccgtatcaagtacctacttcagatgaaggaggcgcaagacaaaatccaggacttgcctatggaaacccatattctggtatccaagaaagttcttcccccagcccgctctccatcaagaaatgccctatctgcaaagcagatgatatttgtgatcacaccttggagcaacagcagatgcagcccctttgtttcaattgtccaatttgtgacaagatcttcccagctacagagaagcagatctttgaagaccacgtgttctgccactctctctgagtatcccaacctcttggatgtatacagagattttatagaatagaacctatagcttctaccatgagttatatgagtcaagatcctgcctaacctgaaattattagggatttactcagccctgctgccgctaacagtggagttatgtcactgatctgaaggtcactgttaagggcttctgctgccatccttgtgggttgctacctttaagtcgcataactctagctgtatcatcctctcacctgtcattcttctgagggtctcagtacaagggccctgggatggagccaacctgggtattcacaacaggcctgacttgatactaagtgattagttttccaagttgtcccactgccattcaaagtcagcccttgagtgtatttgttctcagtcctaaccctggggccagagattggtccgaggttgagaattccttcctcctcatccttggtgttgctttctccaaatgattgttttagactagccaaaaatgccgtggcaaagagctcagaaatccaatttggataccaaaggtttctcatgttaatttctcagcccccaaagaagcatcttactcctgaaccttagacaggaagtattgtttcagtcacagaaagcttttctgggtacctctggttagcactttctactctctgatatttcctatgtacatagcttttattgttgtaaatcctttcttaatggttaaataggattgttagcaactatgggtttgcagttttctgagtaggtgagttttgaatatgggtaaatcagaataatgagacaacttgttaatctctttaatactaaaaataaattactcttctatttcagggacttaggtaatttaaaataaaccttcaatttatggtcttctgttttgaagctcatgggaaaattgtgatcaaaagggctatgggaagggcagaccccgccaatgatttctcttcacctgtcttaagattaaataaaaaagagtgtcctggcagttatcttgaggtggggaaggaggtgatgaaacattagtttgtgaaatccaaggccctggcttgctttctttctttttttttttttttttttgaaacagtctctctctgtcacccaggctggcgtgcaatggcgcagttgactcactacagcctctgcctcccaggttcaagcgattctcatgccttagcctcccaagtagctgggattacaggtgtgtgccgcaatgcccagctaatttttgtgtttttagtagagacagggtttcactatgttggccaggctggtctcgaactcctggcctcacgtgatctgtccacttcagccgtccaaagtgctgggattacaagcgtgagccactgtgctgggcccgaggccctgacttcttgctgtaactttccatgcattttttttaaaaggagcagtgtggattttcgcaccctttgtgaactaagttcaatgcgctctatccaaatttgcctaattgaactataagaaagtaataattccattttctatcccctcagggactgaacaaatggaaataactcccaggcagtatcaggtggtcactacagagacttccacaaaaacttttgaatgatgtgaaacacgatgtcatgaataagggttgagccaactatagctctgtgttcctactgggctttccctaatgtggttgggagttatgccctagactaactgtattgtcctagtcacagctccttgctttgatttcatccttgataaaatgaagatgaaacttacactacttctccaagccttttgctgtcttaagaataagacctgagattaacactaaccctagaatagaaatgtaatagggagatggtaataaaggagtttttctggcaaaaaaaaaaaaaaaaaa

SEQ ID NO: 1746 - DNA, 9807 bp, HOMO SAPIENS
agcatttcagagtgggaccgcgagaagccgcttgtaaacagagccgggccgggatggtcagcgcccgggcgggctgtcaccgtgaggcgggcggcaggctgcgggagtcaagcccctccaggagcggactgaaggccccgcaggtgaatggagagtagcagccggggcccaggaaatcaaggattggcgtggcattgctttgacaagtacttgctgttgtcttcacagaggtctcactgaagaataatctcaaaggaacatttggtctccctatacatctgttaatgcccattagccactagcaaatgcttttaattaccaggaaaacatcaaccactttgggtttggcctgctccagggagcccaatgaaggtttcttccagttgtttccatagctctattgctgaagcacccctcttggttgggtgaatgttcatgaagccatttctggaaccagcttaggaggctaaggcctcctggagcctgtgacatggaagctttggaagtggatgatatcagcccagccttagaagttacggaggaattctttagtactttggatagtaatctagaaaaggctgtgcagcaggcagaggtttatgggatccaggaagtccctgaactggtggggcatgaggtactcagtaacataacagacaatggtgctatgagaaatgtcacctccctgggcaaggggggcatgatttgggaccactgtaagagcaggctcttagaaaccaaagctcaaaatgtcttccctgccaaagaacagtttatggtccagagagggacaaccccagataatctttcctggatggaacaaaaggaagcatcaacctttaatttcttcaatatctgtcagcgtcggagggaccggcctcgttctgtaaatgacttactggatgagacctcaactttcaagccagggcatgctcgatcacgatcagatattacccaagtggactggagggtagtcctcaaaaccacgcctttgcagcagcagcaacagcagcagccattgcttcaaggcccgcatgtcaccaggccatcttttctgttgccctcaccaaataagatagaagatgctcaaggaaatactgaacacaagcagacattcccaaacattctaaagaagggttacctggagattagaaaggaccatgacagttactggcaaagctgttatgcagaactttcaccttacaacttatacttctacagcctcgacagcagtgggaatcaaaacctttatgccacgtaccagctttcacacttccagagcatatctgttttaggcaacctggaggccaggatggtggatactgttttgtatgacaacactcagctacagctaaaggcagagtcaccatgggaggctttggactggggacagaagctttgggaagtagtgcatgctgctgtgcccggttacatggggcggcagaatgagctgacaatctcaccagggcttggccatcatgatgactatacacagaatcatagtttccagaagaaaaccagtgggctgctgccaccgtcccctgtcctggacagctccaaacagtaccaaaacatcctcaaatcagggactctctacaggctgactgtccaaaacaactggaaggcatttacatttgtgctgagcagggcttaccttatggcttttcagcctggcaagctagacgaggatccactgttgagctacaacgtggacgtgtgtctggctgtccagatggacaacctggatggctgcgactcttgctttcaagtcattttcccccaggatgtccttcgcctccgagctgagacccgacagagggctcaggaatggatggaggctctgaagatagctgccaatgtggcgaggagttcagagcaaaacctgcaagtcacactgaggaacaaacccaaggatcaaatgggtgggcatgaactcaggaagaacaaacgccaatctgtgactaccagcttcctgagcattttgacgactttgtctttggaacgaggactcactgctcagagtttcaaatgtgcaggctgccagcgatccataggtctttccaatgggaaagccaaggtgtgcaactacagtgggtggtattactgcagtagctgccacgtggatgacagctttctcattccagcacgcatagtccacaactgggatacttcaaagtataaggtgtcgaagcaggccaaggagtttctggagtacgtgtacgaagagccgctcatcgacatccagcaggagaacgccatgctgtaccaccacgcagagccgctggccgccgtgctgcggctgcggcagcggctgaagtcgctccgagcctatttgttcagctgccgggcagcggtggcagaggatctccgccgcagaattttccccagagaatacctccttcaacagatccacctgtattcacttgccgacctgcagcaggtaatagagggaaagctggctccattcttgggcaaggtcattaaatttgccacctcacacgtgtacagctgcagtctttgtagccagaaggggttcatctgtgaaatctgtaacaatggagagatcctctacccttttgaggatatttcaacaagcaggtgtgaaagctgtggagccgttttccattctgaatgcaaagaaaagtctgtcccctgcccgaggtgtgttcgccgagagctgcagaagaagcagaagtctttctggcagagactgaacatggacgagagtctagaggaggcttgcaccatgttcgagctgtcctaccagaacacctgactccagccgacccgaaggccagggattcaccaatcaacaatccatcagccccagagcggcctcctaactagccagttagacccctttggaagaagagtatgtatcctcttcaactagatatagatatatatatttatttatatatacgcaaatacctatacgtcctgtacgtatgctctgtgtacatcattgtccagacgatccacagaacctctgtggctcgagaaactaccaatagctggattacacttagccaagaatttcagctgcttgctcccagacaaaacgtggtatacacaatgctttatagttcagactttttttttctctctgtctctcggtacattttattacccaagacacaaaaggaagcatttcctgcacaaaacagtgctttaggttatttttgtgttatttatttttagccttcacagaggctgaggtaactgaggcaggcacccatcatcatctgtttcataagaaaaccttcaaaacacaagagactgctgggtccttccaggacctggtgtccgtggcgctcccgcctcagttcctcctgtggaggcggggaatcacgtaagcagagccgatggctggaaacaggagccaagccccctctgacagaaagcatacacccctcatttatgaggagggctggttctggttttgaagttaatctcagaagtttttttcctgagaagagaagaaacctctgcgaccaataactgcgtgttgtcggtctgtttttcggtactaatcccatcacccacctaatgatgtgacgctccaccgtgttttccaggctgtacacatggctttcttaacagttttcaacgggtgcccatggttgatatttatgatttttttcatgatgctggccggaggaaatgtcctggggtggttgttaaagacatcgtcgtgtagactggtagataaggctatctagtaagtatattcccaaagagggtcgttttagtttcttttctcagaatcctgtggaggcagttcctacctattcattttaagtgctttatttctcgttgttcttcctgcactttcatttcgacctttgtcaatgtgaccattcttgctttctcatttttttgtttaaaaaatcagagtaatgtggaacttcaaaataccaactttggactattaagaaaatacaaacttacaagtataattaatgaattagatctaatattatttaaataaatatatatatatacacacacatatataattgccaccttgaagtaaaacaaagagtgctaaaataaataataggagtaagaaagagatctgctttgctatttggcaggtagtgttctccagctgcagtgcccttggaagagcacgtggcagtcactgtgaccaaaacggcaggtaggacagccctgggaccctgacagctcccattccttccccttaactctccctagagcaagaaaaatatgtttataatggaacagttctcagtagactttatgagaagattctgtagctttcgcgctgagcagatgccttctatgtcttcatggtttagtagttttgctgctattaggatcagtggctcacaacatacttggtacattcaaccccattgctcctttcccccacacgccgcttccccaagaccccaactcatgatacttccatccatctagagatgtgacatttcagactgacttttgtgcagttagatgtaagcattttacctctcaacccacaccagttcctttggccccaggccacacatttcaccttaatagctcaacaccatacatgcatttattttctgactatacagtagccgcaaccaaggcttgaaaacttgttaaaaggccagggccctattcatgagacgcctgacggtgccttttacccttagaaaagcaggttgacttttcccccactctagttaaagagaatgttgcacacaaaagaaaaagggtggaaaatctcaaacacttggcaacaggcaaacaaatttgatcatctcctttcctcctcctcttggtaaaatacagtatttatattttccagcctcagagaagatagcagaacatgatctttcacaagagaattatagacctgcttattataaaacagatgtgctcccatggcaaagtgccttctccctccgcccccagctccctgtcactgtagcttacttttgccttcgctgtaattaatgtatccgtgattccaactgtcagcgaggccattcctagcacactgcatttggagacctgaagtgcagtgccatctcctccccttgtaacatgtttgccctgcatacagaatttcctctcctagctcacaggcacccagggtcatacctgccgagagtcaagggcgaaattctggatccccgttcaaaacatctttgttttcaccagtccccatttagagggccctgctaaatacgagcagtccctgtgaactcctaaggaggactttccacccacatcattttctgcttattttcaaaagggaaacaaaaaatcgatgtgttatcaccatcagctacccagagctgggtccatgtccagcactcctgtttcctctccttttcgtaccaccctgacagcttggtcggtgccagccacaggcctatgacattctctgccaccaccaccaaaatctgataggacagagtggagccagcttaggagttgggtctgccatgaaaattcaaaattgctgttttcagcccagaataccttggcgcacatgaacgcccttactgttttcaactttaacaaattacttggtgcactgttaggtaattgttccactgcttagaaactgtcgaaacaaaagcaaatctgtggattaccacctctttcagaccaaactaatacctgcttttcctcgtgttccatttttcatcccatattaaatatcttgcacataaaacatatgaaaaaatggccaattaatctcctggagctggcaactgactccggggaaccgctttttgctgaaaggctcattccctagtgtatcacttgaggaaatccctcctaaaagtgccagaaactcatgtgtgagatcgtccaaccctggtgaaatgttggcatctaaccccgcagtaaagaagccagttcctaaaatagacctcattttgcaccgcggcaggaaggccacaaagtacttaaaaagccgtcaactggaatgggggtagtgttctttccaggcccgctttttccaaagttaaaagcctctttatatgaaaaccatgtaaactctcagcagccccctttgcttcactgccttttctagggagtgcattagagtcatttttacgtctgtagtgctaaagggtcacctagttaggagctttaacatcggattcgctgagagggtcatcggtttttgattcttctagagtaggcctccaccaagaagggaatacgtctaatacttgggatctgtggtttgcaacacaagtggtatccctcagactcctgaaaagggactatgccgtgacttccttccggctgcagtgagatccgaggtgtttacaccaccctagttgccgaatgcagcctttgctcagctagagtgtgtcctctgacggagcctggcctctgtttttgtctctgtgtgttgtgtgtacacactgaacgtggacatcggatagttcttttctgtgcctcctcagagaggcttggcttccaaacctgggagtttgttctctacccattggctagaaaaggccgtccataaattagtatatccaggtgggactagcacgatgccacgcacactgaacattttctgcagaggggcgttagcagtggaagtagagacacattctggtcctcctttagagtcaagccaatgctgttgctcgtgtatttgtgcacaattattcatctccgttgatctgacacactctcttgaaatcactagattatgaaacagatcttcacctcctgattccaatactgcctggtttcaacacaggggttgttttatttttttacttctcctagtaaatagagatgtgtataatttttgcccattttatttcttgagttgtctgcaccacttcttttcttactctgaaataatgtgaaaacgtgaagttggagcaagaccttgaaagagcctccctcctttgcgtgacctgaatcggtagcggcactctctgtttcccctgcctccgtgtcacttgttagtgatgggcattaggagcttcatatgttgcacaccttgtatcactcttccgaccctgagtcaggtagagctgtctgctcgaggtcgaatccagtgatgggtgactaagctctgctcggttaatgtaaacagacaagtgttgatttctgtcatgtggaacggtgtttcgacagttaagtctagcacccagtagtctccttattggtagacgattctaatttcattggattcaaaaatctctgactcaagggtctttccttagtgcgttttaatgggtgcatggctgagggaaaatccaagtcattgttaaactctaggtaaaagacaagagtatgggataccctcctaaccataccggtagttgtcagttttatttaaagtgggttccacttggccaggattggtggctcacgcctgtaatcccagccctttgggaggccaaggcaggcagatcacttgaggtcaggagtttgagaccagccgggccaaaaatggtgaaatcaggtctatactaaaaataaaaaaattaggctgaacgtagtggctcatgcctgtaatcccaacactttgaaggccgaggtgggtgaatcacttgaggtcaggagtttgaggccagcctggccaacatggtgaaacccccctctttactaaaaatacaaaaattagctgagtgttttggtggatgcctataatcccagctacttgggagactgaggcaggagaattgcttgaacctgggaggcagaggttgcagtgagccgagattgcgccactgcactccagcctgggcgacagagcaagactccgtctcaaaaaaaaaaaaaaaagtaagttccaaatgatcatgttttgtggcactgtcttcgtaaagtggccgctggtgtgatggaaagcattgctaaactcaagtgagacaactgctgttttgctttggattttccctgtgaaaagagaagccactgcctgttcgtcttgttagaaagacaagactttgaatgaagttccagactttgaatgaagttccagactttgaatgaagctggttgttgcccagagtagaagattcaggcacctacagcaactcacagcaactcctaactcttaggagggctccctcctattggccgtgaagctgcaaaccagcctctctcttttccctggatcttccttgcccctagttctgagccccagcccagaggcaggcctcatggctaataaaccagctagaggacagctggggcctgtggctccttctccatgttggccttcccttgtgtctcttgtccctgtaggagtgccttatagtactgtctcgtgcttctagtctagtctgaaccacttgaagcctgcaggacccttcaactaaatctggatccctttgcttcttccctgctggctactcttcatatagatgctcttggagcctgtgcattccatgatgcatgtcagaactctcaccttgttcagcctggtgtgccttaacctcaggagtaaagggaatcatgtcggaaacacgtcgttaaagtagaatggtacaaacattggcttcttagtgccattagcacttttaccaggaaatgcaaaagatgcaaccacataatgttttcactttgttttatgctgttcttcaatcgctctttttgtttatttgtttgtttgctttcattaaccaaactcaggggaatgtcatgatgtcaccaaggccaatgggtagagaaataaaaaccagccatccataattgaatctgtaaagtcagtgaacttagccttttcaggttcaaaattacacaaacacaaggattttcttatctttcacctttcaaaggttttctttttattttgccacctgttttccaaataagaagtgggaagcctcttagataaattgtgataaaaatgtctctttgtttggcgtgagctatcaaattagctttgtgtgtccactgagccatcaaattaggctttggctgctggaggcctaggttctagctttggtcacctatcagaatcttactgttacgctgggcatggtggcatgtgcctacagtcccagctatttgggaggctgaagtgggtagattgcttgagcccaggagcctgtgcaatatggtgagacccatctcaaaaaacaaacaaaaaaagaagtagaatcttactgtgaatagctactagcctaccctagaagatatatattttaaatctgtttcttaggaatagtagctaaaagaaggaatggccaaaggagggaaagtggttggccgcagcggctcacacctgtaatcccagctctttgggaggctggggtgggaggatcactggagcccaggagttcaagacaagtctgggcaagatagcgagaccctcatctctttgaaaaatatatatatatacttttttttttaaaggagagaaaatgcttaggttgcaaatggagagtattgaacgtggtgatgtaaaaaacttctgcaaaacttgttctgtagctcctgggtcaggtctatgccattttttcttatatctgctcacacagtacagaaatgactaaaattttgggtctgggctgttatatcactttgtgttaagttatttgtagtagctaatgtgctaacttatatatgtgttctttctgttttttggattttaccttttgttttggcataacttatctatatttttgtttacattattttaaaaatatcagtaactgtaataatataaaattgaagttgtattgttgacaatacctctagtttttaaggtcatctgtcacataatttaagtgcaccagttcctaatgtataaagttctctctctctctctctcaataaacaatgcagaaaata

SEQ ID NO: 1747 - DNA, 345 bp, HOMO SAPIENS
  misc_feature (71)..(71): n is a, c, g, or t
  misc_feature (125)..(125): n is a, c, g, or t
  misc_feature (132)..(132): n is a, c, g, or t
  misc_feature (147)..(147): n is a, c, g, or t
  misc_feature (171)..(171): n is a, c, g, or t
gctagatgttgcagatacggagatgaatagagacacctctaattaattaaagcggatgccctccccactcntcccaggatttgactcggagcacaaactcttcacaaaccaaaatgtcaggacanccatcgnccagtgtccactggnccactgctgttggtgtgaggcagnccaggagcccctcagaactagtaagtctgagaagaggctgcacggggcctaggagagggagaaatgagcccgtccaaggtgaattccttgattctccattgtgagtgcaccaagaacaagcactccctccgactgactctcgcctaccaggatctggaacaccttccattaatt

SEQ ID NO: 1748 - DNA, 3507 bp, HOMO SAPIENS
agtcgtgcgacgccgggcggttgcgtgtggtgcgcgggggcgcgggctgcgtgtggcgcggggcggggcgcggctggtgcgcttgagaagcgatggcggcggcctgaactcacctaacaccgcagcagcaaccgggcccggccaggttcggcgttccgtgagtgaacgatttagaaatctggactggccagtgacctctgggcttgccattccagcctggtataacctctggctccatgggcagctactggctcctacagaccggatgaagcagactggagacacaagtggagaaaacctccagctggcaaatcctcagagtgtaggcctctggctgccagtcctgcccagcctgcctcatggagaggatgaattggctgagcagactggcctcccggggccctgggcaccgtatacctcaaggggccaatctccaaaccccagtcatggctgatcccgagacctgcctcatggtcttcaagaatcactggtcccaggtggtgcgaatcctggagcggcaaggccctcgggcagctcctgggggtgcagacgatctcagtgctgtgcgcaaccacacttaccagatgttgacactgctggcagaggaccgtgcagttccctcggcccccacaggccctgggcccctgctggagtttgctctgcacgaggatctgctgacccgtgtgttgacatggcagctgcaatgggatgagcttggggatggggtcgaggaacggcgggctgagcaactgaaactatttgaaatgctagtgagcgaagctcgccagccactgttgcggcatggtccagttcgtgaggctctgctcaccctgctggatgcctgtggccgccctgtgcccagtagcccagcactggatgaaggcttggtgctacttctcagccagctgtgtgtttgtgtggcccaggagccttcattgctcgagttcttcctgcagccacctcctgagcctggagccgctccccgtcttcttctcttttctcgccttgtcccttttgtgcatcgagagggcaccctgggccagcaggcccgtgatgccctacttcttctcatggctttgtcagctgggagccccactgtgggccgctacatcgcggatcactcttacttctgcccggtgctggccacagggctcagtgccctgtactcatcactgcctcgaaagattgaggttccaggggatgattggcactgtctgcgacgggaagactggctgggagtgccagcccttgcactcttcatgagttccctggagttctgcaatgcagtaattcaggtggctcaccccctggtgcagaagcagttggttgattatatccataatgggttcctggtgcctgtcatgggtcctgccttgcacaagacctctgtggaggagatgatcgccagtaccgcctatctggaacttttcctacggagtatctcagagcctgctttgctccgtaccttcctgcgattcctgttgttgcaccggcatgacacccacaccatcctcgacaccctcgttgctcgtattggcagtaactcccggctctgcatggtctctctgagtctcttcaggaccctcctgaacctcagctgtgaggatgtcctgctgcagctggttctcaggtatcttgttccatgtaaccacgttatgctgagccagaagccggctgttcgtgatgtggacctatatggacgagcagctgacaagtttctctccctaatcccacgctgttgtcggcaccacgcccccagcccacctcgtccagagcatgcctcatgggcacgaggtgggcctagcagagagacagggagaagggaggacatcacgggtcctggaagcccaagtgtggactcctcttctgtgacgacagtaccccggccctccacaccatctcgtctggctctcttcctgcggcagcagagcctgggtggctctgagtctccaggcccagccccttgctcaccagggctttctgcatcccccgcctccagccctggccgacggcctacccctgcagaggagcctggagagctggaagacaattacctggagtatctgcgtgaggcacgtcgtggtgtggaccgctgtgtccgagcctgccgtacctggtctgccccctatgatggcgagcggccctctcctgagcccagtccttttggctcccggactaagaaacgcagcctactgcctgaggaggacaggaacaacgtgggggaaggggaggaggaagagctggggaggagggggcgggctgggggtgcaggggagggccctggtcacctgccccctccccagctcaatggagtgccaggatcatggcctgagggggccaagaaggttcgtctggtgccaaaggagggagctggggaactgctagagggcatctccgagggcatggcaggactagagggctttgggcaggagctccgggagctagaggtggcattgagcaatgggggaactggctcagagtcccccttagaacctccactgccccttgaggaggaggaggcctacgagagcttcacctgtccccctgagccccctggccccttcctcagcagccctttgcggactctcaaccagctgccaagccagcccttcactggccccttcatggctgtgctctttgccaaactcgagaacatgctgcagaactccgtctatgtcaacttcctgctgacggggctggtggcccagctggcctgtcacccccagcccctgctccgctctttcctgctcaacaccaacatggtcttccagcccagtgtcaagtccctgctgcaggtgctgggctctgtgaagaataagattgagaactttgcggcttcccaggaggacttcccagcactgctgtccaaagccaagaagtacctcattgcccgtggcaagttggactgggctgagggccctgcagcaggacctgccccacgccgttctgatcccctagtgaagagccggaggccatccttgggggagttactcctgcggcatgcacacagtccaaccagggcccggcaggcggcacaattggtccttcagcctgggcgagacggagcaggacttggcctaagtgggggctcccctggggcttcaactccagttctactcacccggggcggggcccctgaacgccaaggtgaggctcttcgagtcaagaatgctgtctactgtgcagtcattttccctgaatttctcaaggagttggctgccatctcccaggctcatgccgtcacctcgcctttcttgttggagacttcagaggaaggatctggccctctcatctcaggctgtgggcccctcaatccttaactttcttccatggacaatcagggccatgggtggcccgggctggggctagggcacaggctcctttttatgtttggaggcagtggcaaaaggactttttaatttatttcagatgaatgttttatggagaacttgttgcaatatgtataaaagggaaatctctattctgtgctcaaaaaaaaaaaaaaaa

SEQ ID NO: 1749 - DNA, 2179 bp, HOMO SAPIENS
gaatggaggaggaagatttaaaagtgaattcgtgggcggcgacaaggaaacagcagccgtggccaagctgaccccagagcccttcccttcctggccctccctctgaatcatcgcgctccacttgtgacgtcgcggacgcccggctcgggcaggcgtggggggcccgcgcgtcccgggagccccgaggcggcagcgcgcgtttccacgccgcggtcccgcgggaaagccgggggcggcggcctggctgaggccaagctcggatccggtgccgagccaagcggggccgtgcgtcgccggggcttcgccttcgctcgcgtgacctccgccgtcctccccaaccctcgtcctctggccgcgcctgcggccgcacgcccagcgcccctcgcctaacctcgcgcccgggccgcgcctcctcctcctcctgctccccgccgcttccgtttctcgagggaaaggctgctgcctcctgctctgtcctcatccccggcttagtccttcagagcttacatcatgtggccgagtttatatacctgattggcaaaacagagcctaagaaccagctctcctgtatcccaagcaaggctctttctaccgcacaccctgcaggcccatccaggcccatccagacaataaacactgacggcccagagggtgggtgccaattccaccagcagctgcaactgaaaagcaaggttcagaaatgtcagatatcctccgggagctgctctgtgtctctgagaaggctgctaacattgcccgggcgtgcagacagcaggaagccctcttccagctgctgatcgaagaaaagaaagagggagaaaagaacaagaagtttgcagttgacttcaagacgctggctgatgtactggtacaggaagttataaaacagaatatggagaacaagtttccaggcttggaaaaaaatatttttggagaagaatccaatgagtttactaatgactggggggaaaagattaccttgaggttgtgttcaacagaggaggaaacagcagagcttcttagcaaagtcctcaatggtaacaaggtggcatctgaagcattagccagggttgttcatcaggatgttgcctttactgacccaactctggattccacagagatcaatgttccacaggacattttgggaatttgggtggaccccatagattcaacttatcagtatataaaaggttctgctgacattaaatccaaccagggaatcttcccctgtggacttcagtgtgtcaccattttaattggtgtctatgacatacagacaggggttcccctgatgggagtcatcaatcaaccttttgtgtcacgagatccaaacaccctcaggtggaaaggacagtgctattggggcctttcttacatggggaccaacatgcattcactacagctcaccatctctagaagaaacggcagtgaaacacacactggaaacaccggctctgaggcagcattctcccccagtttttcagccgtaattagtacaagtgaaaaggagactatcaaagctgcattgtcacgtgtgtgtggagatcgcatatttggggcagctggggctggttataagagcctatgtgttgtccaaggcctcgttgacatttacatcttttcagaagataccacattcaaatgggactcttgtgctgctcatgccatactgagggccatgggtgggggaatagtagacttgaaagaatgcttagaaagaaatccagaaacagggcttgatttgccacagttggtgtaccacgtggaaaatgagggtgctgctggggtggatcggtgggccaacaagggaggactcattgcatacagatccaggaagcggctggagacattcctgagcctcctggtccaaaacctggcacctgcagagacgcatacctagaggaactctaaccccggtgtacctgtataaactgaactgtgaaactgtttcggttatctctgtcttttgaggatggctttgtcctgttgctggttaacattcaccttcctcttttgaggagtatttttccattatgtattcataataatgttaatttcaataaatgacattcatgcagcaattatattggtgtatgaaattcttacagtgaatattgtgctgttagtgctgcttgaaacatttcaataaaatattgaccaggaaaaaaaaaaaaaaaaa

SEQ ID NO: 1750 - DNA, 548 bp, HOMO SAPIENS
  misc_feature (59)..(59): n is a, c, g, or t
  misc_feature (92)..(95): n is a, c, g, or t
  misc_feature (99)..(99): n is a, c, g, or t
  misc_feature (126)..(126): n is a, c, g, or t
  misc_feature (243)..(243): n is a, c, g, or t
  misc_feature (463)..(463): n is a, c, g, or t
  misc_feature (485)..(485): n is a, c, g, or t
aagcactaaggttttaagctgcctgaatcttttagtagaagggaagagagttttctctntctcttccctcctgttctggaatgctgccgaannnnatgntgtctgacaagcattggcactgtggtncggcagggtctctaagcacagtgcacagtcagtgaacttcttcattattctccagtccagagattctgactctctactaaaagtagaaagtcacaggactggaaagtcaaaagggtnccaatataaaaaacatccctgtgaaattctcaaatattagaaaattttcaagatgtaagaaaggcttttaatctgtattaatattttctcatacagtatatttgctgcaatttgaaaactccgtaaatatttactgtgagaattcaatgaaaagaatccagaagaaggaaagccactatctaaattagtcacagagtttcctttctgcgcaacagcaccngttcaagtgaacagcaccttancagcttgggctggctttgttcactgtcatttgatcaaagtgagtcattaaaagcaggtagttg

SEQ ID NO: 1751 - DNA, 2025 bp, HOMO SAPIENS
ctcattttctcttgccaccgccatggaagaagagtctttcacttcccgccatgagtctgaggcctccccagccatgtgaaactctttggcttctcgattggttctgaactcccaggaaggtgaaaaagcagcgtcattacttagcaccggaagccccggcactcaacagggatactgtgcagtcctgcatgtgagcagctcaagagttcttttcaagtgagacctgctgctaggagagaagtaagctgacagcacccagcaaccacactgttgagaacccctgtggcatcatgttcctgctgaggccggccactttcttgccaaactacttgcagccagtgactgagcatgggaaagcgagaccctagagcccagctattcctgcccagtgcaggactcctccagacttccagactgcactgcagactgaggcacttcctagctgagcctccttcttttcttctctcctttcagctgctcctgctccattgcccatttctctcacctttatcctgcacttctgcttccatcttggcatcttcttccctcaagacccaacctgacaccatcagtattattacactcttcatttcccagtggaggaggtggggatccaggcaagaaagacaaagcgtaaatatgctccctttaaaattttgtactgctctatcgcttctgggcctttgggctaagatcaagtgtaaaagtttgtactactcttaggtttgaggttcacatgaaaagaacatctcatcaacatttcaaaagaaaatttgaatgaattgtatgttgtactagtgtgtaaaagagagaccgtgtcatttattcataaaactgagtccagtgggacctgcccattcaatgcaaaaatgcaaaggtatgtaggatcttagaaaatgaaagacaatgctaaagacaggaaccatttccagcatctgttgttgaggtccgaatctggaaagactcagaatgtatttatcagaaaaacaatttccccagtaagacaatagctgcaaagctggtcatcacatgcaaatcttgaccttcacttttgcacaattttggaacatgtaactggtaagcactacctacaattttttgctttgcagacatggaaaatacaacatactgacaaaatggacttttaaaatttgggttttaccttaacaaaataaacttgagtctgattcttcatcttcaaacatattagaaagggataaaagaatttctctgtgatattttaacccttaggaatatctgaacatgagtgtgtttgtacacataatttaaaaattaaatatgtttcttttcatggcataattttctaaaggaaggagggacaggacttaccctcgctagagtctttcgaacattctggcttctttgctttgctctttttgtagggtggagagaggccttttggctctaacccctctggaatcacgaagatttaatattctcatttaaatatttaccagtagggttcaaaattatgtgaaatttaaaaatgtttacttcttagtaaacctacacacacgctgaatcttaattgcagtttcatctgtcatcatggctgagcgaaattctggcaagggcttgtggttctccaacctacatagacttaaacttaaggcttaagctaaaacatttttgtagataacattagtgattcacacaaatgtaaaatcttacacatgtgcttttataaatttagaaattctccataagggaaccctgttaatattttttcctccaagagtgttcgatttcaatcttcatagattaattgacaattgtcattgtgcaatttcatcttactcagtcctgaacgcagggctagaggaatggagaaaggaatggggctagaaattaccctgcttctatttaacaaactgtttttagtaatccagattctaaacaacttctgtatgtcccagttaaattactgtgcttcctattttcctcaatgtccctctaagtctatccttgggggcaaataaattaaagtctgaggacagtgtcagg

SEQ ID NO: 1752 - DNA, 433 bp, HOMO SAPIENS
  misc_feature (346)..(346): n is a, c, g, or t
gtgaaatcgtccagattccttgggcagacactcagggtgctttgtatttttgttcggggctgtgttttcagccttactgcttgccgttcccatatgtggactcttgcctgtcgcactgatttctgtcttcccaatccaatgctcatagagatcactaaggataatcctgcttattaagtgatgagttggtttgaattgtctctggtggtagtctaggaaagtgggatttctttttaattttggggttttgtttttgatttgtggtaccaatgaggattttatttgagacagtgtaatgggggccagatgagagaaccattttctttgtaagcttagcatggctggnctctagccagctccagatgaaattttggctaattatccctttagaaaagtcaggcttaagcagaactgggctctaggtcaattaacc

SEQ ID NO: 1753 - DNA, 5377 bp, HOMO SAPIENS
gcgcagccgcgcagcggtgggaggactgcggggctcttgaggccagctgcagagcttgtggaggccatggggcgcgtcgtcgcggagctcgtctcctcgctgctggggttgtggctgttgctgtgcagctgcggatgccccgagggcgccgagctgcgtgctccgccagataaaatcgcgattattggagccggaattggtggcacttcagcagcctattacctgcggcagaaatttgggaaagatgtgaagatagacctgtttgaaagagaagaggtcgggggccgcctggctaccatgatggtgcaggggcaagaatacgaggcaggaggttctgtcatccatcctttaaatctgcacatgaaacgttttgtcaaagacctgggtctctctgctgttcaggcctctggtggcctactggggatatataatggagagactctggtatttgaggagagcaactggttcataattaacgtgattaaattagtttggcgctatggatttcaatccctccgtatgcacatgtgggtagaggacgtgttagacaagttcatgaggatctaccgctaccagtctcatgactatgccttcagtagtgtcgaaaaattacttcatgctctaggaggagatgacttccttggaatgcttaatcgaacacttcttgaaaccttgcaaaaggccggcttttctgagaagttcctcaatgaaatgattgctcctgttatgagggtcaattatggccaaagcacggacatcaatgcctttgtgggggcggtgtcactgtcctgttctgattctggcctttgggcagtagaaggtggcaataaacttgtttgctcagggcttctgcaggcatccaaaagcaatcttatatctggctcagtaatgtacatcgaggagaaaacaaagaccaagtacacaggaaatccaacaaagatgtatgaagtggtctaccaaattggaactgagactcgttcagacttctatgacatcgtcttggtggccactccgttgaatcgaaaaatgtcgaatattacttttctcaactttgatcctccaattgaggaattccatcaatattatcaacatatagtgacaactttagttaagggggaattgaatacatctatctttagctctagacccatagataaatttggccttaatacagttttaaccactgataattcagatttgttcattaacagtattgggattgtgccctctgtgagagaaaaggaagatcctgagccatcaacagatggaacatatgtttggaagatcttttcccaagaaactcttactaaagcacaaattttaaagctctttctgtcctatgattatgctgtgaagaagccatggcttgcatatcctcactataagcccccggagaaatgcccctctatcattctccatgatcgactttattacctcaatggcatagagtgtgcagcaagtgccatggagatgagtgccattgcagcccacaacgctgcactccttgcctatcaccgctggaacgggcacacagacatgattgatcaggatggcttatatgagaaacttaaaactgaactatgaagtgacacactcctttttcccctcctagttccaaatgactatcagtggcaaaaaagaacaaaatctgagcagagatgattttgaaccagatattttgccattatcattgtttaataaaagtaatccctgctggtcataggaaaacacacggttctaattaagtgtgaaggtatagctattgcacttatgccatctccaaaatttcttaagtattctttcactatccattaggagtttttcttaaacttgtctgataataagaatcacctggagttaggaggtggtggttgcagtgagccaatctcaccattgcacttcagcctgagcaacacgagcaaaactccgtctcaaaagtaaataaaaataatcacctggagtttgttaaaccatatggattctcaagctcctctcttgaagattctgattcagtaggtctgggagtggcgcgctggattttgatcaaaattgtagagcattttaaggtgagtacctgagggagaacttaaagacatcttagttggggagtagtccttttgaattttacagctagatataatcttcagtcagataaaatttatgggagctggtgtcttatgcctgactcttagtaatttcataccggtttgaagtacgtgtgcccatgcctaaagccttgactttcagaatgttgtcttttgattcttctgtcttgatttgattaggggtgaaatttagaagtcttagtaatgtaacttgaagatgttaaacaaaaatctcaagtaaaatgaaaagcaaatatgggctactgaattaagaaactggcattctagtattaaatcctcacttcaggagcttttaaaaatactgagacccccccataaccagagattcagattcaaagactgaggataggaccttagcattgtagctatttaaagtttctaatgtgcacccagggttgggaatcaccaatgtgggtgtgaaaatgcctacaaagggttttagtgccttagaagtcctaagaagcccaatctgtatcaaagcagatccattttgcaaggatctttcttttagaactttctcagttctcttagtaagaactttagaagtaatcttgataataagcacagacagcctaacagcagaggcaacttaaataactcctgagcagttggcactagaacagaatacttggaatgacaccaaagttaaccaagtccagcatatgtccaaagagttaagtgtttcatttactgtagcattctgggtgagaaattggttgctgaaatcttaagacagtggtctcaaccttggctgcacattggaatcacctgtagggttttaaagcatccaaatggtaattaacaggcagcaaaacttcagaactagttctgcatctactgtgcaaagatcatgattaactgtcaagacactggtagaacagaacaagcaaaagattaagagttcaaaagtaaatgcaaccaatttaacatgtagtgttattaaaaaattacaaaggcctagaccagcctgggcaacatggtgaaaccccatctctacaaaaaatttttaaaaagttggccaggcatggtaatgcgcgcctgtggtcccagctgctcgggaggctgaggtgggaggatcacttgagccttggaggtcaaggctgcagtgaatcatgatcatgccactgtactccagcctgggcaacagagaccatcttaaaaaaaaaaaatccttccattgaatagaaacttcaaagtccttcatcagatcatggcattagctactttagcaaaatagtgtaaactttggttctgagtaaaaatgacttcttccctaccacagttgtgaatgttaatatgctgataaaactgccaagatatatttgataggtaggggattaaactcatggtttgtcaaaagagtgtttttttctagttttattcttaacagatatgttgaggtattcatatttgtttccttttgtggttttaatgaagacaatttgtaaagtaatactgttatgtatatgctaaatgttggtaaatactaattaatttccatcatttgtagacttgttttgcaatgggatatatttttacttataataccaatttaggctgggcgcagtggctcacgcctgtaatcccagcactttgggaggccaaggcaaacggatcacgaggtcaggagatcaagaccatcctggccaacatggtgaaaccccatctctactgaatacacaaaaattggctggacatggtggcgcatgtctgtaatcccagctactgtaatctcagctacttgggaggctgaggcaggagaattgcctcaaccgggaggcggaggttgcagtgagccaagatcgcaccactgcactccagcctggcaacagagcgagactctgtctcagaaaaaaaaaacaaaaaccagtttaggctgggtatggtggctcaccagcactttgggaggctgaggcaggtggatctcttgaggtcgggagtttgagaccagcctggccaacatggtgaaaccctgtctttactaaaaatacaaaaattagccaggcatggtggcgtgtgccagtaatcccagctacttgggaggctgaggcgcgagaatcgcttgaaccctggagatggaggttgcagtgagcagagatcgcaccactgcactccagcctgggcaagagtgagactgtgtctcaaaaggaaaaaaaaaaaattaaaaatgttgctggtattacatcaaacctactctggataaattttccagtagggcatctgaaattgctttggcaaaagcaaaacaggttatcaatacaccaaggacatcaagtagttttaatgcaactacagtgttgagtgcttttttactgggagaaaaatcctagcagaacctgctactctgggcgcattaggtagttttatgcaactatagtattaagagttttattggaagaaaaaacactgtcagagcttactgctccagacctttttttttaatagaagagactggtaaaaatgatgcaggggctgaatgaaagccagctctgctccagtggctctctgagttgagcatgcatcagttaccttaagggcttgttaaaacatcgctaggctccaccctgtttattcaataagtttgttatgggatataagaagatgcattttattaagttccccagtgatgctgctgttctactataggaaccacacttgaagaactagttctacaattcagctgtatgttgtaaaggagtcaagtcaatgaaggagttataaagagttgctgaaaaatggagtaacagtgtatgggacttcacatcagttctccttattgattgttagtttgatccctcttgttcttttgttgtaaacattttctataattaggaaatgccatttaagagtgagagaggtatatatctatgagccattgtgtttggtgttttacaagaactttaccatactggtgtgtagtccattctgtacagtttaaaagtgattcacgatttgcaggctttttatcagatcacaaaaaaatcagtctttaagcatttgcttggtaaggtttcttaagattaggtttataatacaaccatctgtaatgtatctctcgtttgagcttgtgggccatacaattcattaactagatgaatacattgtggacagcatcctcactacccctctctactcactcacaaagaaccatgatacactggaatgtttttctctggaatcctctttctactcttgtattaaaatttttccccacttcatgattatattcaaaataaacaactacatcatta

SEQ ID NO: 1754 - DNA, 3602 bp, HOMO SAPIENS
gagccgcacacagccatccatcctcccccttccctctctcccctgtcctctctctccgggctcccaccgccgccgcgggccggggagccaccggccgccaccatgagttccttcagctacgagccgtactactcgacctcctacaagcggcgctacgtggagacgccccgggtgcacatctccagcgtgcgcagcggctacagcaccgcacgctcagcttactccagctactcggcgccggtgtcttcctcgctgtccgtgcgccgcagctactcctccagctctggatcgttgatgcccagtctggagaacctcgacctgagccaggtagccgccatcagcaacgacctcaagtccatccgcacgcaggagaaggcgcagctccaggacctcaatgaccgcttcgccagcttcatcgagcgcgtgcacgagctggagcagcagaacaaggtcctggaagccgagctgctggtgctgcgccagaagcactccgagccatcccgcttccgggcgctgtacgagcaggagatccgcgacctgcgcctggcggcggaagatgccaccaacgagaagcaggcgctccagggcgagcgcgaagggctggaggagaccctgcgcaacctgcaggcgcgctatgaagaggaggtgctgagccgcgaggacgccgagggccggctgatggaagcgcgcaaaggcgccgacgaggcggcgctcgctcgcgccgagctcgagaagcgcatcgacagcttgatggacgaaatctcttttctgaagaaagtgcacgaagaggagatcgccgaactgcaggcgcagatccagtacgcgcagatctccgtggagatggacgtgaccaagcccgacctttccgccgcgctcaaggacatccgcgcgcagtacgagaagctggccgccaagaacatgcagaacgctgaggaatggttcaagagccgcttcaccgtgctgaccgagagcgccgccaagaacaccgacgccgtgcgcgccgccaaggacgaggtgtccgagagccgtcgtctgctcaaggccaagaccctggaaatcgaagcatgccggggcatgaatgaagcgctggagaagcagctgcaggagctggaggacaagcagaacgccgacatcagcgctatgcaggacacgatcaacaaattagaaaatgaattgaggaccacaaagagtgaaatggcacgatacctaaaagaataccaagacctcctcaacgtgaagatggctttggatattgagattgcagcttacaggaaactcttggaaggcgaggagacccgactcagtttcaccagcgtgggaagcataaccagtggctactcccagagctcccaggtctttggccgatctgcctacggcggtttacagaccagctcctatctgatgtccacccgctccttcccgtcctactacaccagccatgtccaagaggagcagatcgaagtggaggaaaccattgaggctgccaaggctgaggaagccaaggatgagcccccctctgaaggagaagccgaggaggaggagaaggacaaggaagaggccgaggaagaggaggcagctgaagaggaagaagctgccaaggaagagtctgaagaagcaaaagaagaagaagaaggaggtgaaggtgaagaaggagaggaaaccaaagaagctgaagaggaggagaagaaagttgaaggtgctggggaggaacaagcagctaagaagaaagattgaacccccatttccttaattatttcaggaataattctcccgaaatcaggtcaaccccatcaccaaccaaccaaccagttgagttccagattctatgtgaattaaaaagtcaatatatgtataattctgagatgacttaggttggacattcaatgttgtgctatgaatttcctctttatgcagagtatctgtttgcttgcagagtggctttctggcttgctgccagcctgtgcatggaccacgcttatgagttcaggatctacggcaatgtgaatcattcagatgtttacaataaaaaacaccacatgagtaaatgaattcactaatgttaatgttaaacttcatggaaaaatagtcctttgaaccttcggtggttagcaattaaagaccctgagttatgtgcaataaatagtaaataaagttataccgaatgatgtattttttgctgtggttgttacttaattaaaataccttaaagatggcaccaatataaagtatataccagtggactattgacctccaattttttaaaaagttgaaattttaacaattaccaatacttttttttcttccttcaattggaaattctgagggatacagttatgtcatgattacttgtgaaatctctccccacaaaaattttactgataataaacatgagtaaatgagaaagtctataaataacaatagactttgcctcataacacgtgttgtgttaggttttgggatggctttctagggagcaattctgaaattacttgacagatacactctttatggtaaacaggtcatttcagagtctagagtgctaaccattacactatggaaccatgataaataggtcatttcaaactgatatgtcacaatgcaatatggatagaatatgaatcccatacattcatccctataactgcattttaaaatatagtctaaatatcatgggaggaggttaaaacctgagaacatggtacaataagaaggaataattttttatctatatataatttcaggagaagggattaaaactaccaaaggttatttgccactccactgcaaacatgttgcctgcaatcctgagctcatgatttagtgtgttgttaagcgtaattctgttgcctcaagtaaataccacttaatgctacacatttttaaacctttaaaagctacagacacaagtaatgaaattatgagtcacttaaggggggaggtaatatgcttgtatgttacattgacattgctctgcatgtctctactgggagatatttggatttcaatgatagcttgactggttggacattgcatcaaatacacgccccatgtatcctttctgtcgtaaagttaagaacgctcttgcatttgatgtggaataaatatagatgatattactatctgctattctgcctttgttctgaaacaattgctttgtcagctaatttcattcaatatttgttttttagacgatctctataagttattaatttaacctgaaaccaaagtggtctccatttaaagttacttaatccctttgtaccacctatttctagttaaatatatgttgctatgcaaataggtaaagtgcttccttgccatgatggtaatggattggaactatgaaggctctcagtgtattggcttctgtaaagatgaggcgtctcctcagaaacaaaacttttcacatttctgcttactagacctgggttgatgtacatggtaagtctcaaacagatgcaagctatgtgcaaaaagtaactttagccaaatggaaatagctggatgctttgagaattacttggttgaagtaagaaaactgtaccatcctctatcctgtgtgccataataaaatagtaaaaaacctaaaaaaaaaaaaaaaa

SEQ ID NO: 1755 - DNA, 4930 bp, HOMO SAPIENS
aaacccgatctccttggacttgaatgaggaggaggaggcggcggcggcggcggcggcggaggcgctcggctggggaaagctagcggcagaggctcagccccggcggcagcgcgcgccccgctgccagcccattttccggacgccacccgcgggcactgccgacgcccccggggctgccgaggggaggccgggggggcgcagcggagcgcggtcccgcgcactgagccccgcggcgccccgggaacttggcggcgacccgagcccggcgagccggggcgcgcctcccccgccgcgcgcctcctgcatgcggggccccagctccgggcgccggccggagccccccccggccgcccccgagccccccgcgccccgcgccgcgccgccgcgccgtccatgcaccgcttgatgggggtcaacagcaccgccgccgccgccgccgggcagcccaatgtctcctgcacgtgcaactgcaaacgctctttgttccagagcatggagatcacggagctggagtttgttcagatcatcatcatcgtggtggtgatgatggtgatggtggtggtgatcacgtgcctgctgagccactacaagctgtctgcacggtccttcatcagccggcacagccaggggcggaggagagaagatgccctgtcctcagaaggatgcctgtggccctcggagagcacagtgtcaggcaacggaatcccagagccgcaggtctacgccccgcctcggcccaccgaccgcctggccgtgccgcccttcgcccagcgggagcgcttccaccgcttccagcccacctatccgtacctgcagcacgagatcgacctgccacccaccatctcgctgtcagacggggaggagcccccaccctaccagggcccctgcaccctccagcttcgggaccccgagcagcagctggaactgaaccgggagtcggtgcgcgcacccccaaacagaaccatcttcgacagtgacctgatggatagtgccaggctgggcggcccctgcccccccagcagtaactcgggcatcagcgccacgtgctacggcagcggcgggcgcatggaggggccgccgcccacctacagcgaggtcatcggccactacccggggtcctccttccagcaccagcagagcagtgggccgccctccttgctggaggggacccggctccaccacacacacatcgcgcccctagagagcgcagccatctggagcaaagagaaggataaacagaaaggacaccctctctagggtccccaggggggccgggctggggctgcgtaggtgaaaaggcagaacactccgcgcttcttagaagaggagtgagaggaaggcggggggcgcagcaacgcatcgtgtggccctcccctcccacctccctgtgtataaatatttacatgtgatgtctggtctgaatgcacaagctaagagagcttgcaaaaaaaaaaagaaaaaagaaaaaaaaaaaccacgtttctttgttgagctgtgtcttgaaggcaaaagaaaaaaaatttctacagtagtctttcttgtttctagttgagctgcgtgcgtgaatgcttattttcttttgtttatgataatttcacttaactttaaagacatatttgcacaaaacctttgtttaaagatctgcaatattatatatataaatatatataagataagagaaactgtatgtgcgagggcaggagtatttttgtattagaagaggcctattaaaaaaaaaagttgttttctgaactagaagaggaaaaaaatggcaatttttgagtgccaagtcagaaagtgtgtattaccttgtaaagaaaaaaattacaaagcaggggtttagagttatttatataaatgttgagattttgcactattttttaatataaatatgtcagtgcttgcttgatggaaacttctcttgtgtctgttgagactttaagggagaaatgtcggaatttcagagtcgcctgacggcagagggtgagcccccgtggagtctgcagagaggccttggccaggagcggcgggctttcccgaggggccactgtccctgcagagtggatgcttctgcctagtgacaggttatcaccacgttatatattccctaccgaaggagacaccttttcccccctgacccagaacagcctttaaatcacaagcaaaataggaaagttaaccacggaggcaccgagttccaggtagtggttttgcctttcccaaaaatgaaaataaactgttaccgaaggaattagtttttcctcttcttttttccaactgtgaaggtccccgtggggtggagcatggtgcccctcacaagccgcagcggctggtgcccgggctaccagggacatgccagagggctcgatgacttgtctctgcagggcgctttggtggttgttcagctggctaaaggttcaccggtgaaggcaggtgcggtaactgccgcactggaccctaggaagccccaggtattcgcaatctgacctcctcctgtctgtttcccttcacggatcaattctcacttaagaggccaataaacaacccaacatgaaaaggtgacaagcctgggtttctcccaggataggtgaaagggttaaaatgagtaaagcagttgagcaaacaccaacccgagcttcgggcgcagaattcttcaccttctcttcccctttccatctcctttccccgcggaaacaacgcttcccttctggtgtgtctgttgatctgtgttttcatttacatctctcttagactccgctcttgttctccaggttttcaccagatagatttggggttggcgggacctgctggtgacgtgcaggtgaaggacaggaaggggcatgtgagcgtaaatagaggtgaccagaggagagcatgaggggtggggctttgggacccaccggggccagtggctggagcttgacgtctttcctccccatgggggtgggagggcccccagctggaagagcagactcccagctgctaccccctcccttcccatgggagtggctttccattttgggcagaatgctgactagtagactaacataaaagatataaaaggcaataactattgtttgtgagcaacttttttataacttccaaaacaaaaacctgagcacagttttgaagttctagccactcgagctcatgcatgtgaaacgtgtgctttacgaaggtggcagctgacagacgtgggctctgcatgccgccagcctagtagaaagttctcgttcattggcaacagcagaacctgcctctccgtgaagtcgtcagcctaaaatttgtttctctcttgaagaggattctttgaaaaggtcctgcagagaaatcagtacaggttatcccgaaaggtacaaggacgcacttgtaaagatgattaaaacgtatctttcctttatgtgacgcgtctctagtgccttactgaagaagcagtgacactcccgtcgctcggtgaggacgttcccggacagtgcctcactcacctgggactggtatcccctcccagggtccaccaagggctcctgcttttcagacaccccatcatcctcgcgcgtcctcaccctgtctctaccagggaggtgcctagcttggtgaggttactcctgctcctccaacctttttttgccaaggtttgtacacgactcccatctaggctgaaaacctagaagtggaccttgtgtgtgtgcatggtgtcagcccaaagccaggctgagacagtcctcatatcctcttgagccaaactgtttgggtctcgttgcttcatggtatggtctggatttgtgggaatggctttgcgtgagaaaggggaggagagtggttgctgccctcagccggcttgaggacagagcctgtccctctcatgacaactcagtgttgaagcccagtgtcctcagcttcatgtccagtggatggcagaagttcatggggtagtggcctctcaaaggctgggcgcatcccaagacagccagcaggttgtctctggaaacgaccagagttaagctctcggcttctctgctgagggtgcaccctttcctctagatggtagttgtcacgttatctttgaaaactcttggactgctcctgaggaggccctcttttccagtaggaagttagatgggggttctcagaagtggctgattggaaggggacaagcttcgtttcaggggtctgccgttccatcctggttcagagaaggccgagcgtggctttctctagccttgtcactgtctccctgcctgtcaatcaccacctttcctccagaggaggaaaattatctcccctgcaaagcccggttctacacagatttcacaaattgtgctaagaaccgtccgtgttctcagaaagcccagtgtttttgcaaagaatgaaaagggaccccatatgtagcaaaaatcagggctgggggagagccgggttcattccctgtcctcattggtcgtccctatgaattgtacgtttcagagaaattttttttcctatgtgcaacacgaagcttccagaaccataaaatatcccgtcgataaggaaagaaaatgtcgttgttgttgtttttctggaaactgcttgaaatcttgctgtactatagagctcagaaggacacagcccgtcctcccctgcctgcctgattccatggctgttgtgctgattccaatgctttcacgttggttcctggcgtgggaactgctctcctttgcagccccatttcccaagctctgttcaagttaaacttatgtaagctttccgtggcatgcggggcgcgcacccacgtccccgctgcgtaagactctgtatttggatgccaatccacaggcctgaagaaactgcttgttgtgtatcagtaatcattagtggcaatgatgacattctgaaaagctgcaatacttatacaataaattttacaattctttggaaaaaaaaaaaaaaaaaa

SEQ ID NO: 1756 - DNA, 823 bp, HOMO SAPIENS
aaacgcgggcgggcgggcccgcagtcctgcagttgcagtcgtgttctccgagttcctgtctctctgccaacgccgcccggatggcttcccaaaaccgcgacccagccgccactagcgtcgccgccgcccgtaaaggagctgagccgagcgggggcgccgcccggggtccggtgggcaaaaggctacagcaggagctgatgaccctcatgatgtctggcgataaagggatttctgccttccctgaatcagacaaccttttcaaatgggtagggaccatccatggagcagctggaacagtatatgaagacctgaggtataagctctcgctagagttccccagtggctacccttacaatgcgcccacagtgaagttcctcacgccctgctatcaccccaacgtggacacccagggtaacatatgcctggacatcctgaaggaaaagtggtctgccctgtatgatgtcaggaccattctgctctccatccagagccttctaggagaacccaacattgatagtcccttgaacacacatgctgccgagctctggaaaaaccccacagcttttaagaagtacctgcaagaaacctactcaaagcaggtcaccagccaggagccctgacccaggctgcccagcctgtccttgtgtcgtctttttaatttttccttagatggtctgtcctttttgtgatttctgtataggactctttatcttgagctgtggtatttttgttttgtttttgtcttttaaattaagcctcggttgagcccttgtatattaaataaatgcatttttgtccttttttagacaaaaaaaaaaaaaaa

SEQ ID NO: 1757 - DNA, 206 bp, HOMO SAPIENS
  misc_feature (74)..(74): n is a, c, g, or t
cattaaccacttctgcctacattcactgggcaaatcaggtcccatggcaacgtgagagggcatgtactctcccntgaggggcagcaaacagtaactaccaaaaccaatgaatattttcattttaatagtttaatgtatgtttatagtaatataaaaagtcttttcagtgtgtgaaaaaaagacatgttgtaggatgggatcctgga

SEQ ID NO: 1758 - DNA, 4643 bp, HOMO SAPIENS
gaggtgtgctgggagctgtggtccgggtcggcgggcgcgcaagttggctagtctctgcggccacctccggaagggtccgccggctgtgctggtgaggcccagttccaaggctccggcatcctgtgtctcactgagcactgctgcccgatggccatccccaagcactccctgagcccagtgccgtgggaagaggacagcttccttcaagtgaaggtggaggaggaagaggaagccagcctctcccagggcggagaatccagccatgaccacattgctcactctgaggctgcacgcctgcgcttccggcacttccgctatgaggaggcatctggtccacacgaggccctggcccacctccgagcgctgtgctgtcagtggctgcagcccgaggcgcactccaaggagcagatactggagctgctggtgctggagcagttcctgggtgcgctgcccccagagatccaagcctgggtgggagcccagagtcccaagagcggagaggaagccgctgtgctggtggaggatctgactcaggtgctggacaagagaggatgggatccaggagccgagcccacagaggcaagctgcaagcagagtgacctgggagagtcagagccatcaaatgtcactgagaccctcatgggaggtgtttcccttggacccgcctttgtcaaggcatgtgaacctgagggcagctcagagaggtctggactatcaggggagatctggacaaagtctgtcacccaacagatccacttcaagaaaacttcagggccttacaaggatgtccccacagaccagcgtggccgtgaatctggtgcctcgaggaacagttctagtgcgtggccaaacctcacctcccaagagaagcctccttcagaagacaaatttgatctggtggatgcttatgggacagagcctccatacacctactcagggaagaggtcctccaagtgtcgcgagtgtaggaagatgttccagagtgcttcggcgctcgaggcacaccagaagacccattctcggaagaccccatatgcctgcagcgagtgtgggaaagccttcagccggagcactcacctcgcccagcaccaggttgtccacacaggggcgaagccccatgagtgtaaggaatgtgggaaggccttcagccgagtcacccacctgactcagcaccaaaggattcatactggagagaaaccctacaaatgtggggaatgtggtaaaaccttcagccgcagcactcacctcacccagcaccagcgggtgcacacgggggagcggccctacgagtgtgacgcgtgtgggaaagccttcagccagagcacgcacctgactcaacaccagcgcatccacaccggggagaagccctacaagtgtgacgcgtgtggccgagccttcagcgactgctcagccctgatccgacatctgagaatccactctggagagaagccatatcagtgtaaggtttgtccgaaggcctttgcacagagctcctccctcattgagcaccagaggatccacacgggagagaagccttataagtgcagcgactgtgggaaggccttcagtcgtagctcagccctgatggttcacttgcggatccacatcacggtgctgcaatgaccggaagtcgcccctgggggcgtagcacagcgtcttctcggaggctcgaggtctaagagaaacgctgagttcctgaagagccacagacagggtgggtgattgatgagttgtcaaaatgataggtgcctgagggcagactcgggctgtctaggaaccactctgcatttgaggaaccctgatgagcacaaggtgattcaggccagctggagaagcttccagaagggccctgcactgctaccctctatttcccactcagggctgtcccagagagaaggcagccgaactgaggatttagactggttctgagggccagggcaaatgaaggcgcatgtctctcagaactcagcgtcccaagacgctctgggcgggccaactgtagcttgttctcatgtggttcttcttgcctgcttttctgctgcttagcccagaacggacacctgccatgcccacctctgtgccttggcacctactatttccactccagactattttgtgcctaactgcaaggctgacttttgagactgcctcttccacgatgccttttctacactctgcctctctcatggtttcctgtcgtaatcagtggtgctgcttgacacctgcccagcatgttcctgtctctccttttccttccacatcccaccagtcaccagcgctattgttttaacctaaagcttatctgtaattcacctccttttccaccactgctaccttatgtgagccctcattgcctcttgcctggattatagccggggtctccttcctgaccacttcctgcctttattctctgcccctgtatcactctccaggggactcttgatattacttagatctgactgtgtcactccaaggtggaaagctctccaacccatcttctacagcacagcttcctgaacagggtataagtatgctgagatgcaggctgctctgggccccgagcaacctctccagttatcctcatatgcatgtatgaatactgtcatttttctgtgcgtgcagtgaaaatggcctcatctcataccatggctccaccttccatacaccagccacacggaactactgtggtccctgaaggagccatacattttcccacttatgtgcctttgtacctgtgcctggaaccctcctcttctttttctttttcttttcttttctttttttttttttgagatggagtctcgctctgtcgcccaggctggagtgcagtggcgcgatctcggctcactgcaagctctgcctcccgggttcatgccattctcctgcctcagcctcccaagtagctgggactacaggcgcctgccaccacgcccagctagtttttttttttttttgtatttttagtagagatggagtttcaccatgttagccaggatggtctcgatctcctgacctcgtgatccacccgcctcggcctcccaaagtgctgggattacaggcgtgagccaccgcacctggccctcctttttcatctaaggtgtttcaaatgttgcccaaagaaacctccctgctctccgggagcagacttcagcttgccctctctgcttccagagcacctcctagatacctctcttacaactcctgccaccttgttttacttatttgctccttgtagagctgccttttccaaggataccataaactcctgagagcaggggccatgtcttactctcagtatctacaacacacaagactcagtaggccctgactgatgtctcttacatgaatgtgactggtgcccccaggaggcagtcaccgtgctgtctctgccccacattgtccttatgtatgtttacatggatgtctccccagcagcttgaaccctggagagcaagaataatctgattttcctgggggccagcacccaaataagcctggcatgcagtggcctcaataaaatgtgactgtattgagtcattttctagggccccagatcccctggtgtcatggacttagtctttgccagcattctgtccatgtgttctctggtcttctctcacaatgctgcatccctgtcccatttttagggtccctgtctatcactggatgctgcagcttctgttcattactgttagtgtatcattcttcatgcctctgtttctgtgatggtctcatcatatgtgaaccatttgacctggcgtattgtgtactagtcaccgtcaccatctctccatatgtatctccctgtatttcgggcccattccctctatgtcaagagtaaatagaggcacagagactgatgagaaacgttcataacatgaaggtaagactcagggagacagagactttgtggaagtatctctgagggagtcccagacacaggcagagagggccacatatcgtgtgccagaggctgagagactgagagggatgacaggcttaggggaaaactcagagaggagagatgcacattcctagtgaaattgcacaggcttccagcatgctggagggaacagaaaaggcatgggcctgaattcaggctgcagagcctgactcctccctgtggctacttttgggacctaagataagtgactttcctgaacctccatgacctcctcatatgtaaaccagggacaggacccaccttgtgtagtgcctgacccaaagcctggccctgcacactgtctctgactcacagcaatcatcagcacctctctttgcctcctacttgctcagtctctgtcacaagaactggatctccatccccttgatgctctgagcatcttcacccatttggtcgttgagacatatctgtccatgtctgtctaaaaggggaggagatgagggagaaaaaagggaatctactcagagcctgtgtgtgctgcccagtctaccaaataatttatatacatctcagtcctcacacaaccatccctgttttatagaggaggaagtggcttagagaatgtaactgaccaaagtcacactgccaggaactggaagcactaggatttgacagcatatccaaatatgtcagcaatttcaataaacatgactgtactcaacaaaccaagtgtaaagac

SEQ ID NO: 1759 - DNA, 317 bp, HOMO SAPIENS
aaaggctcagtatgatttcttgaatagattgtttaagctattttcaaaacaggacttggtcaggggcaggtagtcttaaatgttcagaagccactggatggaaaattgtgagcacataagtgtttttcttggtcaaccatgtcattttatagccaaagtttgacttgacatactggaattaatccacacgactttgaaaagaataaactctttaaaaagagagtgagcgctccgagggtgttatgagagtcactgtctgaaaccctattgatcatattgtggcagaagaaatagagtcctgccatgaattatacttt

SEQ ID NO: 1760 - DNA, 1717 bp, HOMO SAPIENS
agcttcgcgcttgctcacgaacttgcctgcctggctggcgcacccagcccctccttccattccttcttccccctctctgcagcctctgccagcccgcactgcgcatgctttctgacgccccctttggtccagcgtgggaggaggggatggaaatgaggttgggctaagcagcttgcgcgcgctcccttgcctgccctcccccgacgccggacgcgcgccgggcggggcagctccgctggtccgagggcagtgcagcagcggcgacagcggctgcggccgtggccgtggcgggaggagccggaagccccgcccccggggaggggccgtcctgcaggtcccccctctatcctccacggccccatccaagccagggatgaaatttaacggcaagaagggcgcagttgacgcggcgtcaatgaactgagactaagtcaaaagccgggccctccaaccctatccccatcagcctggtcatcaccggcgtcacccccgccccgcgccctgcccctaggttcctgtgccagcaagatgctggagcgaggcgcggagtccgcggccggggctaccgatcctagtcccactggcaaggaaccagtgaccaaagaagctccccaccagggcccaccgcagaagcccagccagtcagctccagggcccaccgcgtccgcgggctcgcctccccggcctcgccggcggcccccgccccagcgcccgcaccgctgccccgactgtgacaaggccttctcgtacccgtccaagctggccacgcaccgcttagcacacggaggcgcccgaccccacccatgcccagactgccccaaggccttctcctacccctccaagctggcagcccaccgcctcacgcacagcggcgcccgcccgcacccgtgcccacactgcccgaagtcctttggccaccgctccaagctggcggctcacctctggacccacgcacccacccgcccctacccgtgccccgactgccccaagtccttctgctacccttccaagctggcggcccaccgccacacgcaccacgccaccgacgcccgcccctatccttgcccgcattgccccaaggctttctcatttccctccaagctggccgcccatcgcctatgtcacgaccccccaaccgcgcccggcagccaggcgactgcctggcaccgatgctccagctgcggccaggcctttggccagagacgcttactgctccttcatcaacgcagccaccaccaggtggagcacaagggggagagagactgagccctcccttggctcactgtccccttctgccgccagccctagccagtaagaggtgggatttctaagaccgactgtatgagctcgcctcttccagatagctggcagagggcagggcaagggattggccatttatactgggctcgagctcagaagcccgaggaactctttgctcccctgctttggggagatctcaaaccatggacgtggagctgtggtttgacagcgctggctctgcttctccccacacacttacatggcaaaggtaaaaagtctgctactatcgtgggttgatgaggattgtgggcaaacaggctctcttgttaaaagtttaaactggtgtctccactttggccatatgacggtatctaagaaattgaaaatacatacatgcttgtctcaactcttccacttgtaggaatttattctataaactcatgaatgtgaaaaaaaa

SEQ ID NO: 1761 - DNA, 9809 bp, HOMO SAPIENS; identical to SEQ ID NO: 88

SEQ ID NO: 1762 - DNA, 393 bp, HOMO SAPIENS
  misc_feature (26)..(26): n is a, c, g, or t
  misc_feature (37)..(37): n is a, c, g, or t
gcatctagtgatatgccaaagctccntctatcctggnagctcttcctggtagttcagtaagcgtttgccaaactatttctaccttatgagaaagatgaaaaaaatttggctttgaggagctgggacttgccagggtcacatgatatacagatgttatgcatcctgactttttggctagtgttactcattttgccccagttaagtcaaaacttttttttcctttttttttttttagatttttgttgacactgaagtcaactaagaacaaacattgctttaaaatactttctcagccgctccctgcctgaccaaaccctcccactggaaaaaataataataaagtactttcccttgccgggtgcagtgtctcacagccataatcatagcattttg

SEQ ID NO: 1763 - DNA, 240 bp, HOMO SAPIENS
gtagcaagtcctcttaaaatccacttttagacacttcagcaatacagacctgaagtccaaacctagagctagcagcagggcaacaaactgcccttatttgccaagacagggctttcctgggacataagactatcggtgctaaaactgggagaatccggggcaaatcaggacagttggtcactccagatgtctaacaaaatgactcttaatagaaagtagctgtcacattgatgcattgtt

SEQ ID NO: 1764 - DNA, 1536 bp, HOMO SAPIENS
acagagcttcaaaaaaagagcgggacagggacaagcgtatctaagaggctgaacatgaatccacagatcagaaatccgatggagcggatgtatcgagacacattctacgacaactttgaaaacgaacccatcctctatggtcggagctacacttggctgtgctatgaagtgaaaataaagaggggccgctcaaatctcctttgggacacaggggtctttcgaggccaggtgtatttcaagcctcagtaccacgcagaaatgtgcttcctctcttggttctgtggcaaccagctgcctgcttacaagtgtttccagatcacctggtttgtatcctggaccccctgcccggactgtgtggcgaagctggccgaattcctgtctgagcaccccaatgtcaccctgaccatctctgccgcccgcctctactactactgggaaagagattaccgaagggcgctctgcaggctgagtcaggcaggagcccgcgtgacgatcatggactatgaagaatttgcatactgctgggaaaactttgtgtacaatgaaggtcagcaattcatgccttggtacaaattcgatgaaaattatgcattcctgcaccgcacgctaaaggagattctcagatacctgatggatccagacacattcactttcaactttaataatgaccctttggtccttcgacggcgccagacctacttgtgctatgaggtggagcgcctggacaatggcacctgggtcctgatggaccagcacatgggctttctatgcaacgaggctaagaatcttctctgtggcttttacggccgccatgcggagctgcgcttcttggacctggttccttctttgcagttggacccggcccagatctacagggtcacttggttcatctcctggagcccctgcttctcctggggctgtgccggggaagtgcgtgcgttccttcaggagaacacacacgtgagactgcgcatcttcgctgcccgcatctatgattacgaccccctatataaggaggcgctgcaaatgctgcgggatgctggggcccaagtctccatcatgacctacgatgagtttgagtactgctgggacacctttgtgtaccgccagggatgtcccttccagccctgggatggactagaggagcacagccaagccctgagtgggaggctgcgggccattctccagaatcagggaaactgaaggatgggcctcagtctctaaggaaggcagagacctgggttgagcagcagaataaaagatcttcttccaagaaatgcaaacagaccgttcaccaccatctccagctgctcacagacaccagcaaagcaatgtgctcctgatcaagtagattttttaaaaatcagagtcaattaattttaattgaaaatttctcttatgttccaagtgtacaagagtaagattatgctcaatattcccagaatagttttcaatgtattaatgaagtgattaattggctccatatttagactaataaaacattaagaatcttccataattgtttccacaaacact

SEQ ID NO: 1765 - DNA, 1282 bp, HOMO SAPIENS
ggcgggccgaagcgaggtgcggctccctgtcgccgcggaggggcgggggcaggacgcgcaactccggccggagctgtccggggtcgtgagccggccccgccttggtggcggcgccccctcgcggtccagaggcagacgcatcgggtgggctcgggtctccagcccggccgggaggagggaccgggtctgcggagcggggactcggggcctcggcggggcgcgcacacgcaggcggggcggcccggggtgcggggcctctgcgcggctgaccaggctcccagagcgtcagcgccgcccatggccgagccgctccagccagaccccggggcggccgaggacgcggcggcccaagctgtggagacgccgggctggaaggccccggaggacgccggcccccagcccggaagttatgagatccgacactatggaccagccaagtgggtcagcacgtccgtggagtctatggactgggattcagccatccagacgggctttacgaaactgaacagctacattcaaggcaaaaacgagaaagagatgaaaataaagatgacagctccagtgacaagctacgtggagcctggttcaggtccttttagtgagtctaccattaccatttccctgtatattccctctgaacagcaatttgatccacccaggcctttagagtcagatgtcttcattgaagatagagccgaaatgactgtgtttgtacggtctttcgatggattttctagtgcccaaaagaatcaagaacaacttttgacattagcaagcattttaagggaagatggaaaagttttcgatgagaaggtttactacactgcaggctacaacagtcctgtcaaattgcttaatagaaataatgaagtgtggttgattcaaaaaaatgaacccaccaaagaaaacgaatgagaaaaatgaaaggaagttctgctgtcagaggcaaaacatctgtttatcatagacatcaacatgacctataagtaaagtgcgtgtctagtgtcttctattgagagtactactattaattaagcttatttccaatgtgcctttttaatgcttgaagttttatctacatacacaggtaacagaggacagtagtctgtaaacatataaatcggtcataactatcgtggtctttatttctgtgaggatctagggaaatttcatgtcacttccctccttcactgcatcacaatcatattcccttttttttttcttggatttgtgtcagttggatgatatcccctccagatagtatcaataaaatgttaaaatt
